United States Patent Application Publication US 2016/0002648 A1 - sequence listing, part 4

SEQ ID NO: 4297 - DNA, 28458 bp, Sorghum bicolor
ttagaaattcgtgatatcagtaacctacgtcaaatttttcatacgattggcataaaaatgaccctaataacaaatgttaagattgaccacgcgtaccaggacaaaactaatagcaaggccaagtacaacttgtttttataacagaacgcttaacacttaagctggtgccactggcgcggggacctgtgctcagttttttttttaacatgatcgtggtagctttaacggggcccacatggaaactttttcgaagcagagaacaagcgtccaatgaaatggattcttagcggtctgaaacatttgtcatctttcgtcttcctttcgaaaagcggcatgttgagtgtgagaccgaacatcccctgcacccttcggagagaaggaagagatcgcctggactagaacctaggatcacaagccagctactggtccttcgcattcccagcttaggaatttaggatgtgtgtttagttaataacctcgttagtttggctgaaaagccatgacacaaagcattattcgttgatttgttgtgagataaaaatactgttgaatgactgctagattcggctaataaactcaagcaaacaagcttccaagacgaaacaaaatggctaccacaatcccactgatgcatgtgtactggagggatgggagagggaaattaaagtggtgtttatttcattttctactctacaatccacgtaggactatatattgggatttaggagggaatagattttcagagagggtcctaggaatgtttcattaattaaatttcatatatacttgtagtgtcctagaataaaatgatgttttagattgattctaagtcaaactactttagtattattaagtatttcatgataattttgaataatacttatttattattatgaacatcattattatttttatgttcctatagagcgtgaattattttgggacggtgagagtaaatatgaggccttgtttagttcctaaaaaattttgcaaaatttttcagattccccgtcacatcgaatctttagacacatacatggagtaataaatataaacgaaaatataaactaattgcacagtttggtcggaattaacaagacgaatcttttaagccaagttagtccatgattggacaacatttgtcaaatacaaacgaaagtgctacagtgtcgatttcccaaaattttttggaactaaacaaggccgtagacaagctatagcgtgaagaaaagcaattaagttaacaggatttttgcaaatatggatctacaagatgctaataaagtttatggaagcttaacaaactagaactgtgataataattggataaagtgtggactgcaaattgattgtttatggccatgagccacaccatagaggcattattattagacacgaacgtaatccagaggagaggggagaacaaaaacctcacaaacgcagagtgtccactacccgggcccactggtcagttgtcaccagtccacctcgtccccttcgactcgttgccggatgccagtgcagcagtgctacgccaccctccgaccgcgggtcccccggaatccgagactcccgtggcggtgccagcgtcgcaaattccttgcttccgtcgccggccatcccaattccaaaaacccccccgcaccaggcacatccatccctccccgccaaaaagcaacgttgccatctcatctcatctcatcgcccgaaagccaaagcggcggccaaagccagaaagcgaaaaagcgcgctccacactcagcaccagcaccaccaccactgccgccccgcccgcctcgagccctcctcctcctcctgctgcctcccctctcttaagacggagatgccttccccagctcccttcccttgctcacctcgcttcctcgccacccccactttccccgccgctgccgcgctagtcagtcagcagcaccaacttcatcaccctgcgcttgcgcgcggcaacaccgtaccaaagcgcgccgtcgggatcggcgggaatggcgagcggcggcgccggcccgtcggggccggtgcggtccacctcccaaacccggcagcggacgatggggcggatacccacgcgcgcctacaccatgcgcccggacggattgtccggtgaggacggccccggttttgaggaggaggagctcgtgccctcgtcgctcgcgcccattgtacccatcctccgggccgccaatgagatcgaggaggagaacccgcgcgtcgcctacctatgtatgggcccgtttgcttattttggattgttagtcaagtagctgtgatgcttatgggttattaattaagagtatcgcacacgcgtgttgtcatgacacttacttgaacaactggggaaaacatcagtttttttatcactgcatccagttatcttctgttgttttgacttgttgatcgtcgctctctgaacaaaggtcgctttactgcattcgagaaggctcatcttatggacccaatctcaggtggacgtggagttcggcaattcaaaacatacctcttgcataggcttgaaaaggtatgattatgctcgatgctcaccagtccatcgctcattgccaaactgaaccatctagttatctgccgcgataaacagaatgttgtcttagctttggtaccatggtaattggatgatgaaagcctaaaaacaaggtttcatttctcagttttttctgctcatctggaccctactagaaccaaagatgccatcatctgtttgtatcttcttgttctatttttttttaaaaaaatgaattcttgctttctagctttacacttcttcttgagccataagtgtcttagtcataagcttagagtgctttttgaaggaatcaattagccctctgagttaagtgtttcctgcatgagaaaccgggtgccagactatacaccatttggcacccttttcttctgtgtgttactcacggtggtagcttgtctcagtacttcctgacacattgtttgtctgtattgccaacattgtgcattgtccattactatagagttaaatgtcgctatgtcaactactctttctgccatccagccaaaaaataaattacagttggtttgtcaatgtttgctctttttttgtctggcaggatgaacatgagacaaatcgcaggcttgctacaactgatgcaaaggagatacaaaggttctatgagcaatactgtaaaaaatatctagaggaaggtcatgacaagaggaaaccgtaagagtggtcaatgtttagctgtatcagcaatcttacaaactatcatattttactacattaacttacttttttgttgagtgacttagggaggagatggctagacactatcagattgcatctgtcctatatgatgttctgaaaactgttacacctggcaagaatgaggttttgtatccaattaatacatcaccgtacaacatgctatttctatatcatgcaatattttgaccttttgcttttcagtatgataagtatgctaaaggggttgaaaaggagaaagcatccttctcacagtacaatattctaccacttaatatttctactccaagacaaccaataatggaaattcctgaggtcatataccttaagtttcatttactttaatttaaaaagtaccacatgtagtatgaatttcacacgctttacaaattacagatcaaagcagcagtggcgctccttcgtcagatggatgaccttccaatgccaaggattgaattaacacaaagctctgatggaaaaacagtgcctgatgaaatggacaaacctttggtccaggatttgcttgattggctttggcaaacatttggatttcaggtgccaactaaatgaataacagagagatttcattttctagactgtgctgtgttgccttatcaaattcaaatcttgcatgtctgattggaaattcaattctttctatatcttctaaatattaagaaggaaatggaaattacatgtatcaaatatcgggttggatctcagattttgtttgtagtttctttgcaggtgcatttctttaaagacatggattgtacagtgctgtgcatttgagtaacaagcatttagggaaaaataaattcttaatatcatgtactgttttattgttgtagaaaggcaatgtcgagaaccaaaaggagcatttgattttgctccttgcaaacattgacatgagacaacagggtacttcccaccatagtgggagacatgttcacgtggtaaaaattcatttcaaacttcttattttggtttaattgaatcaattcaacttcttaggggcttttttgcatatacttaccctttgcagatacatagtagcacggtgatatatttgatggacaaaattttccagaattacaactcctggtgtcgatatttgcatctggattcaaacattatgtaagtatgcatcagttttatgtgcatcttttttttaaaaaatctttacctaattaactatgtgaacttttgaatcacagaatcgcaagcgatgcctccacacaacggccagagcttctatacataggactgtatttactgatatggggtgaagcttccaacgttcgcttcatgcctgaatgtctttgctacatcttccaccatgtaagttgcaacataattatactttgtttgttcattccttttgtgaagttttgaccttaggtcatgtttcttctttgatatatctcattgaaaatttagtttgtccagttctttttgtgtgtcaagctcatacgtaaaccttctttgatatacataaatctcaaataatagtgacatgcagtgctggcatatgaagttgctttatcagattttatgctctctatctatgaccttcataatattggttttacaaacctgtttgtggtgcactggtctgcatggatatcacatgatgacatgatgctgtactgtccatatatgaatgttattccgtcactgcatagtcctgataatacagttaacttctgagtatgcatatggggtttctcaatatctgtgaaaattgaaaatgggaaagcatttttgttactgagggacagtattgacacagagcataatggtttgttctgtgccccccatgtcaacaagggaccggtccagacaataatttaccacctgatgcaaaatggcattgatgtctttaggcataggcagcatgtaagcatctagagaacattaagtctatccatataacaagacactatatgtgtgaattgaatactgttaaacttcaggagagacctcaacccaccacaattctttttttctcgaatacgcagcagagctgtgtatcattccattaagaagagttgtaaaatacaacacgcacaccacccacacaccctttaactttcagtcacattcacgcctgtcaaaatagaacatgaccaactgctaacaatggtgatgggcttaaccgtttgctacagggagccgtgcaagctcccttgctccagctaaaaaccatagatgcgcttcctcttcgatgtgtgttaggattctctgcacgtttggtgtttttttgcgagccttatttacgtttggtgatgccccgttgaatacacaatcgtttcacaatgttggaaactatcatacactaattttttgggttaaccctagaagggtagcaacataattctccatacatgggcctcatgggcctaaactcataccccaacacgcccccgcagtctgaactaccggcgtagcggagttgtaggttgtacatgaaaagaagcacacacacgagcccccccacagacacaactagccaccggtgatgttgaggctggagcggaactcggtgaaggtcgaggatgggaggcccttgatgaagatgttggcgaactgggaggtggtcgggacgtggaggacccgaacattgccgatcacgactcgatcacggacgaaatgtagatcgatctccacatgcttagtcctctggtgctaaacagggttggtggagagatacactgcacttacgttgttgcagtagactagcgtgctccgagagagggctatggagctcggcgaggagctgccggagccaggaagcctcagctacgccgttagcaacagcgcggtactccgcctcggcactggaggcgggagacgaccggctgatgcttggacgaccaggacaccaggttgccgcccagaaagacggtgtggccagaggtggagtgccgagtgtttggacacccgtcccagtcagcgtcagtgtagacgacgagctcggcggaggaagatcggtgaaggagtaggccatagtcgacagtgccgcggaggtagcggaggaggcgcttgagagcagtgaggtggggctcttgaggatcatgcatgtgaagacatacctgctgcacgacataggtgatgtccggcctggtgaaggtaaggtactgaagtgcaccagcaagactccggtaggcagtgggatttgccacgggagtgccctcggcctttgacaacttgccctgtgtgtcaaccggagtggagcaggtcttgcagccagtcatccctgctcgctccaggatatcaagggtgtattgccgctggtgaagaagtccggtggggcgaggctcaacagtgacccctaggaagtggtggaggacacccaggtccttcacaggaaactccagctgaagagtgctgataatgcggcggagaagtgacggaccggaggcggtgaggacaatgtcatcaacatagagcagcaggtaggtggtctcagctccgtggtggtagatgaacagagacgtatctgacttggcctccacaaagcccagggacactaggaaagcagcaagtcgagagtaccacgcccgaggggcctgctttaggccgtagagcgacttgttgagctggcagaccaagtcgagatgagaagagtcaacaaaccccgccggctggctgcagtagactgtctcgttgagcgtcccatgcaaaaaagcattcttgacgtccagctgatgcacgggccaggagcgagcgagagccaaggagagcaccgtgcgaacggtgcccggcttcaccatcgggctgaaagtcttgtcgtactcgaccccagggcgctgagtgaagccctggagaacccagcgagccttgtacctctcaagggtaccatcagcccgccgcttgtgagtccagatccacttgccggtaaacgacgttagcgccgggtggacggggcaccagatcccaggtctggttggcgaggagagccacatactcctcttccatcgcgcggcgccagtgagggtccgacaaggtgtcacggacggaagagggtacaagagagacctgcgggtcactgggcatcgccgcaagagcccgggaccgcagggtccagccgcgtgtcgcgtcaccatagggtgaatgtgccgcgggtgtcggtgaaggagcggcgggtggtacaccggcggcgggacgacacgagcagttggcggccgcggcggtggagtaggtgtccctgtcggagaagaggccaccgacggtgactgcggcggcggagaagacgttgccggcggtggagacggcgccggtggagaagaggcccccggcgggggtggaggcatcggggctgctcgcgaacgacgctggtagatgtgcatcggctgggcgtaccgggcaggaggtgtaggagccggggccgccggcacacgacgctggtagacgtgcaccggctgggcgaaccgtgcatgaggtgcaggagccgggaccgccggcgtccccagccccgcgtcggacccgggcagggtgcagggctaggggtgccactggtaggcggcgagccggggcacgggcccggcgtcgggcacagagtagcattacctgcaggagacagcggtaaaagtggctgaaccaccacgttagtgggaaacagagagacggggtcagggtcaggtgtagaggtggtggtggtggtattggagaagggaaaaacagactcattgaacaccacatggcgagagatgaggacccgacgagaggtgagatcatagcatcggtaacccttatgatcagaggaatagccgaggaagacacatagagtcgaacggggagccagcttgtggggagcagtggccgtggtgttagggtaagactcacacccaaagacccgaaggtggtcataccgaggagaggtatcgaaaagagcgtggtgtggtgtaggagcgggacaagcagcagaaggaaggtggttaaggagataggtggaggtgtgcaagctcttagcccagaagcgagcagggagagacgcctagagcagaagggtgtgcatgatgtcgttggtggtgcgaatcatgcgcttagccttgccattctgagaggaggtatacggacaagacatgcgcaactggacaccgtgggagaggaagaaggcacgggaggtggagttatcgaactcccggccattgtcacactggacggccctgatggtgaggccgaactgagtagacacctaggcgaaaaagtggagaagagtggggaaagcatcagacttggcacgcaggggaaaagtccatgaataatgagaaaaatcatcgaccaccacgagatagtatttgtagccagaaatgctaaggacaggagaagtccataggtcgcagtgaacaagatcaaacacccgagaggcatgggaagaagacgtctgaaatggaagacgaacatgacggcccagctggcacgcatgacacaagtgctcatcggaagtccgagggcatcgaatgtcggaactacgactgagctgcatcagagcgtcacgaccaggatggccgagacgatggtgccaagtagtggaggaaggtgtggcggcgaaagcagctgacaaaaaggaaggcaaggaggagggagccgaagtcggaaaacgaagggtgtaaaggggccccgagctgacgcatcggagaagaggatgccgggtagccaaatccttcacgataagaccagaagagtcaaactcaacggaacaggagttgtcagctgtaaaacgacgaatagaaagaaggttgtcaactatagaaggtgcaacaagaacgtggggaagacgaaaggagccatgtgcgccggtggcacccatggacgtgacaggaagacacgagccatctgcgatcatgatggacgaaggatgagacgaaggagggtgaacggaggagagtgcccaggtcgagagtggtgtggtaagtggctcccgagtcggcgatctaggctggcccgacaggaggtgtcggggccatggtgctgaaggagttggccaaggccgccgggtcccaaccgacaggcccgggcgagacgtcgggaggtggagcccacggagatggcggaggaacacaagcgagcatggccgccgatgggcgagggccggtgcctaggtccgtgcccgcgctagaggcctcttcgccccacatggtcgaccacgggtggtggaaagatgcccaggccgctgggtcccaaccgacaggcccgagtgagacgccagtaggtggagtccacagaggcgctgagtgactcccacggcgtccaccgcggcagcgacgacagccgccacgccccccccaacccccgctcggctcggagggaggaggagcaagaggagaggacgacggcggaggggtagcagcgagggcagtcgaggaagacgaggaccccggcgcgaaatccgaaagctgcgccacaagtggatcggctgggtcatgccagaggaccgcgtcgggcggtacaggaagcacggcgggaaagagagagacacccgcgcctacgccaggcacgtgcgccatggttgcagcagccgcaacgccctcgcgctcccaagcgagagcggccgcacgaagatgggcctggcctgccgcggttgccgcccgggtggcgatgagggcggcgtcgagggagtcgggacccgggttgggaaagagagcgccgggaccgcccataccggggccagccgcacccatgcccacggcactcgcggtcgctgctaggaagagggccgaggcagcggtgctgggagaagtggcggcggcgctgtgaacaaagaggtagcgggcagaggcgccgttgctgggaaaaccggcggtgctgggaggagaccggccgcaggtaggggcgctgggaggatgggcgcctacgtctgtgctgcctgggacgcccgtgaccgcgcctggacccgcgcctgcggcggcgctggggccgcgctcacacctgcggcgacgctgggggccgcgccctcgcccgcggtggcgctgggggctgcgcccgcgtcaggccagcgcgcagcgggggccgcgcccgtgctggatccggcagcactggaccgcgccagggccgcggccgcgctggggctgcacgcgcgccaggcctgcgcttgcaccggggccgaccgcgcttggagagggagggggaggagcgccggccatggcggcggcggcggcgacggctgagaagggagggagggaggaaagaaaccgtaacttgataccatgttggaaactatcatacactaattttttgggctaaccttagaagggtagcaacatagttctccatacatgggcctcatgggcctaaactcatactccaacacattgcttccaaatcaacccaccacaattcagtacatggtttttgaggcgttgcagcgtcctgtggcgatgggggtatgcctggatgcctaggcgacgcctaggcaatatggcataactaaaaccctctagcttcctgcagtgcctggggtacgcctcaacgcctagcaacgcctcaaaaaccatgattcagtagagagtaatatatatacatagtgatatgggcttgatacacagctttaggtagagagaatatggatctagaagaaccgtagtcctgataccatgttaaactttgagagagacatcaacctctcatactgatgtatatacatagtgacatgggccatgttagctatttacaactaacaatatacttagcttaacaatacaaattagcataaactatgtaatagtgatgtatacaatagaagttgcaggcatactgtctagtaatctagtacatgaagttaattcaggagcatctttgtttttcaatctttgtatgacctttttaaattttttcatgaagcactcatatttaaaccttaaaaaatgggatggcaataaaattattttcctcataaatgacctaggggccaatgccattgttcatgtctaaacatgtgctaactcattaataatctttttttgccctgaattcacaatgtagatggcaagagatttacatgacataatatctgatagaagagaaggaccatttgagccaccattccagcgagaggggagtgatgatgcatttctgcagctagtaattcagcccatctatagtgttatgcagaaggtattttctcatatgttttttgttataaatgtaatttttgtgtacagttaactctaactcacttgtacgtatgagtacatcctcatgggggtgagtttgcactttgccgttgtttattatctgacaggggttttaaggttttacagcatcaaaataacacagatcgtggaaaacaaaataacactaaatgttttggttcactttgatatcataaaaagccagcactgtttagtttcatagcattctgtgcagactctcaatgctattaaagtgacaaaacttctcagtgttgtctttaaatgaaaatactacagagctaaattctcttatcttttataatattctttgcttgatttttcaactgatgcaaaaggaagctgcaaggggcaaacatggtacagtgagccactcaatgtggagaaactacgatgacttgaatgaatacttttggtaattccttctcttttttgaaatgtagtaattccttcttcatacttgcatctatcttccttagcacaggacaaaagtaagaaatgttgaaaccactaattcagaaaagagctctctctctctgtctctctctctctctctcaccgtaaaaacaaaacaaaacagctgcctatgctgtgattaggagataggcagcactccactgcctgcctagctcctagagctcattaggtataacccttgtgtattttacttaatgagatactccctccatcccaaattgtaagtcattccaagaatcttggagagtcaaacttttctaagtttgaccgaatttatatgataaaataattattattatgataccaactaagtatcattagattctttcttaattatattttcatagtatactcattttacgttacaattcttagtatttctctttataattttggtcaaacgtaaaaatgctttgacttttcaagattcttggaatgacttacaatttgggatggagggagtagtatttagcataggttggtatatggaggttggcagaccttccttagctagtaagaagtttcatgtctgcagctagcactaccagccaattttgttttggcctgctgctgatcaggtcagtggcagttgtattcaacagactgcagcaattttgtcctatactggttagtacactcagctgcagtagcaatgtacaaacctgacttaattgttgcagtggttgagtttctccacttgtctcctggacggcctggggttcaattattatccttggttgcaaaataaacaagagtaaggacacctagaaatttcctttcccagtgcacacctcgtatgggagctttcaacactgggtatgccctatcattgatagggcataaatagaaaaaatatattaattgctccattttcttttgaaacagatcaaagaaaataaggacacatatcatgaaaagagatttattagcaatttttggaaaacaattaagcaaacaatcttttgttgccagtttctttgatgagccttccacattttcaggtcaaaaaaatgcttcaaaaaacttggatggccaatgaatccaacagctgacttttttgcggacaccagagccacgaatgaaactgaggtcactcactacttatttgcattattttgatttttgttgagcatgcactcttggcagtttggcatgaaaacaacagattgtttctatttttcaacacattatttaacatcagattcaagaactgtaatccacattgcacacatgtcacaaatcttcagttatctggcttctgtatggattgtcctatgtcgagtttagaaaagactacttccttctagaacttttgactgggtattgtctccttccacaaagctttcagttcatctgtccattacaatctggtccaaataatttttacattagttaattgttaactgcgtcgtggtttagcttatgaacgggatttccaccctaaaaactagagctgtattgtgcagttctgtttttgtttaatgtgtaagcaacaccttttatgttaggcaacatctccacagaatacatataatactcacttcaagtattggaagttggaacaatgatgcagaagtttctcaatacatgcaaatctcactatagagaagttgcatcatatgaatacacgcattatggatcccctcacttgtactgtttgattggggagggtaagtacgaaacagtttggagagacagatttgattggttaggagcgtcatgaagacaagcagcctgcagtatagggcaaacagatggatacataagtctatagaaagggagacatgaggagggtatttgtggtttaatcttcgcataattgatcacaatggtttctgatagaatttctgattggattagatgggctaaccctagaagggtagcaatatagcatgacatacatgggcctcatgggcctaatacactcatactctaacaccccccgcagtctgaactaccggcgcaacggagttacagactggtactgactggacatgaaaagaagcacacacacgagccccccacaggtgcaactagccaccggtgatgttgaggctggagcgaaactcggtgaaggtcgaggacgggaggcccttggtgaagatgtcggcaaactgggaggtggtcgggacgtggaggccccgaacatcgccgatggcgactctatcccggacaaagtgtagatcgatctccatatgtttggtctgctggtgttgtacaggattggtggagaggtacaccgcactgacattgtcacagccgcctcgacactggagcgggagaccaccggctgttgcttggacgaccaggacaccagattgccgcccagaaagacagcatagctgaaggtggagcgccgagtgttcggacacccggccagtcggcgttagtgtagacgacaagctcagtggaggagcagatcgtagtctacagtgccgcggaggaggcgctttagagcagtgaggtgtggctctcggggatcatgcatgtgtggacaaatctactaaactgcataggtgatgtccggcctggtgaaggtgaggtactaaagtgcaccggcaagactccggtatgcaatgggatctgtcactggggtgccctcggcctctgacagcttgccctatgtgtcaaccagagtggagcaaggcttgcagttagtcatcccagctcgctccaggatatcaagagtgtattgccgctggtggagaagtagtccggtgggacgaggctcaatagtgaccccgaggaagtggtggaccacaccaagatctttcatagcaaattcctgctaaagagaggtgatgatgcggcgaagtagtgacggactggaggctgtgaggacaatatctcatggtgatagataaatagggacgtatctgacttggcctccacaaatcctagtgtcaatatgaaagcagcaaaccaagagtaccatgtccgaggggcctgcttgaggccgtagagagacttgttgagccgacagaccatgttgggacgagaagagtcaacaaaccccgctggctgggtgtagtagactgtcttagtgagagtactgtgcaaaaaggcattcttgacgtccagctgatgcacgggccatgagcgagtgagagccagtgagagtactgtgcggacgatggccggttccaccacttggcaccgtcgcctcggccatcctggtcgtgatgctctgataccatgatagaatttctgattagattagatgggctaaccctacaagggtagcaatatagcatgacatacatgggcctcatgggtctaatacactcatactccaacagtgtatgtagatacagtgcctagcaaccttaattaagaatggatgcaaaactaatcatatctacccttatctcaactaactgacttaaggcctagacaacaaaaggaataatagtgcatctgtatcctaatgtatctatccatgttacgttcatctactccctccgtccccagaaaagtgaaatttttaatttgaacaaatcatttttcttaaatttgactaatgaagtttatataaaataatttcaatatttatgtcttcaaattaaataggcttactatgaaaatatattccgtgttaatctaatgatatttattcagtatcataaatgatcaaaaataaaaaattgccagctatagtcttttaggactctcacaagtcacaagctagctgcagatcgtgtgggttttgcaactccacgttgatgcaaagggtgtgttccagtttggccttgaatcatctcccccccccccccccaccccaaacactctgttaggagagactgaacatcgaactgtctcctagtgagataaaccacctgactcgaatctctcttggtactctacagttcctgttatacatatgggtcagcgagctatgccaacccattactcataatccgtatggaaggccttgagtgcaaacggacagaatccttatggtctgtatgccgccatgcctgcattgtgttccagctagtagcaccactgttggctgtcaccttcaaatggtatgatgccagtgaaacaatctctaatagtgccgcatttgaaccatcccatggtgtcatatgtagggcactccagattgtcatagaggtgtattgggtttcacacacttaattcctggacctaatgatgttcatgcttgggtggcatgaaaagtggagggtggtatttcttgtgaagctatatattggtggccaaaggcttgttgagtttgccttcagatgatgtaaataagggtagatctgtagggtttcagaaaatcccagctgatgatgaggcactatgttagggactgatttcttctcaaagtctttgaggcgcatgctgaacgcatcatggtttcctgcaatttctgctagctttgtttctcacacaggagtgtccagtattcaccaacagagggatccctagtctggaaagacatgccaactgcgcctcccaggaatatgcattggatcatcagtgctgctgctggtagttgtatgaggaggatcataatcccaaataattctatcctagggtggagctagagcaaattcgagggggggggtgcggggtgcgcttgccttgtgggtgcataaacttttaccataggggtctgtatatggtgaacactatttttccgttttttttcatgggtgcggatgcaccccctaccatcaacatggatccgccccttcctaatgatatactctaacagttgtctttgaaataggatgcatgattgcatgaatcacttttcgatcttgtacagtctgacaatgtaattgagaagataggagtggatgttctgcactattctggaaattgcaaacattcatgtgtagtattgtagtttaatacatatgaccccaaaaaatcctgattcgaatttctccaagagaaccaaccaaccaagtagctaagtagtgcatgctccagtgcttaactgcttattctgttaaaacactctacattaagatgccattatatttactacatccattagaattttttggaacagtgcatcatgcactttcctagtttttctatcgcgaccttttttggttcatcccaatcaccaccataacttggaaaagtctgttattttgaaggggcataatgtgatttctatatgagaaaatatggccagccaatctatcacattaacaatgtgaagaatttcatgaattgagaaagcacagtagttggaagtgacaaataaaactggggtagaaacacattggcaaaccagtttatttgatcagatttaattgagtttatatgtaaagaataatacattttttaaaggatgacatatcaagtgatttttatatgcctacttttgatgatctgcttgcttatatattaaaaaggaatcccaggccatgcaaaatagcacattttggaataaaaagtcccttctttggcattgttgtaatgtttcatcatgctttcaaatgacatatagtgattgcttcttattgatggtataagctcctaaaaatatgtgtaactagataaaggaacagagaaacatagattgagatgcaattacctttgcatgagttaatatgcctgttgctgaaggaaatttgatcagaataaagtatatatggtgttatggtagaactaactttagctgtttctacagcaacatgatcatgtgattagccgaagaaggcaacatgatcatgtgattagccgaagaagggcgtcaaaaacaaattttgttgaagttcgtacatttttgcatctattcagaagttttgatcgtatgtgggccttctttatattggctttccaggtaatgatggcctttgtcctgcacagaagtttttgtattcattttttcagtgtgtgccacatgatctgtttttcttctcttgcaggccatggtaattattgcctggagctcttctggggcactttcttctatatttgaaccagaagttttcagaaatgtattaacaatctttataacagcagcattcctcaacttccttcaaggtacaaacttactttgactccagaggctttctgcattctttaccttagtttttttctcatactgcattatttaaccaagtttttattaatttaacttgtatgcggagtgttaatactatctgctgctgctgctgtggcccttgcttcaaatgcaacacaatttctgaaattggtctttaaaccttttcagccacgctagagataattctcaactggaaggcttggaagagcctggagtgctcacaaaggatacgatatatcctgaaatttgctgtagctgttgcctggttgataattcttcctactacatactcaagctctattcaaaatcccacaggccttgtgaagttcgtcagcaattggataaatttgcagaatgaatcaatttataattatgctgttgccctttacatgttaccaaacatattcagtgccctgtttttcatgtttctaccaattcgacgggtcttagagcgctcaaattctcgcattataaggtttcttttatggtggacccaggtaaggttttgtatatttataactatattgatgtacataagttcttaacagaataacatctcacaaattttgtttttctaatcagccaaagttatatgttgctcgaggcatgtatgaagacacttgctcacttcttaagtaaggatcacattttcttgccacctattcttttcattcttaccatctgtatctaatactatttttgtttacataaaaccaggtacactacgttctggattctactgcttatatgcaagctcgccttcagttattatgttgaggttggtataaagaatactatccttttattactattggtagcatgtgaaaggcaaatatgccttttacaggatacccaagaattcacacgagcacaatggttttggtggctggaattgacttagccttttctgtttttctctcatatatatgggcagccaagagctacagtcatggctgtgacatcctcctaattaatgcaaaacatcacccaactaaccagcctactagtccatactgaaataaaaaaaaaagaagtaaatgctatgaacctagacactagcatgcacctagacacacaggattatttccaacagcatgttgcttgcaatatcatagcactaaaatcacgaagattgtaacttcaacttatattatgttgataattctctttattgttagaatgtgctctgattctagcatctctttgacattagattacactgccacacatggacaattttctatgaaatcccaatttaaaaatttccattgctttgtgtaacccatttgttacttaatagagtttaatcttctagtatatctttagtgcaataattactgagatttccaatgctcatttaccattggcagattgcacctctagttgaaccaaccaggataatcatgtcactggaaaggccgccttacgagtggcatgaattcttcccaaactgtaagatcattttttatactctagcatattatatttatatcttactcctctgcatagtctgtagcactgagaagatgcttgattttcacagtgcggcataatttaggtgttgtggttactgtatgggctccaattgtcatggtatgtaagttttttcttgggggtggggggggaggggagattgtgcccctaatttaaatttccatgcaggtatacttcatggacacacaaatatggtatgccattttctccacaatttgtggtggagtatatggtgcattcagccgcttgggtgaggttggtacctggagactaagtgtacccttggagtgctgacattctatatttagtaatcttaaaatttgcataatgtttaccatgaagatacgaacccttgggatgttaagatccagatttgaggcaattccaagagcattcggcaaaaaacttgtacctaatcatggtagtcgcttgaaacgagatgaggtctggttgtgctaattttttgtatccatcttgttatgccattgttctaatggacttaatagtggatttaatgaactttttccaccaggaggacaaaaacccaccctttgataagtttgctgacatatggaatgcgtttattaactcattgcgagaagaggacttactaagcaataggttcccactgctgttaatttttcttgattttttatattgaacgtggcacaccttaaaatgatggatttcctttatctacagggagaaaaatctattggttgttccatcatctggtggtgaaacaagtgtttttcagtggcctcctttccttcttgccagtaaggtacacacattatgcactactgtattgctatataaccctgtgggattctgttctgctcattaccaagatatcttgtatttagattccaattgcacttgacatggcaaagagtgtcaagaaaaaagatgaagaactcatgaagaggataaagcaggatccttatactgagtatgctgtaatagagtgttacgagacattattagatatcctttacagcattatagttgaacaaagtgataagaagtaagccattttctctccccccacccccccaaaatgattcttggttttgtaattttgctaacttgtttagctggtattgcatttcacgttgctatagagttgttgatagaatatgtgaaagcatcaaagatagcatccaccggagatcactcgtgaaagaattccgattggatgagcttcctcagctaagtgttaagtttgataagttgctagatctactggtacaccatactagtaacccctactccttttcttttcttaaataaatatattctgtactaaatgctatttttgcatttccaaaaaaatctttgttccatttgcagaagaaatatgatgagaacgatcctgtaaacaataacacacagattgccaatctgttacaggatataatggaaattatcacacaggatattatgaaaaatggacaagggtaagttctattttgacatgagcagataaatagatacttagatagtctctgatggctctctctctctctctctctctctctctctctctctctctctcctcttgcagtatattgaaggacgagggccaaaaacaactgtttgcaaatttaaatctggactcattgaaggatgttgcttggaaggaaaaggtcaggctcctggagaaactttttctgtagttacactttttagcaatattgtttacataattaggagcagtatgttatctagtgatattctgtgtgaacagtgcattaggcttcaattgttgttgacaacaaaggaatctgccatatatgtaccaacaaacttggaagctcggcgtaggatcaccttttttgcaaactcactttttatgaaaatgccaagggcaccacctgtccgtagcatgatgtccttcaggtaggcaacctaactcgtgtggactcccttttctgcatcatttaatgttatcaaaggtttttttttttggctctttgccttcttggcactcagtttgaaactgttttcagaagtcagcaatagctttcagagctagcatatttatgccaaatcattccttgacattataacacttccttaaattcattacaagttcttatttctgatagttttttaattgcttttctgcttttgcaccagtgttttaactccatatttcaaagaggaggtgctcttttccccagaagatcttcgtaagaaaaatgaggatggtatatcaatactgttctacctacggaaaatatatccaggtattttgcagatgctagacctaaaactgtgcgagataattatttctgctgttaggaaatgattcagcatgacttgtgcccatagatgaatttaggaacttccttgagaggatagattttaaaccaaaggatgaagaagaacttaaagataggatggatgagatctgtccttgggcgtcttataggggtcaaacactcaccagaacaggtaaaatgactagtgcaatcctgtggttcatcaaaatataacgtgttctctaacttctttgtttttactttgctagtgagaggaatgatgtactacaggaaggcacttgaaatccaatgccttcaagatacgaaagatcctggtaagattaatatgttcacgttttcgtttcaccaaaaaaaaagttcatgttttctttttccaatccatgtatcattatatgtttgattctacgtttattttttgtagctaaatttgaccaagacggattaatagaatcctatcgagagttgcaatctagtattgaaatggcacaagctattgctgatatcaaattcacctatgttgtctcatgtcaagtctatggcatgcaaaagacgtccaaggattcaaaagacaaaagccgctatcagaatatcctcaatctcatgataatgtacagaaactaatgctctatacctacatagtaagcttgctccaatccatctgacttgtaaattatacagaaacccatcactacgagttgctttcattgatgaggtcgaagctccaaccggaaatggagcaactgagaagacgtattattccgttcttgtcaaaggtggtgaaaagtatgatgaggtacttgtcagataaatttaaaagagtaatacaagtttcgaatttttactcatttcatttccaaatcttttggatttggtaaatgaagttatacaaaaatcaaatcattgtgactggcttggttgacaagccttctattatacatttccttgcaatttgagtcaactatgtcgtaacaataataatgttttcctaaggttacagtcctacaaaaggatcttttactaatgtgtgatatataaaagtagtttcatataagatttctacaccgatccatgcatctaaatgctcaggtttagcaacatcgtgttatttctgtgtacacatgattaaatcagatgccattttcatgcttgacgctgcaaattttgttttaggaaatttaccgcataaagcttcctggcaaaccaacagatattggagagggaaaacctgaaaaccagaatcatgctataatcttcaccaggggagaagcacttcaggccattgatatgaatcaggtttagttttgaattccacatggtacacattgtaataaagtactactaatttattttaattactccataggataattatatcgaggaagcatttaaaatgagaaatgtgctggaggagtttgagagtagaaagtatgggaagagcgaacccactatattaggcctacgtgagcacatttttactggaaggtatgcccatatacctaaagatttgtttaagtgtcttgttcatgccatttattcgcaaggtataagtgctaataacattgctgtgttcctattttagtgtttcttcactggcttggtttatgtccaatcaagagaccagttttgttactatcgggcaaagagttctggcaaatcctctcaagtatgcaaatctatcttttatttcacattggtatatgttaagcttgagtatgaactgatagctagagttatctggactatttatcccatacctcttgttttccacagttccagagggccataaatagaacagatagctatagatacataatacacacacacacgcacacgcacacgccttctgaatgaagatttattcaaattgtatgtactccctcaataacaaattataagacgttttgacttttttagatacatagcttttgctatgcatttaggtatacactatgtcttgatacgtaataaaagcaatgtatctagagaagccaaaatgtcttataatttggaacggagggagcatgtgctaaaccatgttgatggggaaccgttatttgtatttctggttttgtatggggtatacctcaaggctgaagtatatgaatgtgtgcctttttttccttcagtgagaactcacatttagattctgataagaccttaatacgatttaaaagaggctcaagatagggtcctgttgttagtgataggatactatttctattccaaattggagatgggagtaaatagagatgaagtctttaagagttagagtccaaaatttggatcagataattcctctaataaacagtgtgggtttcaattagtataacacaattgtttgttcaaaattttagttcctactcattccaaatagcaatcttgtcttgaacacactgctcgcaaaaaaaaatcttgtcttgaacattagtctccataagcaagaacagttggcctatagtctactgcaggtccattctggggggcggagaggtgtatatactgccatactgctgtcagcatcgatgttgaagctgttatcttgctctttctgtctgttttttccttttaatttgatatcactctttcattctgttgattcggtgaatgagaaacaaaagaaaggaacaggataacatcgaactgttttggtgttccaatctactgaaactgcagagtggaaaaaattgcagaaaatagaagtattctacaatacttgccttatgtaacacgatgggattatttagctactatgtttacagaagcaataatggtaaatttaccagaattcttggagaatattcaaatgccccaaaaagccagctatagtagagtaattatgttagaattaaccgtataacttctcatttgttatgtcttggaccttttatggcggatctcagggcacagactccttttttctacatttttagagagagagagagagaattgatatatgacctatttgaagctgctacaggtatgcgagtgatgcataattactttcgcatcgtaggggtagctgctgatctcccttatggatggatggataaatgtttagatttctgtgttgaatatcaacaacttattacacagaatcctatttttttagttgaaggagttggttttattagtggagaagaagctgtaaattggggcttatcgggaccaatattatgagtttctgggattcgggctctagagagaacaagagaggattgtgtgtttgctgcagtgaagagaaactcgcttgaagatgatactacaaacataattaatataatttcaagattaaaatcgaaataccttgatttgatattttttatgactgattttaaatgactcatagccagagggcgttggattttgaatgagtgatttttgtatttttcatgtttgttcctgtgtgtacaaaatgcacattttcttcccatcatgctattgctctcttattgcgacaaggatgtgtttttgttgttcatggttgcttggaaacagggttcggttccattatggccacccagatatttttgatagactcttccatatcaccagaggaggcataagtaaagcttcaaagactataaatctgagtgaagatatcttttcaggtacatgcatcttgttgaaataacttgcgcttgttccttaacttgtcagcacttacaaaacttgatattcataggttttaattcaaccatgagaggaggaaatgttacacatcacgaatacatgcaagttggtaaggggcgtgatgtggggatgaatcagatttctagcttcgaagctaaggtggccaacggcaacggtgaacaaacattaagccgtgacatttatcggcttggacgcagatttgacttctacagaatgttatctttctattttactacagttgggttctattttagcagcatggtaagaaactataataataaatcatatctaaaaccttatgatcaaagatcacactatgaatttttcttccttctatgcaaaaagtaaggagagctctactggaatttaaagaaaacctaaactacaaggtcttttttgcaaagttaaaaggacaaaaattaattctgagttatcccagctgctggaacagaagtagagttaatctgaccttatgtcattgtttcctcaacagcatgctgaattgtcaaacagtaaaaattgatagtcttccatcttaaaatatgttgaaattgcttcctgagtatttctttattatcaacaaagatagtgtgtgttttggtgtccttgtgcaaaatcaaagtgtcatgattgagagagtttaaacttgtatctaaatgttgtatgcccaccccaatgttttatgatactgatccatagctccttgtttcaggttactgtgcttactgtctatgtgtttttgtatgggaggctttatctggttatgagtggtctggaaagatctattatgctggatgcacggaatcagcagaatgtcaaggctctcgaaaatgcactggcttcacagtctattttccagctaggtttgctgcttgtcctccctatggtcatggaagttggcttagagaaagggttccgcacagcgttaggagagtttgtaatcatgcagcttcagttggcctctgtgttcttcacattccagcttggcaccaaaacccactactatgggagaacaatactccatggtggtgcaaaatacagacctacaggccgtggattcgttgtgtaccatgcaaagtttgctgaaaattatcgtatgtactcccggagccactttgttaaaggactggaactcttgatacttttggttgtatatctagtctacggaagatcctatcgcagctcaagcctatacctatttgtcacctgctccatgtggttccttgttgcttcatggctcttcgcgccatttatcttcaatccatcgtgctttgagtggcagaagactgttgatgactggacagattggaggaagtggatgggtaaccgagggggtattggcatgtctgtggaacagagctgggaagcttggtggttaagtgagcaagatcacctcaggaagactagcatccgagcccttctgttggaaatcatcctttcacttcgatttttgatctaccagtatggtattgtctaccatctgaacatagcagatcaccacaaaagcattatggtaacctgttcaaagatgatctggtttgtttctcttttataatctttacctgttatctttatgtcatgccattttttatttctaggtatatggagtgtcatgggtggttatgctccttgttctagtagtgctgaaggtaaagactatggccttccatttggtcttagctaccggagtgcttaaattcttactgactgcatattcttccttttatttagatggtttcaatagggcgacagaaatttggaacagacctgcagcttatgttccgcattctcaagggccttctcttccttggctttgtctctgtgatggcagtcctatttgtcgtcttacaccttactatttctgatgtcttcgctagtatccttggatacttgcctactggatggtgtcttcttctggtgagtgaagcactccatttaccaagtagtttggtagttaagctttttatgtatataaaaaaaactagttaaaagctgaaacaacattccaacctgcacacaaatgaatggtgcctaacaaacaagagagggaaaagaacagagtgcctgtgtaactctctcatggaattaactagaaaaaaaaaatactctagtgtgctgcggctactgcagggtgaggctatgtaaaaatagttcaatgccatgatgagtaaagaatcaatgaatcataaagatgcagttgatcggaaagtgcattggtcaagaacacgttaggtggttgtatcatattataagtaccaatatttttttttctaacagcaaattttgacctgatctccatctgtctcagtattgcctaattatttttatgatttcttgcttacagattggacaagcatgctcaccattgattaggaggaccatgctatgggactccatcatggagctcggaaggtcatacgagaatataatgggtctcatcctcttcctgcccatcggtttcctgtcatggttccccttcgtctctgaattccagacacggctgctgtttaaccaggcatttagccggggcctccagatctcaaggatccttgctggtcaaaagggtattggcgagttcgagtttgagtgaccactaagcttgggcagcgaaccaagttcactttcatatatttgattccgatgatcgatttttgatctgtactctgtagtgtactttcatcaggtttactactttagtccttggaggtactggtttataggtgtatgatctgttgtaatatatacgtatatcaatatcatattactttctatccacacggtctgaattgaccattacaatatgggtgcaaaatttatgattgtaaggtcgaacatatttagactggatgttgctattcaatatttggcattgttttaactgtaatcatagaaagaccagatccattgacccaaaagtcaatccagtatcatttccaccatcattgtattccaatcaagaatttccataattcaaaccaatgaattcaaatacatcgagatatgtaccagaacatcattgcttcaaaactatattttcatttaatttataggctttcaccagttagctgtgagcatgtcacgagtcacgtt

SEQ ID NO: 4298 - DNA, 5476 bp, Sorghum bicolor
gggcgtggaatgccaaactggattccacaatgaaggggatgggcttcgagcaaagcccgcatgaggcggccatctactggcggggcagtggacgaaaggccctgttgggtgtttacgtcgacgatcttgtgatcaccggcaccgaggaggtggagatcaaggcgttcaaggagaagatgaggtcgaccttccagatgagcgacttgggccctctctccttctacctggggatcgaggtccaccaggacagctccggcacctctctccgccagacagcctacgccaagcgcattgtggagttgggcggtctcaccggctgcaacccagcccacactcctatggaggagaggctgaggctgagtcgggagagtacggaggaagaggtggacgcgacgcagtaccgacgcattgtgggcagccttcactaccttgtccacacacgaccggacttggcgttcgtcgtaggatacgtcagccggttcatgcagtgaccgacgacagagcaccagcagaccgtgaagaggatcctccgctacgtcgcgggcacctccgactacggtttgcactacccgaggtgccccggtgcggcacatttcatcgggtacagtgacagcgaccacgccggcaacatcgtgtcgcaagagcaccagcgggacactcttcttcctcggcaagtgtccgatcagctggcagtcggtcaagcagcaggtggtggctctgtccagctgcgaggcagaatacatcgcagccactaccgcttctactcacgctctgtggctggctcggctgcttggcgatctccctggcagagacgcagaggcagtggagctcagggtcgacaacaagtccgccttggccttggcaaagaatccagtcttccatgagcgcagcaagcacatccgggtgaggtaccacttcatcaggagctgcctggacgaagggagcgttcgggccaactacatcaacacctaagaccagctcgccgactttctgaccaagtcccttgggcgaatcaagttccaggaactccgcgccaggatcgggatggctcagataccccacaaggagccacacaagacttagggggagaatgatggataagtctctgttggctagtctttgttggctggttgtgggctgcagtaggcagcacatggtccttgtgtaggacagcatccttgactgcttttaggacaacagttagcatctgtaggacagcatcttgactgcttttaggacatcagttagcatctgtaggacagcatcttagactagcatcttagactagcatcttggcatatgctggctggttagcagccctataaatatgtatccccaacccctcaggttggtatagcattgtgtgagaaataaacttagaaaattacccccaactctgtgtgctatcctctcaatgagctgctcacacctagagcaaggatccaacgactaacaagcggaaggtgtcggatgttgaggacagcctgctaaagggttctccttcgggcacaggtcatcatcgccaaggccacaggacaccatatcacgaaccaagctatgttgaagcagctgggcatgctgagagatgccatgtaccaaggcaattacttatttgacacctccagataccaatctcaagatgtggaggacaccaaggatccagttgagtcattctatgtttctgtgcaatgtaaattctcttaggggctgcttggatcctttcattttgaagaaattggctacacttagcaaaggatgttcagtggaacatcaaaatcatgtgtccaacacaaacaaagataggaggttgcttgttcatggagatgcttggaataagttgttctcttcttataaacaacgcgtgccaagggatagtaaaatcatagtcacaagccgatcagataaggttgtgaagtttggaacaacaccaccttctacatctgaagtatctaactcgtgaagcatactggtatttctttaagccaattacatttggaagcatggaccccaagatgcagccaaggttcgcccatgtggccatagagatagctaggatgctgggcgtatgtttcatttgtgcaaactacaatgcttctttgttgagggacaactttgacatccacttttggtgcaaggttctaatgttcttaagacggctcatccaggaaaatatctccaaatatggtggtcatccatatgatctaataagccagaatagacctggacagttttggagaatggccacaccgtctgaagatgttgtgccttattgtcagtctcaatgctattcacatgagaaggttccagatataagaatccaagatgtgttgtatggaaatattaagtttcatgggaaatttgagtcctatcatggaggtctcagattccacattactatagctatgttttctcttgtgagattcggaagaaaaaaaaactgcagctaccaagcggaagcgatctactgaagaaaaattgaatcagatttgttaaataatttcttctgttgtggggcttatgtggtgaaacatctgagtatttttgattgggtgccacatgtatacaagtatacaggctaaagcatagtcatgcttgatataggatgttaatagttgcaatccttgttaactgtactactgttagcaagttgctaccttagcattcgtaaagtgatttttttctccctctgaacatgcaacgtgcagggtgatattttcccttaacccttatagatataacaaactgatagctattgttttgctcatggacttgcctttccatctccattttatgttttcattcaatagcaaacatgacttctgacttggagatttatccagcaatcatgtcatctattttaatacatttttaaattattagatgatgtaccacagttagacgcgcactatcctaaacatggtctcgtgttggatttggaccggaaacgtttgggtggcaagaatgagataaaggatgaaggaccaagggagagtgagtgagaaaattttcttactttttattattaatataggtattgaaatagattttaacccagaacaaaaacctaatgttcttgaatattgattgaagattgggcttgctgctgccctctacatcttctgcttcactgtatagaggagtggtggaatggagcgccggtgttgtgctatgagagggaaccaaatcatctgagggcactatattctcgtaaatattttttcactattattaatcgctgcccaaacaagggcaaccatatgcaaaattgcaaatgcttattgagggggaaatgaccagatcctgatgccgactacaacggtgatccaattccgacaccagatcctaacggcgactccaacagcaatccaactcgcgacctggcttgggcaagcagtacgggaaatcttgggataatttgtgaccccactgatcagtctagctgattacaggacgtcatcagaagcgcaatcctgatccatccaaattgcaaaaacctacctacgctgccaaggctgcgcggtcgccgccgccgcaggtattgtggcccgcaatagcattgttttttttttaaaggcaggagctctgctgctcaattaagacgaaagaaattatgtacaagaggctagccaatgggatgccaaaaaggatacccaaggggctaactaacacacgcgacgtagctgagtacaaacacgacacactgccatgggtcatcgttcccgagcatagttgcaaagccaccagcagctccaacttccacacaaaccacccccaacgagcccaaagcaagcggtcgcaaccggtcatcgttgccaagctcaagcaacctgcaaagagcagcgccgacttccagtcacgactacatgcctcgcctccggtgcatgccaaccccagcaaaccccagccaacgaagaaggtgggggctcgccgcatgtcatcgttgccgagccacatccccgatgtagcagcttcgacttctcacagcaagacccgccacaaagcgtcaaccaggtgccaggaagagaagagcaaacaccgaaggagacaacgaaatccaaacacgacaccttcaggaaggtcgcagcaccgatggcgccaccatcgcacgtccaaactggacagggctttcgcccttggatgacagtggtagaggagatacacgacgccctcaacagggaaagcggcacccataggcgtcgccatcgccaagctttcgcccaaggagtcctctagcacgagacgtcgggccaagaagccaggccccttgccggccaacactaccttcatcgttgtcccgctgctccacatcaaccccttcagaggagtctcaatacgccggctgcacgcagcagccgcacagctgcatcggtcgccacccccgccgaccgggcaacgcagagcgggacctgactttgctgctcgcgtaacaccagccaccattgctggctctctgcacgtgctgccgatactgctgacccatcgccagccgccaccagacacgtcccaccctatgggcgccgccccttgcccagggggcgtcagaaccgtagtgccgacacccttggctagcgccaccgcctccgtcttggccacccacaaccgtcgccagccctcgaagtgtgcaccggatctagccgccaaagttccggatctggccgtgcggacaccggatttggccttccaggacctagctccggcgacttgggcaagcgtcgtcgatgccgtcagggccggaggaagggacaagcggaggagaagaagatccgccctgcccccacgtaccagcccagacactggccggcgctgccacagccgcagcggacgcgccgtcgggctccacgcagcctgcacgggaggccaccggctcgctgccgcatgtgccaccaaatcacgaggagaggagaggccccgccaccgccatcccagcgagccgcgtggccatgccggcggccagcttcggcggcggcacggcatagggaggtgcgagaaaggggctgctgctagcgcttcggtggagggccgcccatgtcaccccgcgtggtggagcgacgcaggggcaactctgtcatggctcccgcaacagcattgtgactaaagccttgtttagttcacccaaaaactaaaaactttttaaaattccctatcatattatatgcatagagcattaaatatagtcaaaaataaaaactaattatacaatttatatgtaaatcgcgagatgactcgttagttcatgattggacaataattgacaaataaaaacaaaagtggtacaatagccaaaataataataaaaaaagaactaaacaaggcctaaacctgctaatggtctcaaatacagaccaaacccacaccaaactcattctaaggctagtctagcgtttcataaacatttaattccatgacttagagagagttgataattgcatcaaaagagttttctctcttttccacgtcatcaaaaacgcttttatta

SEQ ID NO: 4299 - DNA, 3153 bp, Sorghum bicolor
tctcgctgccttcctgtgcttggcgtggcggccctcctccaggctcgctgacggcacgactgtatgggcaaccccggcgctgatgagagcacgcagactctgatcttgtctcggatccagaaacacttcagaccttgtttggatgttgtcggattcacttcaatccatgtgtgttggtgtggattgggtggaatttagttcaagttccactccaatccacctcaacacatgtggactgatgtaaatccgactacatccaaacaagacctcaaaggggggctaaatctatattttcatagattttttaggctgaaaaaaggaattgttaaaaagatttctgggccacacctcgggctgcagcctggggccgggatccgcccctgcttgtctccttccatgttcttgccttcgtgtacttcctcttcagctctataggtctctagcagtgcattctcacctaccgtcgccagctatggccgatgtgacagctagcgtcctagtctcctcctacgtgggtgcatgcatatgttcagggactcaatcgcatcgatgacaagatcaggtctgttctgccatgaacggtgtgcatactcagcttctaatgtcttgtttgaggcgttgatcgtctgaatcatcactttgtctaagttcaaatcacttttgcaccttttttttgcaagacccagttaactatctctaaaaacattagcaaatgatgttagtccaaatggtcatgatcattaaccaaaatccactaaataggccaagggtctattttccttacaattttgtcactcaattaccataacttaaatgagattttcacctagaccaaccctcctctctaggcatgtctttcttctctcttctattcttgatcaccaccattgagtctcctatacgtgtcgcaactgctctagcattgagccgttgagccggcacctacccaccgtcggtcccagcactcgctgccacctgatgtcacaccatgtctaaatggaaaacaatataggagcattgccatggcggtagcatcttcagcgtttgtcaacggtccgcaaggctacatgaggttttcttcaatgacgctgcttgcatcaagccgcacctgtaagggagagtgattcgacccgccttcgctacacctttctcatggccaagggtggtgggtacgtgatataggtccgtgcgatcatggtggcacggtggggcaatggttgtggcaacacaagcagactggtgtgggacgcgacgacatgatgcgtaggtagtccaaaatagttcggtacacaattgcaataggggatgagtgatggccaaccacattgcacagcacatcatgcggaggaggcgcatgtgctccaacatgcctaaacataaggtagtggacaattttatccttcaggtggcctaaaaataaaaagaggatataggaattgagaaaaacagagcgaaaaacatctgaatcgtaagaatttgcaaatgaaatgtcaaattttgaatgatatgtgagcgtgcgtttgttcatagaggtgaaaatgtgtgcattatgagtgtttatgttgtattatgtaatctaaaaaaagtggcacgtatgaattcaacatcaaatattgaaatttctcagaatttaaggtcccatttggatctctatagataatagttatctcttttggatccaagctggtgcaactaataaaatagctaattattagttggatctttagataataactatctcactagttggaccaaacgagataatgtagcatttttattaggtgtgcttccaaatacagctagatattagatatgtaatatattgatatgcagttttcttgtgtgtttgagaaaaaacatttatacactgtttttttatgcccgctgcccatcttaaaaacggtaaatttaccaaaaaaaaacatagttgagtatggcaaatatccaatttcctgcacggcggcagcggcaggccgccagccgagagaccctagcgcagcatggcttggatggctgcggccaccctgtgctgccgcctcctccgccttccctccgcccgccgccctccctcgtcccggactcggtgttccgctgcgcagagccccgacgccgtggacaaggagtacgccgacctcaacctccggcctctgtaccccaacgtctgtcgccacccttcttctcttggtccctatccccggtggtataccaatcttaccgctcatccatctctgtacgcagaggggccatcacatgcgcatacggcagcacgtgaacccgctcagctcatccttctcggtaaagcactcctgattccccacccattttttcaagattgccaatcgagcacaggcactcgtatttttccgctaatttgtgctctgttttgcggtgtgtaggagcccacggagccgccagagtggaaggaggtgttcgacgaccccctgctccccctcatggtcgacatcggctgcggtgcgcaagtgctactttgatttagttttatcattgattccttgtgacagttggttgcttggagaaggatgttcacagggaatcttatgtccagggagtgggaggttcttgatttggcacgcgaagaattctgacaagaggcagaactaccttgggttagaaatccgcgaaaaggttttaattggtttaaggtttcagcttgtttagtttctgggtttttttttttttttgatgtataagtggcaggagctttgcctttcagtttaagagagaaaagagagttcaaaacagttttagaaacaaagcactgggaacctcaagcagtccacccaaagcgtgacacagcacacagcctgcattgtcacagcacgaagcaaagaaaatgaaccacgaagcatatgccctcctttggtcgatgtcttattttgctttcaaaggcactcactgtgctgtttggaaacaattctcaaagatcattcagtttcattctttccagaggttccacattacatagattgtcaggccattgaaacattttggcataagaggcataagtgtatgctagtcttgagcggtccattgcacataatgcaattatcttgatgaggccagccccttaactccaagttgtctgccgtgagaattttgccttgtataagcgtccaagcaaatcatttaaat

SEQ ID NO: 4300 - DNA, 5844 bp, Sorghum bicolor
tggcatcttccctccccgtcttttccaacatcacaaaaaattatcccgagcgcgcatatatgcgcgcagcctagaaggttttctgactcgtctagtaagcaaaaagaaagacagtattctagatgagaaaaatgtaagagagaaagatttggtagaaaggcttaaacacgtaaaaaaaaattctcatactaatttagaagttggtaaacaccatattttggagagaaaaatataaggatctcttggagatgtgacaagtgccaaaatggatgatttcttcataaaaattgcctggagtaagcaattgacttgcaactgcattgttgatttgatagaacaaaagatgcacaggagcaagcgtggcttttctcatatgagctagtttgcccactagcacctccttcattttcctgtaaaggtcatattgccttttttctattcgatgagttttgcaaacttttaaaatcactaacttttatttattattaatgaataatatatattaaaaataaagttctcgtcttaaaaatagatggatgatctctagattttatagactgagtttataataaggtcactagaagttttgatgtaataaccaaactagcgccattgctagaaccttcgctcccacctctatccacaaaattcatttacgacatagatgagcttattcgaggcttctttttccccttcctttgtaggaacataattgagtcaattctcttttgctctctattgtcttctaagttccctcctattcctccaacatctttggtacctagatgggttagcctttagcctggctgtggcgaagcatgggaaaacttctcatcttttttggttatcttaactaccaactcctcctccttttatgtctcgactgagtgagcaaagtagtatcaatgagattcttctaaattaaaactactaagagtatcaatgagatacttcctttgtcccaagttacaagacgttttggttttttaggttcattattttttagactagactagaatatagtgtatatctaagtacatacaaaagctatatctagaaaagtcaaattatcttataacttaaaataaaaggactagctattaacctcattgggttactgctttatgtttctccttgctggatcgtatgatgaaagccaattgaaaaaaatttcagtcataggcagctaaatcaggtctattttcttaggaaatcttaaaaggtcaaacttttccaacaaagaagctaagttaaactatacgaatgttgatcaatggcccaacttttaatttctcaatcatttgtaaggaaataaaatattataaacctttattgcaacaagaaactaagacatgctcccctcaattcaaattataagacgttttagctatgaatctagaaagccaaaacgtcttataatttagaacagagaaattatataatgtatactttcctcccatttcacaatttaaccatagactatttaagttgtcataagctaaacaccaacatcaaattagttaattcattatggaatatgtcttgagtattatcatattttctacatgattccttttttccagaaagtttaagttattataggacaaataaaacaccacatcctgcctgaaccagatgacctaaatctggatacctgaactatatgaacatatggtctgtttggatatgcaattagtctaaattagttgtggttgactcgctagttggctgaaaaccagttaaaacttgaccaaaaaattatctaattttaattgctttttagctagtcagccaccatacgagaaccataccagccagacgttaaaaaggtatcccatttctccgctggtgtggactgactataacgaccaggggacgggcgagtgattagcagcgaacgatgtgacgtggcaggcagacggggcagcctcggcctcagacgcagaatttcgtgtgcggtgccgagccgcctcttatccctcccgactcctgcgtcgctcgcggtcaaatcaaaaaaaatggcgctgctgagcccgcgcgtgccgcggctgccgccctccaccttcaccttcaccttcgccgccgcggccggtgccccgtgctttggccgtgccgcgaggtgccaggcgacggcggcgggcggcgtggcggccgcggggcccccgtcgtcggagctggaggccgtccagtggggcagcgccaagctgcagggcgttcgcgacgagatggaggatgagatcttgctccgcccgggctccctcctcgacggcttctccttcgccgccgtcttggatggacacgccggcttctccgccgtccagttcctcaggcaccttgcaaatttattgttttctaaaataaataaataaaatcctaccccctcaatgaagcgcggttcccggctgctcgttcgtggcgttttcagggacgagctgtacaaggagtgcgcagccgcgttggacggcggcgcggtgctcagcactaagaacctcgacgctatcacggtctccatccagcgtgccttcgccgctgtcgacgccaagctctccacctggtcagggtcactggtttgcaggattccatctcccaattttcttgtctttctcatcaggcttgtaaatctcttgctgcttgttcttacatgttagtatgtggttgcttccctccaggctcgagcaagcggacaaggacgacgactctggtgctacggccactgccatgtttctcaggaacgatgtccttgttgtctcgcacattggggactcttgcttggtaaccaacaattctctttagttacctgtcttgtgtctgtataactgtgctttgtgtcatcctaatgtcaagcctagcaagtaactcgtccaaaaaaaaaaagcctagcaagtaacaacaggactccgattttttttttcctatttcaagctaacttttctggcgatgatgagaaggtagttctgaatcttgattagcaggtgatatcacgcggtggaagacctgaagctttgaccagctctcatcgaccatatgggaacaacaaaacgtcccttgaagaggtcaagaggatcagagcagcaggtggatgggtgtgttttctctgccagagttcttctcattctcctagattgcccctagactactgtattcatagcttcataaagttggtgactgtacatgttaagttcaaaacctacccttcactccttgctaaaataatgcaataaagaacatgttccttacccctcatgtttcgtctcattttcaaagttatgggaagctgactcttgtttttacaaagtcaaattatattgtttttttttcttgtagattgttgatgggcgcatatgtggagacatatctgtatctcgtgcttttggggacataagatttaagacgcgaaagaatgagtttgtctcttgtactcaactcgctgtctccacacattatgtattccttttactgcgttatttctcagtagtagcttcttagtctttaagattcctttatggttttgtacagaatgctggtgaaaggagttaaagagggaaggtggactgataagttcatctcacggtaaagcgttggattttattccatgaatatttgtacacatgcccacctaaaaattcatatgttcacatgcatctgtagcatgtaattaatgactctcaaagttcatatgttgcgtttcaagattaataggttattggttaacctcatggttggtttaataaaactatgttatagcgagtgcatcattgcaagtgacaaataatataaatcatgaaaattacatttacagcaatctatatttgaggcatcacaaaaaattgctagtttcaggaaactgagttctttttgctgaaacacaagttcactgaagctatctgaaaagtaacttatttgcaactcctgttcattttctctaaaccatggtaatcaaaatcattccttcatgccacaaattagattatcatcagatgataaatatcttatgttcttcagggtagagggctgatatggctctgaaccatggagtttgtcctcattttaatatctgatctgtatcaagtaaactatttatccaacatatatttatgtcttcttggtgttggcagtttttgaggcggtcgccacataatgtgaaagttgatggaaaaaaaaaatactcctattgcataacttaaaacttttacacaatgaggctatgtttgcacttgccaaaagttgagcttattaaggtctatgatgcttctaatgtcacaggagttctttttctgcagaataaaatttaaagatgatctaataatctcgtcacctgatgtatctctggtagagcttggaccagatgtggaatttgttctattagcaactgatggtctttgggattacataaaaaggtctatccaagtacctttcatatttatgtacagtttgcctttcaaatcattgtaattcactattgaaagttagatgttctgacatgtaaactgattggcttttgtagctctgaagctgtagcttttgtcagagatcaactacgtcaacatggtgatgtccaggtattcagtttatcccgcggagaaaaacaatagtaactattttcctttctgcaactgattctgtattttcacttattactcatttggtttgtgtagttggcctgtgaggcacttggtcagaaagctctggtattgatgcctgccttctgttgttcttttctttttgtatcatgaagctagtttaagtatagttttgggttcattccagaataaaaagaaatgctgttataatgtttcattttattctcaacaggatcaacggtcaaaagacaatattagcatagtcatagctgacttggggtacttattcaaaacttttagttgttcgtttggttgatgtgtgcatgcttctagttcaacatccactgcaagttactgacaattcgtacaaatattggcaggaggacaaattggaaggcgttgcccgatgaaagaccaaacatgttcttggaactaagtcaagcagtcgcgactgtaggggttgtctcaataggaatttggttttcgtcgttccttggattacagtagaactaggtccgttcagatgtgtatattactttctggttactgagttacattttctgctggcagctgcaaatatatgtatatattcttatagggtgaataattaatagggtaatatgttgggtaatagtgaacgtgtgaagtactgatgaagatcgtgtagtttcagctcctggtgagtgatgacagctgagtcgctttgagtccaatgggacggagtgaatgatctgtctggatttcctttttctttgccatattgagaaacttcttttaaagaaagtgatatgaatattttctatgtataaataggagatctccactaattgatttgtctacagttttgtcaatccacgtcattacttggggggcggctataactattttcattagttaagccacttcaagagactctatatccttcctaatcgttggaaatagagattttgataaaaaaccatcctacaacagccttttcaattgatattcgaatattaccatcttctattctagatttcttgctagccaaagatagtgaaacattctctaaagtgcgtataatatatagaaaaattgttagagagtaaaatgatatagaaagcgatatttattcaaataactccatataataatttagagaccaagttttagaactcttgaagatgctctagcgctaacagttcaactcattatctaatcacctattagtaggtggatttaaacacatctctattagaaattagctagctagctattttttaat

SEQ ID NO: 4301 - DNA, 8011 bp, Sorghum bicolor
ggccatattattttgtgtacacaaagaaaaatcgaccagctataataaagcatattgtcttacattttttaagaagtccaatttcaatttttttaaatgtatttaaaaaatactaatatttatgatactaaataagtatcactaaattaatcatacaatagtaccataacaaacttattcaaaatttttaatattgatagtgttttctatgtacttagctaaatctaagattgattgacttctaaaagacttgatcgttcctgtcacctgtcaccatagtatcaccgacccacgtagatgctctctcatccaaagtggcgcttcaaatgtgtccggccagggatatcccacgatccacaaagcagaggaatttcgtattttcatccaaaggcaagtgatacgtgtcggccgtggagcttcacttccaaacgccgtggccccacagagtgcttgaactttccaaaagataacgctaagctcacacggcttggctcacctagcaatttaccaaggtacttcaatataaggccttgtttagttcaaaaaaatttacaaaatttttaagattcctcatcacgtcgaatcttatggcacatggatgaagcattaaatatagataaaagaaataattaattgcatagtttatctataatttgcaagacgaatcttttcagtctagttaatccataattagacaatatttattaaatacaaacgaaagtttttacagtgtccattttgtaaaatttttagaactaaacaaggccttattacctttgctaaacaagggtatgaactccatcataggcagaaaaaaaaactccctatatattctaagttgtggaccattaattttgttttatgttaaacttctccaaatttaactaagtttgaagaagaaaaatatattatcatatacaatacaaaataaatgcactgtcactatattttatagtgggattaactaaaccaatttgacattgtaaattttagtgcatgttggtataatcatagttaaagttagagacacaatttttttttaccactatatagatgttcacgcctaaaaaacaaactaatttaacatattttggcgatggagcaacaaggaaatacacgctaacaaccgttgttgacagcggatgtggtgtgtggcaatgagctggcaaacatgtcggcgaacaccatgccaaacaatctcgagggaagggaagctgcgtgttccatgaaaactttttttttttttggtattactagttttgctctgcaatctcccgtattgggtaaaacccctaaaatggaaatggcagcagcgcattttcgtcaccgaattcaacaaacccatcaaaaaacggcaagctcaagcgcaaccgtaccttagctggctctcggatgaaaacagaaacgcattgtggatatcattagtatgatatttattttaatattttttatcaaatttagatttgaattaaatataattagatatcaatattataaatatacgatttaaatatttagactaaataaattcgatttcaaaaacaataaaaaaaatatccatactattttcctagagcaagcaatacacctgggaaaaagcccgatatgaatcgacactgttgtgtacagagcgtagcgtccactcctgtctctcatggtggagcccacctacctccaccctctgtgactgtggatgagcattcgcttctcttctcttctcttctctttttggtgtggcatcaaaaactccatcaaaatcaatcccgtaaggccaccaccacagacggcccctctgctctcctctcccggatttcagttccaccagcagccgccatggccgccgcggcagcagctgcgcgtctgcacacgggcctccctcatcgccggccctgacaccggaacgtggtggctgaaacgaagggttcgggggatcttttgctgcgccacgagctggctgcttgattgattcggcctgctgctcctggctcgctgggctgggcatgacgaggggaggcggtggaggaggagacggcaagggcccgctgttcccgcggctccacgtcagcgacgcaggcaagggcggcggcccgcgggctccgcccaggaacaagatggcgctctacgagcagctcaccgtgccgtccaaccgcttcagctcccccgcccccgcccccgcccgcgccgcgggggccaaggccagcctcgtgccctccacgtcggctgcccaggtgagacgctcgctgtttgctctgctttcaggatccagtttcccgtccccggaaacgcagaattcagttcaaccccctgttctcactgtgttctttgctgctgagtttagcccgtgccaaactaggcaaacctctgtgcttgcttttttttttttgtgaagcaaactgtgcttgcatttgcgtgttaccaattttcctgctgttgtctaagctgttcttgtgtttttcttgcttcttggcaactactgtacttcttccaaacattgaaaattaattcctgacttgcatcctaacaacttttctgtgagctcaattgccgaacctgcaaacccatagtatatatgttggcctagcacacgagcataggaagtttctaggtttctagtacataaataaatagaagggatcacaagctaagagaggatatgatcaagaatcagtttaaaaagctaggggcccagcgcatgacacatttatttgcaggttcatttgttaggatcctcatcgtgtatgttgtacagatgagcaactatccaatgttctgcgagtttgtaggacaggaaaactattccagagtgcaaacttgtgaggatcactcacaggaaagctgtgcacccctgtcaccatgttgtttactgctcagttgtcctcatcaaatttggccaaattgtgtgcaactgggtacttgcatagttatcagtaaaatggtgtcattttaggagctagggtattagctatgaccatcataggtaacataacaaatgaaaatatattgatggagtgagtgacccaaaccacttcagaattcagataacgagtgactcgattgtgcatttagggaaagaaaccaaatccgagaggtagctgtactgaactttcctagttttgctggtgttatccaaccgagctttgctatggtacaaccaaatgactgtgagccgtttgtttattttgatcggatggtcacgatcaactattacctcctaggacgtaatatatgaaacatatatttatttaatttttagttttggaaagtatgccaaattaggaaaagctttagagataaagatcgttttagatctaattgatgcattcatgatccattgaatgtgggtaaatctttttatttgtttcaactttagatatagcataatttaattaacataaactacatattttttattcaagtaactcgtattacacgtgtatgtgctcaaagtgacgtgaaaatgatgtgtgtatgtgcccaacatgcacgaaaatttacatgccatcttgcatgctcaatatacgttacatgttctaggtcactacaaagttcacgtcgtctcaattaatgtgttaattgttgatatttttttatatatgtaatgtaatttttaataattgaatagctgttgtatacatgttgatgttttatttatatgtaacatactaaaaggaaggacgtgcaatcaacaaggaagggccacgtggctggccgccggttctatcttgtcccgtgcatgagtggatttgaagatcttttcttttttttattttcttagatcaattaattgattttaaaaatctaaaaattaacggctcaaatttatttgaaatattacctccttagaggtaaagggtgtaccttagcattgccctatccaacctggtagtatcctttgcacgactttgtcagtgatcttctatctgaggctgaaatgttgatcctccctcttatagttgtgttacagtttaggctccacattttgctgcttagaaagtacctatgtacctttttgtaaccacgcatgtccttctttaaaaccacagtgatctgtttgtccagaataccatctccctgggcgttgattttacatgtatattcttatggctcttctaatttagtggattggagcgaagctcttgtactgaggctctcattcacttgaattctgtttcaaccatcttgcccttctagccattttgtgatgtgtttgggattaaacattgtgtgtgtgtgtgcggtgggggggggggggatgttctttgctgagagtatactttgtagtacatatggaaaggttcagaaacaaataggaaatggataacaatcagtaggaaaagctagtgcctgacataaatttatttgcaggttcatttgttataatctttaatatacatatcctgtaatgtatgcttgtctatcatattttctacgaaattggaggacagaaaaaaaaaatccagactccagagaacaaccatgttacaaccaccgacaagacatcaattacttgcgaatacaggtagaaagactaggtacttgatagttagattcccatagaaataatagcaaaaaagaaaagaaaacaaggggcttcctgcactcatgattctcaccctattctcccccattttgcggggtaaagcggtgagcaaagaatgaattgggattttgacccttaggtactccatttctcacctctaatccagttttaaatgaaagttgctggatgctttgaaagtactatctaccagtttgcagggagggatcctaactggatgggccttggcaaacaaagataggaacttagagttccattaacaattttttcaataaattttacaaagtactgacagagtttctccatccaggtttatggttatgacaggactctgttccagccctttaatgtgccttcaaatgaacctgctcgttcatctgaaaagttcaaaggaaactgtatcaatgggcagtctaatagtacaagaagagaatctctgaggatgtcctcacagaccaagagcaaggatgtttgtgcttcaaaatcaattgccgggtgcacctcacagcatagagggggcaacaccatcaagtcttctgggaagaaagtggtcaatgatgatgaatttatggttccttccatctgttctcctagaatttatcgatattctactcaagaacatgcagacaaatccaaaccccaatctactacaaatccacacaaaagtccttcaatgtccaaatcatctgcaaagtgctatagtactgtgaataagcacttggacagaatgaatgaagctgatatgaggttaatgaattctccaaaggttaaggagaaagaagcagtgcaagtaccaaaaggtgtggaagttaaagaaaaggattcatcaattcaggcatcagaaaagttcaaagacaaatatgctaaactatgtcaaatgaggaataaggtgagtaatattaatcgttctgacaataacagttgccaacctacaagcgtgaatggaaaatccacagaagcaaagaaccctacagcaactagaaatccatcatcctgtaaaccatgtactgatgtagatagctctaactggaattctaatttactggaaagaagcccacgggaaggtggtgcaaagagaaaacgacaacatcacagtggagagcaaaatgatgatttatctgacgactcagtggaatgcatacctgggtgggagctctctccagatgaaattgctggagcaattggtccaaagcatttctggaaggcgagaagagctattcagaagtaagtatatggtgcttgagtagccgttttgtagttttgtaccaagtatttgttgcgttgtttagaaaattactattttgtatgtttcactttgcttaatttcattttcttttagttttcagttgattctcatatggaagaaaaaaacatgaagatgatatgtctcttagtttggctttcagtacctagctattctgttgtaccttttaataaactgtagataatgtgaatcctgaatgccttcagtttttgcttttttttagtagaaacacatattttcatccaaaaggacagtacgttacttgttagactgatattgcaaatattactttcttgctttccggattgctgcataatagcttttctgatgttttacactttgttcttttaaaatccacagtcagcagagggtttttgctgtccaagtgttcgagctgcataagctgataaaagtgagtcttcaggaaataaatagttttttcttccttttcccattcataactaggttagcttatgtgatacattcttgtgcacaatgccattataacccagcttataattgacttccaagcaggtgcagaagttaattgcagcatctccacatctccttattgaaggtgatcctgtccttggcaatgccttaatgggaaaaaggaacaagcttcctaaaggaaatttgaaagttcagaccctgtcaatcacaaacaaagatgatatccagccaactctagagcaaccagagctatcaaaacaaaacacagaaggaaacccatcgcaccattctcgtgatgatggacttgacgacaaccatcatgatcaagctgcagcaaacgaaacctttacaagcaaccctccagctattcctgttgctcctgacaacaaacagaataactggtgcatgaatccgccacagaatcagtggcttgtcccagttatgtcaccttctgaaggtcttgtctataagccttatgctggcccttgtcccccagttggaaatctcttgacaccattttacgccaactgtactccattaagactgccttctacaccatatggtgttcctatgcctcaccagccacagcagatggtccctcctggtgctcctgccatgcatatgaactacttcccacctttcagtatgccagtgatgaatccaggaacaccagcatctgcagtggagcaagggagccatgcagctgcaccacagcctcaagggcacatggaacagcagtcgctgatctcatgtaacatgtcacacccgagtggcatttggagatttcttgcatcaagggacagcgagccacaagccagcagcgccagcagccctttcgataggcttgaagctcaaggtgacggaagtggcccagtgtcattctttcccaaagcttcagttctgaatgcccagcctcagccctcatctggaggccgggatcagcagaaccatgtaatcagggttgttccgcgtaacgcacagactgcttcagttccgaatgcccagcctcagccatcatctggaggccgagaccagcagaaccatgtaatcagggttgttccgcgtaacgcacagactgcttcagttgcgaatgcccagactcagccatcatctggaggccaggaccagtggaaccatgtaatcagggttgttccgcataacgcacagactgcttcagagtcagcagcacggattttccggtcaatacaaatggagaggaagcaaaatgattcgtagctggttcgtgtcatttgatgacagcttaatgcagtttacagggctccccaagctgcagattatggtggctcatgtattctgaccactgattgcgcttacccaatcgtcatagattggatgatacgatcttctgttctctccatagttgtaagtcaaggttgtgtgccgcagtgatggccctgaggccctgaagttgggagtctttcatgaacatgccaatgactggaattggtatatataatgttactttaactgtgttgagctcatcacacagccgcgcttctgttactatgagtggtacagtagaaagcagcagtcagaaatgactgccggtaacgtggtacggggtcgtagagattggtgtatactggtattataggctgctgtgcaattcagtgtttttttatctatatggtgcacagtatatgtcgaacctgtaaggcattctgggcaatgaatttggcttccaaaattattgtgctggcctgctgggaaccata

SEQ ID NO: 4302 - DNA, 4092 bp, Sorghum bicolor
tacatgagctaatagattttaattatgtgtaatagtggattgcttagttggataccttgcatgttgaaagaaataggtagtgggatggtagtggggttttgctttataagagtactaggagcataccccgcgcgttgctgcgggaattctggattaatggattatgtagtatgatgatgttggctatacttatttgttttgctgatatggacactacagttgtcatgtgtgctattggattttaattgtatatatggtagtgcattgcatgttgagataaatagttattgagattttacttagtggattttaatcgaatatggtagtgcattgcttaggtggataccttgcatgcttagagaaatagtttagtccccacacatgactcaactctgcatggatgcagaacaagtcctgcctgactcctgtaaactaggagcataccccgcgcgttgctgcgggaattgtggattaatggattatgtagtatgatgatgttggctatacttatttgttttgctgatatggacactacagttgtcatgtgtgctattagattttaattgtatatatggtagtgcattgcatgttgagataaatagttattgaggttttacttagtggattttaattgaatatggtagtgcattgcttaggtggatagcttgcatgcttagagaaatagtttagtggggtttaggattataagagttatagataagataagatacccacgagctatgtgattaagtaagcagtgatgtaacactggtgcatgaagaagggtcgatttgattttatgatattggagtaggtcgatttgtatcatgacagtgaaacaaatcatctgcacttctgcaacagaaatatcacacttgatgttgtttgggtagatcttggtaccggagttgtttggtggttgtaccctagttgtgtggttttctttggatctggttttcactaaaaccaaaactaggcgaggacttgtgcttttttatttgtccttgtaataaaacttgcagcaacgcttctgacgtccttttgaagaaaaatcacacatcatgtagaaaataagccaacttttctctaatgatgccaagccatattctagatgatgcgctaaacaatgtaattatctggggtaaataaaagttagaaagtggcaaagaaaaaaatgcctcgcgcagtcgcgcttatgaacatttcatacttcattttcgaagcggactaccctccttggattatgtctcctggcctatagggtttcttagctttacttccaagtaaaagcaactttctcacaatgattctcttaggatgttgggcatgtgtgatcgtctgattgaaggtgtacctgataccattttccagatttttttttgtccatgaaccattcctaataatcttaaaaaagatgaagcaaagaaactatccaatcagagatcattgtgagatgaatacagcaattatctttttttttggacagacagttacagctcaagcaccatgttcctttgtcctcttagcggacctgcatgtgccagatcgttattagttgaccctaatacgacatgcgtaccagacaaaccaaatcccataatccaactccatttgtccacccagaattcacaaactaaagctgcagacaacaaagaatccaactgttatttcctagtatatatcgcttccaggatcaatgctggcaagtatagggaataaaattaaagcactgtttgagaataattaaagtagggtttgattgacccagctgcatcaagtgacactctgtatgacacaggctgctgcctgctgcgccgtgcaagccacgatgcagcaggatcatcctcgaccaaccaccatgaatgcctgcagtttgcctgcgtccatttcgctgtcactctcctgcactgtgtcctaccatgtagtattattatgcatggtgctccagttaagctttatctgtgtatataacacataaaacatttgtcattagcccatatcaaggggctcagttagagccaacataccacgggccacggttctatagcttcacaccgaaaagcacttcccctctcagttttcgtcagttaagctttccccacttatatttgcttacttcactgtccttcaacaaatctgcaatctggttcagcttgtaagggcctcttcttcactctgtaagtttcgattcaacaaatcgcaggctttgccctttcttcgttttgtctgcacgtttttgtatggggatttggcatcttgtctgttgtgtgaagaatcctttccagtcgaagtcgaattgatcagtcagcagataatccccccccccccccccccccagtgtttttcgtcattattagctagtggatctaggtcaccgtaaattatcgtcattattagtgcaatcctgtcagtatttcctgtggtgatgccggaattcaactgcgcccacccccatttgctgacttttaagaagctattgcacccaaacttcggtatgcctctgagtgaaccatctaaattaggtccctttttttttccttctatttctttttgcattgaaacaaaattattttctctgagaagaatccatgtcgatactgtagagcaaggaagcgaagaacagggaaacaaggacatggatgctttcagttcagtgatggacaaggtgaagagccacccagaagtgatggaaaaggtcagtgcagtgatggacaaggtgaagagccacccagaagtggtggaaaaggtcaaggacgaggtgaagagccttgctgatgctctccatctgcggagacatggtaagaaatgcattgtttctggggatttcattggtgactcctgcccattcacagccttgatctttaaacatttgcatcatccttaccttgaacaggcaaagataaagaacctgagtctgaagagaaggcagaagaaggcgaggtggcgcagagcgtcgatgagagtgcctctgctgacaagactgaagaacctaatgtgttggagcaagcagtagaagagattcaggctgtcgccacagctttgcagcagcaggcagccccagcagctgaaactgaaactgaaattccagttgagactgctgctgctgctgaaacttcagctgcaggagacaagcctgaagaaacaaacaggggggaggtggagaaagatgacccgaagaagcggctcgatttcgctgggttcttcgccatgctgtttgagaggttctgctccccgggcaacaagaagaaagattaactgattgcagatcagctgtggatttctggttttgtgatattggacttggaaattacatggggagtgcatgggattgtgggtgcctgggtggtgtacagtctgcggttgtgttctcttatcttaagaaaaatctctattgatttttactatcatctgtgatgatggggcaatggctacattttatatgatgtaattattgtcacccttgtggattgatttaatttatgtgaacacaattggtttatttttggttaagataatacagtgtgtgtgtgtgtgaagccttgtataaacatgtgagaaccaattttgctaatgctgaacaaaattttagctcaactcaggcagcaattttccatatttgttgaggttggttctatttgtaatcaagttgcatgagaagagtttatttttacaaagaaagggggccaatgagtagtctcaaagataaaaggtgattttgttagaccaagctgatttgttgtgggagaaaaatactgctaaatagctgatagattcaatagataagctaaaaaaacaagctcatgaaatgttggagattctattgatagaaaccatcaaggcttcatcttcgtctttgctaacatttgatatataaaatatcttcaggcacatttgatgacataaacaccagaatctccaataagggcactactaatattgttaatgtagggcaactctggtaccatcattgtattcatgattacaaattacaagtagcataatggatggtacaagcaactcgaccgacggttacagacacagaactatttgaccaatatacaatactctccatcatatgcaacatagggtgat

SEQ ID NO: 4303 - DNA, 15224 bp, Sorghum bicolor
actccctcagtaaacataaaattgatatcgatgactttgactaccgagatatctgttttttatggttgttttattcacactaggatccataagtgttttattcacacttatcgctcttaacagagaatgaacctgccgcaagagagagagagaacctgattattcgaagttcaggcaacaacatcttcattgggtaggggaagaatgcaaaattttaaaatctccttcacatcacaaacaatcttttttttgagaaacttcacacgtcacaaacaatccgtgatgtttgttttgtcccaactagactccaaaggccttgtttacttccaaattttttttgcaaaatatgaatagtgacactttcgtttgtatttgataaatattgtccaattatgaactaactagggtcaaaagattcgtctcgtcaatttcgaccaaactgtgcaattagtttttattttcgtctatatttaatactccatgcatgcgtttaaagattcgatgtgacggagaatctgaaaaattttgcaaaatttgttgggaactaaacaaggccttagcctacggggatgtgaattctagttatcctttaaaattttaaggtctatttcgcaggaatttcatataattagctctattaaaaaaaacctatgttccaaatatgtccttattgagatattagatacttactagactttatttaagaaagaaggatgaaacaacttcaaaaaccactagaaactaggacggggataatttaaatgatttcattttagtagtggaagggtagggtgtttagttttgaattttgaagtttgataatgaaaattatagactgtattggtaataaggttgaaaacggacgggataaatcccgtttcgtccgtaaccgtagaccgtattttcccgttcgttttcgtttttttcaggataaacataaatagaccaaaaatggaacgaagtgaaacgggagtgggaccaaaaacagtggagtttttatgcgtccgtatttgcggaatcccgtttttgcatcccgtttcttgtaaatatgggataggtagtccagcaccgcctaaagcccaatatggcccaaattatgaaaccttatcctattcctatccctatcacatgatgtgtcttgtctcttgtctcatatgatgtatgaataattcatatttgtgtgatctatgaatatttagtattgtactaatatttatgtatggtcactggtctctgattagtgcatatttgatatttggcattgcactttggtctctctatttgagctatcatatgcggcttatatgttctggcttaagtttctgttttccgctcatttctgtctattttccgaccgtatttactcgttttcgtattactgattattccgctaccatatccgctctcgtctgtccagctcccgtccctgttttcatctaaaaatatgaaaatgaaaacgatagagcgattttccattcgttttcaactttaattgatagtctatggacataaaaaaagaaacttttttcttatggatttgcagcgtgtcaatcaaggccttgtttacttgcaaaaaaatttgcaaaatgtgaacaataacactttcgttttatttgacaaatatagtccaatcataggctaactaggctcaagagatttgtcttccaaattttatacaaattgtgtaattagttactttttttacctatatttaatatttcatacatgtaacgtaagatttgatgtgaaagagaatctagaatattttacaaaatatttggagaagtaaacaaggcccaagcggcccagcacaaccatggcccagacaacccacaacgcctgtacgtgcgatacggcccaagtatggttcagcaacaacgccgacaagccacgcccaggaaaaaaaaatcagaaaagaagcccctcctttctattcgccgcgcgcgcgccgtctcgcgatccgccggtctccttccgccgcaagcttttgccccatccccattcccaccgccgcctcttccgcctccgccggcaaaatgccggtctaccgcatccgcggcgtcgacgtcgacttccccttcgacgcctacgactgccagatcacctacatggaccgcgtcatcgagtccctgcaacaggtgaccggagtcccccttccccgctcctccaaccccgcgtgctaaaccctaccctccctgcgccgtttgcgcgcccaaagttttgctcggttttgactgcttttgctttgcgtttgcgttgcctcggcggatcgatggacagggaaagaacgcgctgctagagagtcctacggggacggggaagacactgtgcctgctgtgtgcgtcgctcgcgtggcgccgcaccttcggcgagttcctgcgggtcgggcgcgggggcggcggcggcgggactcagcagttgccctacgggagccagccgtccgttagccagcagtcagaggattccacgtctcagcagcagcagtcgcggtacccagtcatcatctacgcctcacggacccacagccagcttcggcaggttatcaaggagctcaaggccaccagctacaggtcggcaaccgaacttgtactgcagcaccttgtttttatttgagagctgactgtgttgaactgtatgctgttaagtaacttctcatgaatgccatggtactgagggctggttatgtcttcagtagctgcagttgtagattgacaaatcctagagtctctgatggttcagatggtgtttcacaggccgaagatggctgtgctgggttcccgtgaacagatgtgcatccacaacgaagtgagcaaactccgcggaagagcacagaacaatgcctgccacttcctctgcaagaaacgacggtgccctcataataaccatgtttctggtaattgcaacaaaattctttttttgtttgatataagccttaaaattggctctgcagacaaaaataaacagcaacctaaaaggaaaatgcatacacaaattcttgcctttacctgagatgctttggttgatacaaggctttgtctctctgaatgccatgatttattattttattcttgcaaatgtctcttcaagtggagggccttccttaatgccttaaaaaaatattggttcaatactctggttgaatacttctgttttattcaacctacttccctggtccaccttttgcagctaagttttttctttatattccaaataaatttctatcatcaataacacatatattgagcatgaatggcattttcctgcagagttcatgaaaaacaaacctgagcttgggaatgagccttttgacatagaagatttgattaatattgggcggcgtaagggcccgtaagttttaaaatttttctccctaatttgcatttttagagaaataacaataacaagcatgactatagattttttgacccacaaatggcatccttttctttatcacttcaggtgcccatattacatctcccgggaactttcaaagtcggttgatatcttgtttgctccttacaactatcttattgacccgggaaaccgtcgttccttgaatggcataccatgggacaatgcagttcttatatttgacgaagcacacaacttggtaaggagcttcttctgcttggactctcaatactatatagccccttaagttgagcattccagatgtaaaaaaagtactttttcagacttaaatgtgccataactcttttatgcaggagagtatatgtgcagatgcagcctcttttgatttatttccgaataacctcacagcttgtatagcggaagctcatgaatgcatcaaactgtgtgcagcaaagaggtccatcgaaaaatctgctgataaacaatttgatcctgaaaattatgcaatactcaaaggtgaactataattctttcaacttctcaaagtcgcattcagatccatattgtccacttctatatgcctctttcgttcatatgtggaaagcttgcaacttaactttgatgattttaagagtgatcttcttgtggtaatgccggagcattctttccagctctcttaatggcacttgagaaaaaaattggtgagctgttaattgcatccaaggagttgggctacacaaaagctgggagttacatatatgattttctttctgaactgaacattacatcagacacatccaaaaaactgattgagacaattgatggtgcttctctgctactagaggaaggtaactgatttttatggtattaatttttcatcacaatacactaatattcttgataattagtaagatcaaagttgtccatctttgcagctcgattgtgttgaacacattaacttttactaaatatctggatggttagtgcaaagtagttcagtaactattgttctttttgtcctcgagcatgcaggagaattgtgtatatttgtattaagatggaaaaatacacacccacaaaccctttgtttttgagaaaacatacacgcctttttcgtacaacaacatggccttgaccaaaactagaaactagaacacctattggttactggccaccagctgcagggaaaaaaaggaaagataagcctcgagcccccaccaaactccagtaccacatccctgcaaaggcgagcaacaaggctccatccaagttgggagacatcgattgtgattatttaaaatcatccaagtccaagaattaatatcgaattcagcccattcctagtcatgtcaaccactccaaactccacattagccaccagtcgccaaaggagatttcatcttgttgtggagaaagattgtttggcccaactttgtgcaaaagatgaaaccagaattaattgtctcctcccggtcacaaagggggtagcaggcaggatggcgggagaccatgacgtgccaatcgatccgcagtccagcatctattatggtaagcaatcacatgaagaagtgacaattcccgggtgcccatgctttccaaatatgttcccatgaactgaaattgatagagacgaggaagaagcccatgtaagctgatttagctgagtactgttcaaaggctgaaaggtggcatatgggaaattctctatactgggctgcaaggcaacctcctcaagaatatcccacaatctcagaaattcagcaataacacctattagctccctggatgtcagaagtccatccatgactggtgagggcctccctcacagtcctcttgcttgccccaggggcggatacagaaaaaataactttggggaggggtggtggtggtggttgagcttacaaaggcactataggctttgcccttcttctcacaagtgcaaaaacttgcagagcaagatcagcaacttgctgcccatgtataacttctgaaaaggtagcaccatctctaacttctgaaaatattgctatggaaaagaagtccctgactgagttatgaacttggataggaaatgctaaccatggtctattagtctcgattttgtgagtggtgcaaaagctgctgtcagctgtgaaagatctgctgtgagctatgtgctgtgggaaaactgtaagctgtttggttaaaagttaaaacaattagaaaactgttagaattggccaacacattctattccaggcccaaaggggcaagtatacatgtgtgtacatatgcaaagaacccctccaattagagggaaaatacaaagtacatctatatatctaacaaaaactaccccctctctatcccctaacagctgtgaaacatctctctgtttccacccatttggaaaagccgaaagcagggtctaagatgccactgcgcaaaagaagcggtagacgaagtagctgacgcagatgtaggagaaccgggtgatgggggagtcaaagcgggtgaaagaagacacaaccaatcaatctcccataggcgttgtgaatctcgatacataggcccagttcccaccaaaagacccgtacgaagatcctgaacacaacaagaatcagactcaaggattatgcgacaaccatgatcaatgatttgacccacagacagaagttgcatggtgagttgaggaacatgcgaaacagtaggaacatcaaaagaagtcgaacaaagataggtggatcggaagaagacaaagaggacatgtgatgaaaagaggcaccagagtcaagaaaccatcgggatgatatacgtgacggaggaggaggtgcggaactagaagcctgagctgtagtcccatgagcagaggtttgagctgtagtagtgaggcgacgaaacagggtaagaacctactgctccgctgtagacacagaacgagtgccctgcgaagtagaggaaccaccagataggggccctgagagtggcgtctatcatgacgcccctgtcaattgcgctgcttcttgcgacaatccttctcatgtccgtagagcttgcagtagccacactgcacaccagatgggacccctagcaccatcggagactgggatggaggcggggagaccggtggaggtgtggttggctggccgcgaggacggagcgctgcggcgaagcatgactcacacccctagctcaaagacgggtctcctcagttcgcagcttaggcatcgcctttgagagcgatgggcgcggacgacgagtcaacaactgcgcccgaacattctcaaactccggacgcagccgagagaggaactcgtaaaggcgaagtatgtctctctggtcccggtgatgccagacatttgtcatctgacggtggaagttgccaactgtagaatcaaggtgacgactctccatctaagcctcaaatgcctcaagtatggcagtcttggcatcatcgtcagcatttggcgggtacttgggtggcgtggggagaataggacagggaggacagatccgctcatccgtgaggtagccccacaagagctgcccatccatatggacctccagatggaaaacaaattcaccccagtttgtgccactgaaaatgtcagggcaccgagggacaggaatagcaccagggcgatcgggcgacgccatggaagaaggaagctcattggttggtgttttttttggggtgtgtgtgtgtgggggggggagggggggggttgtggagaaggaaataaaaataaaaagaaggaaaacagaggagggaaggaagagtagtgcagggctgctggaaacagaggagggagggaaatagaggagaggaaggaaagagcagtgtaggggccgctctggcggtgtgaggccaagggcagcgcaggggccgcgtgagcgggcgcgcgggcgcggaaaacttcgagcgagcgggacgggagctgtaggccgttgtgaggcgagagggagcggggcggacaagggaggcataggcagccacacgtgggcggctcgagcatggcgcaggcggccgcacaaggcgcgcacgaggcggcgcggatggccatgcggagcggcgctgggtgggcacggactgctccccgaagcgggcgcgcgacgcggcgctggtcggctggtggctgagatagaacctggaaccctagcttgataccatgttagaattggccaacacattctattccaggcccaaaggagcaagtatacttgagtgtacatatgctgagagcgaatatatctcaggagtggattgatatattgcattaggcctcataggctgattatatagggtacataggactaacacccatgtgagtaggcaatgtggtactattcctatttactataacattgagcagccaagtcaaataggtttgggcgccaggctcatggccagcccatagggtgcctattctaacatatgcaaagaacccctccaagtagagggaaaatacaaagtacatcaatacatctaacaaaaactaccccctctctctatctccctaacagctgtgaaacatctctctatttccacccatttggaaaagccgaaatctgaaagcagggtctaagatgctgctaaaattgtgctacgcaaaagcagctgcttctgaaaaagcagcttcaggttcaatccatttggttggcgttctgctttttggcagttccagaaggtgaaccaaacatagccgaagtgcccatccaagcgtttgcaagtaagagataacgagtgcaccatactgcggagacagctgactttcgtccatgccaccaaacaatgaccatccgttgcatccttacgctctttcccaggagagcttcttctaatcttatcaatggtcttaatagcctatggtgggaggtctaaagccattgcaagatagatcaaagtggaagtgagcacaaaaaccaaaatacgtctcccagcttgtgtcaatagtttgccttccacacggtggaaggtaagcaattatatcaattagaggctgtaattgtgctatggttaatttcctcaaagataaggaataccaaggtacttacaagggaaactgagcacctcacatgtcagcttttctttcagaactagaatatcacttccgagctttggataggacacacgttgctcttctgcacattggttttgagaaccgatccttcaccaaataaatgaagaatgtccagggttatctctatcactagcggtgggccggaggaaaacacatcgtctgcatatagagaaatcttatgaggtaagacacatgtagcaaggggttgtaggctccctcactggaagccagagaccaaagtcaccatatgcccaagtatctccatcacaagaataagtagcataggtgataatggatcaccttgccgcaatccttgccggtgtaagataacctcaacagggatctcattcagtagcacctatgttgaagatgatgctaaaaggccacttataatatcacaccaaataacccccaaactgagctttctcaacacttcaaggaggaagggccaagacactgaatcgaatgtctttgtgattattgagttgcatgcaccgaccagttcaacccaaaagcttaagttgatagggagaggtggacaattcacttatattacaacactccccctcacgtggaggctcccttaggcctcagacgtggaataggagcgagcagcaattattttatttaattgcgctaactaggattcgaactcgagacctctggctttgataccatattaagttgcatgcaccaaccagttcaacccaaaagcttaagcttatagggagaggtgggcaattcacttatattacaacagtgatgtctaatttgaggagaaggtggggctgtttttgttgatgaagaaactttgccatttgttggacaagtatgaagttatcctgaaggaagtgtttcttaaggcattttgattcagacaccataagatgaagccaagttgccaaatgattagcaaggactttggtgttcactttagcaaaactgtgaacaaggcttataggcctaaagtccttgacatgacctgccccatccttcttagacataagagtgatatatgccgtgtcaagtgcttccatgttcctgaattttctgctccaaactgctgaaatgcagccatactattctgttttaacttttattctgttcctgcatatttaggaaattctgctgaaactgggcgaggggtccaggcaaaggccacagtgtctagattggagtcaattagggacatgttagacataatttttaggggtggtggtcaaaaccatgcaaaatattatcgagtaagtttctcatcatttacatttctcagttcattttcattgggtgtttaagtatctctctaattgcatttccctgttcgctttcattcggtgtttatccattatagctatttccatgcctcataattctgacaatctgacttccctcttattactaccatccctttacatatttgcagcataagctttgcatattttactgtactcttacaatcacacttgatattttcagtttcatgtgaacgaatctcaacaaacatctggagatgcattgaaagttctgggtaagttcaaagtcgatccctgaatgttctttatatgaaggagaaagtctgtaatccctggtacagtcatgagtactataaactgcatggatagtattactccactgattactttcagatattgttgattatttaaaggaaaacacatgtgacacttggtacagttcattctacctacatgcttagaatagttacaccaactcccttcaggcatggtgccgtcaataataattgaaacataaaagatttatattattccaatccacacttcagttcattctcaactactgaataactatatctttattaattatctacaattttcttgcattctcaggtaagtcttcaaggacccttagttggtggtgtttcaacccggggctggcaatggaagaatttctcaagttgggtgtgcgctccattatattaacctcaggcaccttgtctcccttggattcactagccatggaactaaacctgtaagtaaatctatgttgattcagtttacttagtcattggattgtatctttattggttgcttattgatattggcttctctgtttgatgttaattgtcaagataatgttttttttcccatgaatccagtgaattcccagttagactagaaaatccgcatgtcatttcctcagaccaaatctgggttggagttgtgcctgtcggcccttctggacatgctcttaattcttcttatcgcatgcgtaatactatacagtataaacaagagttgggcactgcaataggtaggccaatagtaacaatatatgcagctgcttttgttctgatacatttctgctgacatatgtgctcattttgcagtaaacttcgcacgcattgtgccagatggactccttgttttctttccttcatattctatgatggatatgtgtgttgaattctggaaaaatagggtatttgttgtttctgactagtagttctgatcacttgaggtgcttatatacttagaaatccataacttaatctcttacagaaccattcaaattcagcgtctgagaacacaatttggcagcggatctgtaagcacaagcagccagttatagagcctaggcagtcatcaaactttcaaagtgcaattgaggtttgaaatattttattagatgttgcttgcatgataatgataacacttcgtatgctcatataattatgaaccatttgatttgcaggattatagagccaaattacatgattcttcttctggggcaatattttttgcagtgtgtcgtggcaaagtttgttcctgttctttgcaacctttgctatctattatcactttttttttattttagttttccattctcaatgatattgagttaaatgcttcttttgccaggtctgtaacatgctaatcaacttattaaccattatgtttactcttttttttttgcgctgaaagataaaacatgcttaacggcataggccctgtttggaatggcttttctcccagcttcccatcagaaaaaagctgaggcagctgccaaatgctcggcttgcttctttcgcttctatgaacgggctgagaagcgagaagccagggctgaggtgctgttcccagcttcttccccaccgcctgtacgtgcatgcccctcctttgcctagctcactctccgacgcagctcctgcccttgtgcaagccctgatgtgacagatgcgatggcgccgctcctcgccggcggcacaactattttcggacagacatgcgatgagctcggaccacgcgtttcggtttgtggctgtgagacgagctcgaacggggtacattggtctcggcagctcgatgacctcggactgtggtgcagcaccaaccaatcggtgatgtgtggggtggtgcagtgcggtttccccacagacctcacctggaagacagccccggtggagtgggccttgggcttggacttcatggagagggtgaggattcacaggattcatggatgcaagattggggtagggacatcggaaggggtggagatgggaagaagcaagtgaattccaaatgggaagattctccttttacaaaagcgagctcatcgtaaaagctgacttatcaaatataagctcataaaaaaagcacctccaaacagggctgtaatagctgtatgagtgctgtaatgttaatataaacactgtacgtttataaagcagtttcatgaatgctctgcgaaaagcaggcatacaagatcatgaacacgaatggcttgtttctgctgtaaacatacatttcattgcgctatagaagtaaccattggctgggcaagaaaagattgacgctgggggccaagcaggatacttatggaacaggaagtctataaactcgatggttctagtgcaaaattatgaaacatgagggcgtctctatgattaaaaattaagtgaacaaaccaattggtcattagaaggacatgtactaataagttggcagtaccatttccaaaatgttgctttttcactaatctttgagcttttgctccctcatttgttcatttttgtacttgtgcaggttagtgagggtcttgattttgctgatcgtgctgggagggcagtgatagttacgggaatgccctttgctactccaactgatgccaaggtttgtttctatctgtatgatgtgtagtgtcctcctaaagctttatcactaaaagttaatgtctccttttgttacgctcctgttcttgctttggaactgacaattttgtaccaaatatattgagttttgctggcttgttatgttgagccaggttcatacgtggatattcacacacatttttaattgtcactttggatgagttgaattctgcttcagcctttttaagtctggaagtattttgccaccattcattagtttttctaaaggctattgattttcttttgttccttgctttttgacctgcatgattttattatcatatattcatattgcacaaagtactagctcttggactttgggcaagagtaattggtattttcctttagttaatcgtcaattttcctgtgtctttgttccaggttcggctcaagcgtgagtatttggataagcaggggacaccatctaataaaaacacaaaggttcaacaaattcattgtaaattgttaagcaaacctttgctgatcaattttacaaaaaggttttgcaattgttttttagacattgacaggagaagaatggtatgtgcaacaagcagcaagagctgtcaatcaggctgttggacgtgttatcagacatcgccatgactatggagctattctttattgtgatgaaaggtctaagcctaatcattgtcctctaagtaacaaatcattgttgcttttgtgctgaatttcctgtggaagtatattctttattgtgctggactgtcaattatttcttgagcttccatggtatagtagacactatcatgcatacagttatacccaattcgatggcatcgttaatcttattgaagggggatattctgtaattacacacatgatttcttggttttgtccaatcattaatgccttgaatatttttctataatagtagctacatagagcactctgaagaaatcatatcgaaaccacttcactatatttgtttattctgttattcatgtattctgtaatcggtatactgccattttgggctccataagtccatattgtaatccttagagttaaaccagaaaaaagaggatcagcgttttttttaaacaatgggatctgcgctttgcaaatatcaaaatagtctttgcattttgtgagcttaggttaaagtaaactaatatatgcaattttaagaatcatgaggcagtacatggctttgcattttgaaccatgttgcttgtttcagtcaaacatctccagaacaggtcgcctttattaacagagctacttctcattgtatgttggttattataggtttgcgtggccaaattatcaatctcagatgtcatattggcttcgacctcatataaaggtactccctccgtccagtaaaatttgcaattgtagaattcaaaattttcccaaaaaatttgcttacatatagtcactaccatgatggactatcacatcatgtgggacccacacaacacctgtactagtgcccatgtctctcgaacgctcgtcgcaccagtaaaaaagaaataaaaaaactgccgcacaggcacgccatgcacagcctcacctcacgcggacaccgtcccagccacttgtttttgaactgccatgcgtcttgcaatgatgtgaattcagaacagtcagtgcatcagaaacctttacaggggcaaaaaagtcattttacactcaccttgatttgctcctcaagtcctacaattgcaaaaaatttgggacggagggagtacatctttttactgtctttctacagtgctctttcctgtgcttatattccttctgcagtgctactcaaagtatggggaagtagtccaaggattgacccgtttttttcgagataaagcttcttcagatcctttgtcgctagagccaacagattgtaatagtaagtctagttttgaatattgtgataaacttcttttatatgttttttctatctatttatacgcaagtccacacatatttaattaatttttgaaacttaatctggtgtacttgtttttctcgaacaatccagtgtacttgttaatggtacatgttctgctgtgaatatggtttttttacagcttatttgttagttgacatgatgcaaaattttcttcagaaatatatcattaaggttatcttagcaagttaccctgttaaacctacggtaacagtccacatctccaaattagcaggagtgtctttaattcactggtcatatgttcgtaaggacccaatttgatgcttgtaggtagtttaggattcaagtaatgaaagtgtaatataaatgtttgattgtacaaacttgaacagaatgggactgaatcagcaaaatcaactatagttctaccaatacagggctggtgcaaaggcgaggttttcttcagtataaaagtggctgtggctcaagcaaattgcattagacagaaattgacaaaggatgtctatgtctatgtctatatcgggggatagagagctgatttttggccattattgttggttttgcagtccatatggtcactgatttaatcatttaaattgaccagtgaacctgatgagtctgcctcttgttttagattgccagcttaggagtgtcataagattataagaacctatctgaaatcagcccctgg

SEQ ID NO: 4304 - DNA, 4903 bp, Sorghum bicolor
aggatagaagattgtgaagtaatttggatcgttaatttgtatggagttatttttctgggtatattttttagggcacatgaagggaggctatctcagcggaggaggttatatggggtagaccaagcaatgaataggacggtgcattagtagagtagatgaataggacggtgcattagtagagtagagtagatttttggatacatgaagggaggctatctcagcggaggaggttatatgaggtagactaagcaatgaataggatggtgcattagtagagtagtatagatagatagaagatagataaatagattagtagagtagactaagaactctgacataggccctatcatgatgtccaagctatcagcctcaccatgaaattgatatatgcttaaactatgtttggatccgaggctaggttcctaaaatgttgcgctccatgttttttacagacggaataatcatggatgagccaatttttttgtttgtttagatggatgagaataccctaagaaaagatggatcagaacaaatgagacgacaattgtcaactacttatatccattaacttcaaataatgacaagtaatgaaaatcaatgggcaacaaatgttggccttatcatgttaattatcattaatattacactagtaagcactaattaacaacaaaataggctaattatccataatcaacactaatattgatatggtgattgctaattaacaataaaataaattgtcgtctcatgaataagttactaatcaataaaaatagactaaatcatgtcattgataagttactaactaataacaaatagactgaatatcttcatatgatctcattcaaatgtgctagtcccttaatggcagttgtcattaaatccatcaaaactcacttaaggcctagatgagtgaggatgtgtcttgatgaacaatttgcctagaaaaattaatacatggttgattgcactattgcatttcaccaacataaagatttttatgctattgtatattgatgcctatagcatcctccatgtacatcatatggcttccccctcctctttgcacatgtcatcttcctcatcgtactaacatatctatgaagctatgtcaaggacctcatcatgacacccccaccttctctctgccctctagcattcctacactacccatgcgctggtgcttatcatcctaaactacccataactcgtttccatggttgatgacaaccgcccaatctcgagcctagctccctcgctagaggaaaggttcatgcaacaattttgaaccttactggtgaggtgtggaagaagagtgagaatgaaaaagggcccacttgttaaaagattgctagagccaaagagcaatgctaattttatgtttttttcgcttttatgcgtgcaagttttcctttggttcctgcaacgatatagtttaaaaagtctcatcctttgtattgttggcatttctaattgatcaacaacatcaatggcaaaggacatgtttacgagggcataaagaatacatcttcttctggtgggattcaattaaaatattgttgacatgtttaaacagtaacattcgtagacctgtggtagaaaaacacttggtttggtgtgtaaatgtggcttagtttgtgtagtgaacggggaaaaggggaagtgtggaaccaaccaacctaaaacatgtgcgtcgactctcatttatcaaactagtttttttttttttttttgcaaaatttctcaaactagtttttattttgagaaaattttgtgggaacacaaagcccaactaaaactacgacgcgaaaacggcccaacaacttcaaagcccaagagcaggtggtacgtcaccgttcgtctggcccggatgcggccctcttcccgtgtaccccctcctgcgtgtaatggcaggcaccaggcagcattcagctgcagcagcagcttggaagcacgcatcgccaccccacccccatcgccgtctcccctcccccgccgatcccccgccccgcgccacctctatggccgccggcggaggcggaggtggggacatcagcgccgactcggagcggcgcctcaagaaggccatggacaagctctaccacttccccaagcccaagtcgagtagcaccggcggctccaagccctcttcgtcggcctcggctgcaaggttctgccctaatctttttttgctcgcgccctcttgtgtgcttctccctctcgtatttattatgcgctttgatttgacgtgcgtttgatctgatctgacgcggcagctccgggagagcggtggggaaagcagcggccgaggcggcgagaaggctcggggtggtgcgcgggtcgcggctcccgcctcaggtgtcggccatgtcagcgatctcgccgccaccgccgtgccgcccctgggaccgcgccgacctcatgcgtcggctcgggtcattcaaggccatgacctggttcgccaagcccaaggtacattttaggcatgcctacattttacttacacatttttacccttatataatgttgcttgttggattggtggcattcatgtgggcactggccattgattttgagaaactttttaagccctctctggagaatgtttggggcacttaatgttgtttttggttaaagcacgtgaaaatgcaatttaaagtctggtagcagggcggaactagagcgtatttgaggggtgtgtgcttgccttgtgagtgcatagatttttaccatgggtgtatatggtgaaattttgatgataatcacttttttgttttcgtgtgggtgcgcctgcacctgctgctatctataattccacctctgtctggtagttctggaattttgttgatggtcgagtttgtgatgatgtattatgcgtacgggtttagttgagaactggtgattgtgtgttcaggtgaagtatctgtggtctgaattggtggttgataactacttgctttcttcaggttattagtcctgttaactgcgcaagaagaggatggactaacattgagccagatgttataacatgtgaagcttgtggggcacgactcctgttctccactccttcctcatggacaacacagcaaggtgtgcattttatactgtgttaacctgtgcatttcatctcaaatgatgacttgatgagtctatgattgaagaaaatgttcttgtgtgctcttgttgttagtacacattacacataacttctgtgcagtgatggtttatgaacgattataaaacatcccatttttatctgtaagagcatataggcttcatttacctgcttgatgtgatattcctgttcatagtttatttttatttattgagaactgtgttttgtgcagttgaaaaggctgctgctgttttcagcctgaagctggacactgggcacaaactactgtgcccgtggattgataatatatgtgatgaatcacttgctttatttccaccaacgccacctcctgttttagttgggaactactatgaacttttagcctctctgatgcgacttttagcactcccaagaatttcctgctcttctcttgagaccatgaaaaagcggagtccacagctagagcagtttctatcagaaccattctcttcatcagttgttctcaaagggagatttatgcttactgaggactctacaattaaggatttggatgatgcttttcaagatgctgacacatattatcaggtaattctcttcatctattgtggagttgttgacttgctgtgagatttttcttgatatgttcacaggaaccacatgctgaatcatatgacttttagccttttaggtgatataagtatctgatattaaccacagacaatgttcatatgcaactttctattgtggagttgtggtattacactaactgaataaattgtgcttagttaaaacatattaatggctgttactctatcatgttaaaaccttgtgtgtcatatgcaatgaaatatgtttcatagttcttttctcatttgttggctgtatgtctgatttgaaataatattgtgcagttgtgctattagggaaattttacaatactctcatgaagcaagtttcgacctataaatatctggtgttgcttcaaaatagtaatggcaatatgctatttgttaagttctaaatgaaatagtcaaagatattgagtccaactgtatctttaagaacttgattctgtctgtagaaagcttctttgctgtgttcattggaattagatctttgtatctggattgacattccatattagtacatgaagatatgcttgcaatatattccctttcctttttgtaatttcactgtgcatttctccatctttccaatttaacactttactctgtagcaggcacttaagataataagtttgtgtggatgggaaccccgcctacttccttatgctattgactgtggaactgagtttcattcagatgcaaactctacctctaaattggctcaaccagagcaaacaagtaagacgatggaggatcgggtcatactttactcacctgatgatgctaatggtgctcgaccatctgctgatgttaatcaagaagatcagcattatgatccattatcagttgttttagattgccaattttgtggtgcatgtgttgccttgtggcctttttctcttgtacaacgacctcttcaactctttaagctgatttcagattctaatagacaagatgatcaggataatggacatgacaacgtaatcggtggagtaggacattcaaaggatgctaacattggttttaatttcaccattgctgggggtccaccgccaaccagacaaagtttccgaccaaaagtttcatttcctgttgttagtcgacatttgaaagctgacttgaattcccgtgtgaatttgctttcctccggaagtgacagcca

SEQ ID NO: 4305 - DNA, 7209 bp, Sorghum bicolor
cggctacgggcgaggcattgggtgaggaggaggaaggggagcttgagctggagctggagcttcttttctcctcactggctggcgctgccgctgccgcttttttttgctgcggacggtggctttttgcttgcttctcgggggtgggaaatttcgggaggaagtgaagaggtgggaatgtgcgcgtgggtgtagtaggctgtttttatgcgcgcgggtacagtggccagtggcggggagtgtggagtgcggtgtgggtgtgggatcgagacggcacggacagtggcggcacccgtgacgccgtcttgtgccgctctggcctgccactgctactactcctctgcaagtactactcgacagtgcgcgctgcagccagccggccggcatcgatagctgccttggaccggcgcgtgtttccgtccgccgcctacgccgcgcttggtggttgagctggcactggcggactggccggccccggcttgcacacgcgtgtgaaccgtgaactggatgctgctatgtgctcccaaccgcggtcgctggttgtggcttggcatcgagctggaagtgacacgttggcatgcaaatcccgtactccatacttttttttgggttacaaaatgatcttactacactacacctataggaaaagaaatatatataatataataaagcgaaaactcagttgtaccgactggtatggtatcttggagagctctacttttaggcggtgcattcttttcctgggccttgtttacttcccaacaaattttgcaaaatttttcagattttccgtcacatcaaatctttagacacatgcataaagtattaaatatagacaaaaataaaaactaattacacagtttggtcgaaattgacgagacgaatcttttgagcctagttagtccataattgaacaatatttgtcaaatacaaacaaaaaagctacagtgtcgattttgcaaaatactttggaactaaacaaggccctggccacattgatcactgcttttacacatcgcccttgccgtcacgcgttctcacgagtcctcattggattggagccagagccgccggagcctacgtgttccttttaagcacgcacgcacgctttcggcagtgcaaaggaaacgatggaatattgtttgccactaaactcatgctgtcatgcacaaatactagtagtacgataaatcgaatctgcggttgctttgccctgagaaataaatctcggaacgaaacggataaccgcgtgggcaacagagacccgcccctcgtgccaggctgccagcacagcacgtacgtcgccgacgttaaccggcggttttacgccaaatgtagccacggaagccaagcccccaccccgagtgccaatcaaacaaataaaatattcgaggccgaggaggaagctcgccggtctccgtccgtccgtccgtcgggatctggattaggcgagcaaccgggagcacattagccaccaacgcacccacaccagggacggccacacacacacaaagctagcgcgaggcagaagcaaacgtggtggtgatgaggtgatggcctcgatggatccgaaccgcaagcaccacctggatgacccaaccaaaccaaaatcagcagctctggagccgtccgtcgtccgaccttgcatcacaccgcaagcgcgcttaatttgcaacttgcaagcgtcgtcgaggggagtgtgtgggacacgacacgacacgatcacacgatgcaatgcaacaccaacaccgtttgttttcaaagtgtgccatcatccggttcagtactgttgccgccttgcctccgagagggccggggccgccggccgggcggcgtacgtcccccgcggcctgatggcgccatgcatgagctcgctgtcagttctgcctgcctgcccctggatctggatgagtggagtgctggtcggcggcgtacgtacgtgccacacagacagaccccgcgcgacaacgagacctagaaccagatcggctcgcgcgtcgcagtcgtttgctcggccgtacccgtaccaactccactcccatccgttcgtcaccgcgcaccggccgggcggggagctgagggcctgtgccctgaggctgagctcatcagctggccgggctcgggcggacgcggacgcggacgggagaggaggcacggcgcatggccggtcatcgttacgatgcgtgcgggaggccaggcaaggcggcatcggcaaggccagggcagcaactccatctgcctccggccgccgccaagtccgaggcgaacccgaaggacgtgcggacaagcgggacgtccgtcgtcctcacatggggaaaatccgcgggggatccggacaacctcaccgtcgtcgtcgtcgtaagcatgcacgcgcatgatatggcatcatcgccaagcggttcgtgcatgaatcgtgagagtggcaacgactcggcatgttttcagttttctactaccgttgtttgtttattagtaggactgtaggtgtagtagctttgtcatgccgtgtgctcggctgctattctgtttgccggcaccggctacaatggacgcagcacctggcaatcattgtgctcacgggccgttgcgaattaaatatagagtattaaatatagacaaaaacaaaaaactaatttgtacagtttgtctgtaatttgccaaacgaatcttttaagcctcgttaatccacgattggacaataattacaaatacaaacgaaagtgctacaatagataaaaccaattttttttttctttttttctcataataaataagtgaacatgactttgagctataacttatcagccaagcgactcaaatagggcatgatgaccgataccttttgtgttgccgcacaattgtgctacttgtatttactttgttttcgtctcacatataagtgctctagctaacaaattcccccactcaaaaaatagtaccatgaacggcactccagaagagacatgacattattcgagctggaaactataattgcatcattagccaaacaggtaggtgcaacagtcgaacatagtattgtgatgcactccagatatcagagagatatcagggaaatccaatatcttgatcatgacgcattttcagcgaggccaaataattgccggtgcatataaatggtgcctcccaagacctagtggaggggtctcgtggtttctcaatgtcatcaccggcgtgcccgcggcctggcacatcatgcaacacttttgcttcggtaaccatgcatgaatgcatgatcacggaagtccctggcgtgccattatattagcgtgctaatcagctggttgtagctgtaccgatgcttgacgacgttgcgcttttcgtgtatgcccttttgatctgcagcaccgtacgtgctcaagggttgtattattgtatatgtactctgttattagagtactttacaacatgctgacgcagtagtagttttaggccttgtttagttcaacccgaaatccaaaaagttttcaagattccccgtcacatcgaatcttgcgacacatgcataaaacattaaatataaatgaaaacaaaaactaattacacagtttgtctgtaaatcacgagacgaatcttttgatcctagttagtttataattgaacaatatttgtcaaataaaaacaaaagtgctacagtagcgaaatccgaaattttttcgaactaaacaaggccttaagcttttcttttgttttagatggaggcggcagaattcaatgtagtacagaattaaagtagcatatagtaccctttatactttacgatcagctccaccctggattttatatttggtatcgcaatacacgattgaactgctactgagcaagacatcatatcatataacagtctttttgattccacgtactaattaacggtagcaagtactcgtccatttcaaactataaattgttttatttttaatatacagattttgcaatacccttagaaaaccttaaatatcttttatcatcaacaaaagaactaaggctttgtttagttcacaccaaaaacaaaaaacttttcaaaattcctcatcacatcgaatcttacggcacatgcatgaagcattaaatatagtccaaaataaaaactaattacacagtttgtctgtaattagataatatttgccacaaacaaacgaaagtgatacggtgcccaaaaccaaaaatttgtagacactaaacaaggcgtaagattcctacaatagcaattaatgttaatgttaacatgataggcataagagtgtttgcaatagtgctagctatgtagttagcttatgtgaaggtgaaagacaaagtaaagactattttatacattcttgtttttttatgtgctattggacccacatgctcctcttgcaccatgtgaaatatattatctatttaggtcttgtttagttcccaaaatttttcaagattccccgtcacatcgaatcttgcggcacatgcataaagcattaaatatagacgaaaacaaaactaattacgcagtttacctgtaaatcgtgagacgaatcttttgatcctagttagtctatgattggataatatttgccacaaacaaacgaaagtgctacagtagcgaaatccaaaatttttcccaaactaaacaaggctttattcgttgctagtgactactctctccttctttgttcctatctacattataacagctagccaaatagctagttttgttgtagacgccctaaaggagtcgaccaagtatcctaattccaaggaaaaaatattcacttaagacataggtgaagtgagagtatcatagctatacttaagagtaaaatactagaaaagcccctatatgactaatttttttatcgctgtcaaattaagaaaatgttcaaattccactgacataataactagatcaaagtgggagaagaggaattacccaaactagtataatgctcatgctaacgccacggttttttctatggaatgctatagtaatttttttagagttttaattttgggtaattatttttaagtctatatacattttatgaatcatcagtacataaagacatctttacattttctctaactttttaatcaaatattggatatcttcagggatgttgtcgtagcactcgtttgcatgactcgccaaaatttcagctaagaactccgtccttagtgaatccttttgcattcttcgggcaatcatatggttaattttccaatacgacactttaataccatgctcccatttgcttgtgtccaatagagtccaatacttgtatctctcattttaaagcattccaatagagtccatcatctgcattccaaaagagtccaatacttgtatctctcgttttaaagcattcatgactgcgaggtaccagcgaggcagtgacagtgtggaatattgatggtgctgacatagaaatttatgctcattatgtactcttatttggacggtataaaatttatcatatgacaaatgttatgtttaagcttaccatatcatcttttaaataatcctttacccttgattcagccacgacttgtcttttaatccctaaatcttcaggatcttgctctccatgagcttttaggatcttgcgccggcgtctcaggcaattttttttttcgcgcttgaggaagggatacgtagatcagctggaattcgctgatcaccgtctccctgctgtccaggcaaatttttttcgcgcttgaggaagggatacgtagatcgactggaattcgctgatcaccgtctccctgctgtccgccgatcagaccgtccgtctgtcgacggcgtcataggccaaaaaaatttcgcgcttgaagaacgcgcacctgagggcactccccggcgcggcggagaggctggcgctgtgcaaggccgacctgctcgactacgacacgatgcggtcggccgtcgccggctgccacgacgtcttccacaccgcatcgcccgtcaccgaccatccggtacgtatacgtgtaacctatagtacttgaatacgaatatactaagatcgatctatgatcactgtacatgtcacgtactgtaaccaggctggcctttggaggaaaaacgttttctcctgtatgtactccagtagggaccatatacagcacctactggctactgtagctatttattatttattattaaaaaaaggataaaccaaaatcatagcaaaaaaatttattactccagtagtagaatatttttgcgacagaaaatgtctcttgcatgcatgcatgcgtgtagaattcactcccgggagccagatgcgtgttttgacctggttatggtggagattaatgggccgaattagtaggctgcggtggagatgagtttgttgggacgtgagtttgtctggtctaataatccaagaagtttttaattatagtggagatatattggtatatataattagcctgcgctttcttcacaacttcaagagatgctaccagaggttttcagcacgttactcttttcgtgtatgccctttttatctgcagcacggtagtagttttaagcttttcttttgttttagatggagacggcagaattgaatgtaccgaattaaattaaagtagcataaactttatcggcgtatcgcaatgcacgggccttgtttagttcccacaaaattttgctaaattttttttagatttaatgttctgctcccagcaattgacgaagaacgggcagttccagtgatccttgtgccgattatactcccatcggtgtctttcttcttcctgatgataatcttcttactggcgccgataccgatcttcatgttgctgccaagcctcccgaggccttctatgagttatcacaataccggatcggggagaccttcctgaattagatccctcctggatcaaaccctttcctttagcatcgacagcggtaatctgatgttgaggatcaatcgatgcatttctttcagctgcttctgacgtcagcaccttagttttctctttagcgtccaacatgtttgtcggaaaagggtgttgatcaatcttcatcggcttctgagctttagaactatcaaacttgattctcctagattcaatagccgattgcagctgttgcctgaaaactttgcactcattggtgctgtgagaagttgcattgtgccacttgcaatatttcatcttctttaattcttcagccgatggaatcacatgattgagtgacagcttgatctgacc

SEQ ID NO: 4306 - DNA, 5135 bp, Sorghum bicolor
ccgcggcgctacccaccgccccccgcccccgcaactccgcgacgcagcccgcgcagccgagacggaaccccccgtgtggctggtgtggcctggatttcgcgaagttttccggctgatgtgtgcgcggaatgggactgcgacgacgccgaggcagttggggagagcagaggacggggcgggtttttgtaggcagcggtaacgggaagggaagggaagggagccagggaggccagcggcatggcgcgcgctccgcgctgcgttgcgctgcccgtgccagggccaggggtacgcgcgacgttcacaagccgtgggccgggtggacctggttgatttcgggcacgccgcacgcttcgtcaaaatcgcaacccgtttcctactgtgcgccgcttgtgtgcgacactgcgactcgcgctgccgcttccagcagaacacctgtacgactgtactactcagcagtgcaaatgccgtattcctaccctagagtctgcgcatggcagctgggcctgcagtttcgggccacggaaagctatagagaatagcaagcagctctgcctctctgtgctgtcgctgtgcgaggtttggctaccgttggcacagttcagtgggccgcattcgattccgtcaaccctcggctatcactcaattcaattgaatggccactggttcgggatttccggttagcgaaaaccgctgaattctggtatcattcaaccacacgctataggcagcctataatcataataaaaaaaacattgaaccaaagcccacatatattcccctcaaactattccaatgcctctaacacgacgaaatggattatgcagcatcattaaataaaacggagtaataataagataacagaggccactactcatcatccctcacccgcttatttctcttctctaatttgaatgattatttaattaggaattctattttttgggcatgacgatcttatgatgtggcatgcaccatcatgcgggtggaaaccgctcggtcatctgattcgtgcaaccccttcctgttgcacaggcactctccagcggctgtggtagcctgttgacggccgctcgtgctcttctcgacaaccaaacactctctacttgtcgggcgcatgacacatcttcgacattcgatgcccacgccgtgccccaactgtggcatcttccctaacgtcggcaagcttctcctctctctctctctcactctctcttcttctccaactctagcgaacttagaaggggttcgaggaaggtatttgggcagacggtgggatggaaagaagacgacattatgattccaacaacatataggaggtggttagactaggagcgcccatgacaatgcatgggaggggggaagaggaagaaggaggtcgttgcaggcgatgggcaacagcgggggcaagaacaagtggaagggtggggtagaggagcagggggtaggaggtggcgacatggccgatgacgaggaagccgctagcggggtggtagggagggtggcagcgaggaggagataggggtaggagaggaagataaaggaggcgtgctggccaaagtttctatgtcgacgcacgcgggccttagcagtttccttgtttaattgtttctggatactttacagaccaacatttttgcactatgattttaccaacaattcacacattagatgttgacataagaattcaaattggtgaaataagtttcaaaaaatattgaggggacatgaagaaggcgtttcagtagagtacttacaacatgcattgaattatatttaaatatattttaatataatagtttgaatattttcataaaacatggtaaacctagtcaaaaaataaataaattagttatcacagttttaaaaaatgacgaaatggaaagaaacgaaagggaaacatggaagaccttctactccagcttgatgggccgcatctggtatccttattgggcccttggcttttatcctacaaatccagtgcccggccacaccacgctgtgagtgactcggtcgcatcttcccttttcccattctccatccacccaccggcggcggcgcaagggaagcgaagaggaagcgacgatatgtcggcgaccacggcggccgtgcccttctggcgggcagcggggatgacctacataggatactccaacatctgcgctgcgctggtccggaactgcctcaaggagcccttcaagtccgaggccgcgtcccgcgagaaggtccatttctccatctccaagtgggcggacggcaagcaagagaagcccagtgagtgatctgtcccctccttcacccgatgcgttcatgtccgccgtccttgattttagatccgacgcgatctgcctcgatgttatgtggtacgatgggattctagggtttgtgatttagttcttaataaagctgagcatggatataggtctaggttgatctagtggttcactgatgtggtccccattttggttcgtgtgctggtggcgtttgcgtttaacgaccaatcgtagttgctaatggtgtaaatctgatctggtgtggtggttgatggtgtttgtcaaaatgtgatgggtagaaggtaaataattaattggtgcataggatgccaccgcagtcaacggtcagtactcaatcacattttgaggttttgtggaagtggtaaactgggtaaatcgtttatcaaatcttctaattgtttgtgtatgtttgttatgtctgaaactttgaattgcatgatccaaggtgaaaacattgtaacaaatgccagcattctgtaaaacccagccacctagaaatccctaatggatagtaagttgacgatggtagcgcttaacaatgtagcacctaaacgtggattatatgtcaaatctgaatgcagcccatgatgaatcatatatatgtgcattgtcggatctcaactttagagaatatgaagtataatgagactttcccacattcaattttgaaatctggatttgaagatggaacacagagtgtgtcgtcataaggaattaaggatgaagtgtgatgttagaacttactaaaactgccatgacatgtttcagtagcattactgttatgcttagaatggggatacgcttccttgaagaaaacgtgttcctacagcaaataacctactgatgataacttagaggaaatcattgcacatgtaatatgtatatattgtttaattgtgccagaaatcctgctgaaggatggcgattgatcgcgtgtcctgatttgtgtgatcatgttccttccctgaccatgttgctattctgtttctgttttgtaacgtaacaaactaaaaagtaacaacgatttaatcagttaaacctgtcattgctcatagcctcatacatacaagcatgcgtgctcgccccacacaaatgtttgcaaaagaaaaccatgcacaatatgaggaaaaatgcatccttgtataatagacaatcaattattctatgaaatttgatgctttgtgtttaaggtagttccatgaaattcaatgatttgtgtttaaggcaattccatgaatttttcttcttatgtttctagtagtgataaccagttgcataatgattggagaatgcttgtcctcactgtttcagtgcttaatgcttatgtgaatccctgtgatgtagaacttgaacaatagtagtagagggatgcatacaactttttgcatttgtataatgaacacttcagtaaagcagctgacagattgcagtactatttagcgcatgataccttagttttatataagctagagcaattaccgtttgcatatcaaagtaaacaattggcagttgtcgtatctctgttaatgggttgcatataatgcgtctgtgtctatgatctattttatcgaagtaaggccctatttggaacacaggaatgcaaaaacaaaggaataggaaaacataggaattctgcaggaatagaaaacatagaaatgttgaagaaatgatcgttgggtaggctccatagaattttaccaagaggtttgagtggatgcaaagttctacattttccctccaaaacaaaggaaaattccctacactattcctatggttcattcctgcgaaccaaaggcatgaactagcatcatatgttgcttatattcaattgttcggttgtttttttctgtttgtttcaatactatgttgaactggattgagttttgtttcattggcacggataatttttttcctatcatatcatacagtagaacctgaattgtgttcagtgtgcatgtgtagcttttgtatatttcttcaatgctaatttggttctttctgcagctgtccgcacagaagatgaataaagatctggcgccatggtgacatagtccttgctacagatgatttgaagtgttgttgcaagtttctggaagttgctatttagctggcttgattttatagtcaatggtgaagaataaatactttcgcgacaattgtctttttgcaatgacgtgttattttcgttgctaattgcacttgccctacccaaatcaatcatgtgaacagcatggaatgcttcagttttgtgcaatttggtaccgactaaatttattgtggtgtccgacagattatgctgggtctttaaaaataaaggatcagtgaatgtactcgagtgtttttgaaggcccttgtacccgattttttccaccgttcgatcaagcatccatacccaccttcatcttcctcaagtgacaagtcagctctctcgtccctaatgctctgtgccttcgtagattggaaatcttgcctggtcatgggatctgtctgattttggacgcatggagctgcctcaaacacaaagaataagcttgttttgtgaactggaagatctagacaccgatcccaagcattcgattttgaacacctatagagcttgactgagttgcatggtggcgcttccaggccaggtcgtgaagcaaatgcaagagctgggcagcagcttagctaaaagcatatgtaggcactttaagggcttaaacttcgcatgctacaagttttgttggcctcacctaaaagcaatggtacatgtagataaaaaaatatagagctatcaaaactcacaaccgaggcaaagtgtgatgtaagtgggacagctttatcttctctgctataagtattcag

SEQ ID NO: 4307 - DNA, 8598 bp, Sorghum bicolor
taaatattataacccttgcagtgcatttgtcaagtactggaaaggggcacaggaattagtagtggtagttgatagagggaataaagatggtaatttgattttcagtcccgatcccttgtttggtttgtggaggaaaaataagaggggggcacttaagtttggtgtgtggattttgagtcggaaattatatgacaagttatgatcggtggatagaatgtatttatcttccactaaaagcacagttcccactcaattaccacccctcccctaggaagcgattagtgggggatttggtcctctaaactccattccctgtcccaccaaaattcccactctcatgaaacaaacaaaatatttttaaattcctacctcctaagtcccattccctccttctaattagtccgaaccaaacatgcccttggtatgcgtcatgggaaacactatgaaagagatagagtatgacgcgtgaaccataaggacagcaagaccaaaactcaaattggatacagacacttgtagacctcataaaatttttaccagtaccatacagtatctctaatataaggcattaaatgtggtaataactatatattcttgttaactttcctagtcaacttgaagagattggtatacagcatgatactgtggaaatgctatatagttagtatatggcagtatggcactgtattggagcatatgttggttgtataggatgaacaggtcgtagacgtagcttgtgctttaagataaacattcttgctgatttagtctttctttcttttctttttataactcataggagcaacaagaaaatccttgaaaactacatcataccaagtgcatttcccaagtcctggaactgctcgtttaatttatctcttcgcatcttctctcgatcagccttttgtaccttgcgtgcagaggttgaaccctgggctttacactctgccctttgacttgataaaagaagggacattaattagagcaaatttcaggtctgataataaattgttttgtacaaaatcacaggcaagatgatccatgttagaattccactggttacagggccgaacccaacaaaagacatgggtgtagacagtacacatgtacacccgataaaaagaaaaccgaagttagtaggcgtagtacatgtatacacttgtaattagatcagattcgaatacaaatagccacatagctcaagttagatcagatccgaatacaaatagccagatagctcaagttagggttccggtgctcaattttacacagcaggaaggaaagagaagggacgggcatacctgccatggtgggttccggtcgccggcaaaggccccgacgaagacatgggcagcaggggtgtagggcggcggtcgctctaattctcgcgcgcgcggggtgaacgggagaagagaaacagcagactggtgtgaacgcaagagcgctgagcgcagttcatccgaggctgtttacagctatacttctccgcgttcccaatccaaaaaaaaaaaaaaaaaacttctccgcgcgctactgggccactttctctaacgaacgagcctagctagcagactgggccgcataaacattgggcttcgttcttccgcaaaactccccggcctgccgccgtactccatcctctagtcgagttgtgcgccgcccttctccatcgtcgccgtcccgccgccgccgccctctccgtcgtcctcgccgacacgcggccctcttccatactctccgtcctcgccggctcgcgcggtcccgcgcctgcctccagttcctcccctcgagggaaggtggcggcgcccgagccccgagagagcttctccgagcgggcttaggcccgccggcgccgagttctcctctggatttttgtgtgcctgagttgttcctggaagcacactcccaattgaagcgtgatcaaataaagttgttccaaacagggccctcggctccggtatgggtgtttagattgtggctctaggcgtggagtttcaacaatggcaatcgagtgcctcgtgctaggtacgcggcatcgcgttcctctcttcaccctccttcgaacgcaatgctaacgctggtgattgcaggggcggggcaggaggtggggaaaagctgcgtggtggtgaccatcggcgggaagcgcgtcatgttcgactgcggcatgcacatgggctaccacgaccaccgccactacccggactttgcgcgcgcgctcgctgcctggggagcgcccgacttcaccaccgccatctcctgcgtcgtcatcacgcatttgtgcgttgcagataaacatttcaccctttcctctttttttttctttttgtactggtaattttcttcaaattctcacgattggatgcgggctgaggaagcttgtgctgtgcagccacttggatcatatcggggcgctgccctacttcactgagatctgcgggtaccacggccccatctacatgacggtgagctatgaacacgtgattattgttagtgttactagctaagtgcccgtgagttactatggccaacagaaattattaacaaaagttgcttcatgtgaatttaactgctaattgcaatttttttataactttttgttataataaaagcttcataattattttgatggtaacaaaaatcataagttccttgccaataggaaattacaattaatattaaaattaaaacacaaaaatctagcaacacagtgagtattgttcaaaattgatccagaaagcatcgcaagcaatagaaaccataaatccaggttaaattaaagccatcatagtagaacaaaccttgggtttggctaagacatgtctcttaattgacatcagctgtaagtgtacaaatgcaatatgcacgcatatcaccccttgcaatatctgagtaacttcctggagcacattgaaattgactgaaacatacttggacatctttttgttttcacaatggagattgatgcagacctgctgtgcaagattgagtagttattcttccatgatcagtatatagatggtataataaaactgaggcacctagctagtttcggactggtgctgatgttgaagtctaacagagtagccagttagtgtttactgaaaaactaattgaaagcagcaagcacatgaataatatattgagtaaggcatgctgaagtttcaatgttccagttaagactgaatggcgatcaattgcaatgactttattcttaaactggaatgttacattcaaacaatcactcaaaacgtacaaatgtgtgatatcaaaacccagttacagaatcacctgaggaatcatatggttagcagccaagcattgtcttagcaatgtggatacatcatttgggctggatagtaaaggtagagtacaggcatccccccctggcaccacacgaatatttctctgaccaagcaaccaatacctactttcaggaagagaagcttgggaatcgtatttgtatatctccatctacatatctagaatatgtccagaaccatgtattcaataactatagtatatatcttcatctacatatatgaatatatgaagaaccaaatacttcataaccatgattaccatgaagcagttttgatgcggttgaacttaatccatagaaacaaactataacttttgcacctgattgtcttctaaattagctaaacatgctctacacaacatgtgaaatcaattaaaggcagagcaatctggattgattgggttgtttaaagtttggattgtactgcttctgatcgaagaagtatgcttgggtgaatggtcttgcattattagcttatatgcttgggtggttgtattccttggtctccctacttcttatatgaagcatctatatgtcgcgatgattgatggtcactccataacttatgtcatggtacctcaatcagtatcctacaaaggctttagctccatttatgctcgaggactatcggaaagtaacgatggatcagagaggggaggaagagcaatatagctatgaagatattcttaggtgtatgaagaaaggtaatcttagttcagtttggaacttctagtacctgtctacttagcactgatgctggcgcagaagtaagcttgtatcataatcctctttacttgtaatacttgacctttcagtcataccaatggacttgaagcagactattcaagtagataaagacctagtgatccgtgcctattatgctggacatgtaagtttcttacgctgttgttcattcaacattctgcttagtgttctttaagtaatttgaagtcaagtattgatttagttctctactttctaatctagtaaaaccgttgccaaactcaaggttataggggctgccatgatttatgcaaaagttggggatgctgctatggtttacaccggggattacaatatgacaccagatagacatcttggggccgcacaaattgatcacctgaagttggatctcttgataacagagtatggtctaacctcaaactctaaacatatttttctgttttctggttgcctttacatggatttgtaaccaagtgttgtgatttatgctacattatatccataggttatttcttatgtcttcacaccacagttttttatggggtggaggaccctgactatgtagatggtagtcataatcggtagaggggcgagcgtgttcaccttggtgccctatatttgggaagagagggagggagtgatggtattttgttgcccaagtcctactgattacatctgctcagttaataaacaccaagttcagcaacctcctacttccaagcactaacaaaccaatagctaacaagtcaaagcaatcctagaactgaccaaaccaactgaaactaaagaccttgtaacttgttaagcagttgttgccgtactctctggtgtgttaccgctatgctcatggcacgcctgcaccgctcttcatggagcatctgctatagtgcttgccctacataaaaacagggtctagagggtatgttttacctatttgacttttcatgtctgtgattgtcttggttgatatcagattttgggaatatgctccagaccacccgtggaccattgcttagctcttgttgttagccaatctgttctcccggacattgtttgggttatacttgtaaattatctatatagtttgttattggacttgctacgcagttgaatgtactagtttctaatgctgcgatagtcaatgaacctgcatttgttttgtggttgcagtggcttaaagttttactgttatatttgaatcaagagcatctaatgttgtggatgattcttttttcctgcatacatagccaattaactgattttctttatgcagatcaacatatgctaaaactatacgtgactcaaagcatgcccgagagagggagttcttaaaagcggtatgcaaaatctgaacttcgctgcagtgtatagatttgtagatttttcattgcatgtgtagcaaccaatgcttttccaatgatgcactactctattttctaggttttacattgtatgtgcttaagattatttgggcacaatacagtccaccaagtgtgtctatgtttgtttttattccctgacgttttggtccaagaagatgcattctgactgtattaagccaaaatcttgtgaagtgtacacggttgattttgcttctaaggcataactgagtatatgtttccctctaggtacataaatgtgtttctggtggaggtaaagttctaattccaacgtttgctctgggaagagctcaggtattcttcgtctctcttaactctactttatgggaccaagtgatgattaagtgtgataactatatgacttaaatagttaaatgagcaagtttcactgtgaagtaccatcccgaaggcacagtgttcaaaggtttcatagtttgagtatccatttatgaggtatgacgcctgtatttcaggaactatgcatgttactggatgactattgggagaggatggacttgaaagttcctatttatttttcagctggtatgtgtggtttcttgaaagttgaaacagtcttttaattttctgctgcatgtgaagttttacttgttgatttgtgctataggtttaaccattcaagctaacgtgtactacaaaatgttgatcggatggactagccaaaagatcaaggacagccatgcagtgcataacccctttgacttcaagcatggtatggttcagttctacaaaagctaattgtctgatcctactttgagtgaagatgaagtgcatatgattgagttcaaaatccgaatatcagtagaattttaactaagtaactaaccctccaatttatccttttattttttgctatattttgtaattccatgacaccaattggttttttatatttctttaatgaaacatttgtttatttaatcataatattgataataattgttgctatttcactttttatgtggtaaccacaattgagatatgaggtgttctgtcttttattcgcaaatattgaaataacagagagtattttttacatttcagtttgccactttgagcgttccttcattaacaaccctggtccctgtgtactttttgcaacacctggtatgattagtgggggattttctcttgaggcgtttaagaaatgggcaccatcagagaagaatctgattacacttcccgggtatactccttacctttcttgtttattccattttttaatcttttagttaaatatcatattcatataggcaagctttatgaaacctattattctacagttattctgatgctgcctttctatttttcccgacagatattgtgtttctggaaccattggtcataagttaatgtgtgggaaacctacaaggattgattacaaggacattcatattgatgtcagatgtcaggttgattttcacctcatttcatattttgctaaaaaatgtacaaagttaaatactaatgacaaaaacatggtcaaccagaaggaagccatgtaaaacactagtgcttatctttaccatatgcttatacattgttgaagtctggcttttaaattcgatccatatcaagctctacttattgttctgcacgattaaattttactcactaaaggttgcttgctcaaggcccttagttgtctagtgcggttggctggttttggtcgtttttgtttctttttatgagtttttgtgagtagtatgtgttgaggaggggctttcgtagtctcctccctgtttttgtacattttgtactttatcttaatgaaatggcacggagtgctcctgtgttgtttgataaaaaaaagaaaaaaaaaatctactcagtaccattcatgaagcatatgagtgttagcactcaacacaataggtccacaggaaacatgtaagtctaggaattggagctttctctgagattaatcatgatgtttgaagtttctgatagaatgctgctgtcagtgtctaatatcttacatttcagttttgtctcttttggcacctaagatttactcgaacccttgcatttttttaatttctgatgtttttgccccctacactgagttttttgccccctttattttttttaccagattcatcagctagcattcagtcctcatacagactccaaagggattatggatctgacagaattcctgtcacccaaacatgtaattctcgttcatggtgaaaagcctcagatggcttttctgaaggagaggatcgaatctgaattggggatgccttgctattacccagggaataatgaatccgtctccattccgacaacccagaaccttaaaatgagtgccacagaaaggttcattacaagctgtgctgtggagcaaggtaaacgtagcctgcacaagcggaacctgatttgtggtacaggtttgtcagaagtgattggcagcgatgaggaggcggcggagggcattcttctgatggagaaacacaagtctccgaaaattctttgtgaggatgagctccttgaagtgctgggcatggagcagcatcttgtccagtttgaaccaatggtctccagaattgtagctgatgttgaatcggagttgcagcgggctaaggcagcggatttagatagcgatgggaaatgaatgcaacagtataagtgtacattgccataatttggcccattattatttcacctttctttcccgacaatgcggggaatgccatacaccactttagagcaagtttaataatacagtccacttgttggctgtaaggttccttacagccttcttgcagcccacccatacaatagttagctattcactattaagagcaagtattatagtgggctgtgagctggctaaatgctgaggtgaaggagagaagagaggagagagaggagaagcgggctgtaagcttacagccagcttaggcacaggaaccaaggaactttgtgagagagacaagtgggtcatgtattaatagtgaatagctaactattgtatgggtgggctcggaaaccttacagccagcaagtgggctgtattattaaacttgctctaatacatggtccatttatctctctcacaaagttttttggtttttgtgtctaagctggctgtaagcttacaacctgcttctc

SEQ ID NO: 4308 - DNA, 7206 bp, Sorghum bicolor
catcacattctccaaaaataaatcatgggctatcccttatttttttctcgccatagaaagtgagcggtgatcgctcaccaaggccacgtgaagccctctcccacgcactttcaccccacccccacatgcaccatcgctcattccaacacactgacctctcgcgccatctctatctccctactctttgaattgctttccttggactaatagcacaccatacaatttcacaacctatgaaccaagagaataagagatttggatccgaattgagagtggaacctgctcacagaagaacagggcaacacaccaagtaagccgatacccaagatggctcacctatagagaagagaaaccttggttcatgtcacaacatatctttgttccactagctacaacacgagggtggagcggtgccacaacaaaatactgatgaagcgggtatgcttgggcaagttgtgtcgtgtggggcttggcgtgtggaggagcagatgggccagttgtaggagccacacttctctgagagaggtgataggagcgaacaatgaggcgattgagaacgaggttaggagagagagaagggggaggggtggggaggcaccaagccgggtggaaagattactactagtagagtatggtctgtagacgctagcatgtgtgggctctaccacaatagcactgatgatcgagaatgggattgtagctacaaagacacttaagctatctagcaccataggtacatcggtggtagtctaagacgacatagtggcaccgaaaagccaatgccacaaaccctcggacttatggatctaaataacttttgatgacatggaagatttgaatataaacaaggccaacgttttacatagtctattgaaatagtctagtgtttttgcattggtagagtttatcttagaaatagaaagtagctaaatcaataatttgaatctcttttttgacttggagttactctataatcacccttgattatagtactttgtctggcattttgttttttatagtaacttttgctatacaattaaatattcactatatctagatattatatattttgctaaaaaactagatattatatatagcaataaaaataatgatgtatatatatgtaataaaaaagtcaaaacatcttatcaatttatttaggccttgtttagtttccaaaatttttcaagattccctgtcacatcgaatcttgcggcatatgcatgaagcattaagtatagacgaaaacaaaaactaattatacagtttgcctgtaaatcgcaagacgaatcttttgaccctaattaatctatgattggacaatatttgccacaaccaaacgaaagtgttacagtagcgaaatctaaaaattttcgtgaactgaaccagcccttagatcggaaattagtcgaaccgttccatccttgattgggcctcggcccaaggcaatgcaatactacaagcctacggcggaaccaatcacctcacattggataccgcctctcccgacatcgcgctcagggctcgaagccggtcccacatggcacccgcctcactgacagctgagcctcggttacatggtcccactggtcatccaagtcaaccgcccgttgcaaaccaaacccgcttcctctgccatcgtatctccgcttcgcctccttccgatcgcctccgccaacggatcccaacggcagcgccacccaagtccagttcacccacgccacgcgcgcgctcaccgcccgcctggcgcgctctcccccccctctacgggattctgcggcctttttagatcgccgccgccgccgccgcctcagtcctgacgctgccgcccgcccgcgcgccttccccctccggctccggccctaggttccgctctatcggatccaggtcgcgcgtggcggacccgcattgctcgagccaatcggtttccgtttttggaatttttgatccgagacgagaggttattatttccaccgccgctcctaggcgcgacgagttggatggcgtgcgatggaggcggcgtgaaggagcaggagggccccagcgcggcgtctccggccccaagtcctgcggctgtggctagggcgagggcgagggcggcgcggcctccgaggcccaggagccgcaaggggctcggcgtgcggaaccagctgaagccctgccgaatccttgcagccctccagagggcgaatgccagggtgagggaagcgggggaggcgaccctcgtggcagccctcgcggcggcgcaaaaggagagcgaaagggagaacgaggtggtgcccgatgtgtgcggcggctggaagaggtaacgcctcctggatcatgtgcgctctattgctaatgctgtttttagtttgcaatttttaggctccactcagttacaattgagacattttcctatgagacgcttaggtattgttagaaacttacttattcgagttacctcgttttatttagctatatatataactcgaagtatatggtgtttattaatcaagtttaagcgttcaactaacttgtagcatatatgaccatacgagcacctccttaattagattgataagagtttcctattgattcgctgttataacaacagttattggtatacttctctttgtaactagcctgtatgtaccaaacaaggatgaatggcaacctgttctgaagtcatttactgtatttggcagacaatcagttcatatgttatcttgttaatttacagaggttgccattctcatacataacagttgcatcatcataggacttggagtgatttcaagtatgcatggtgactggcacccataagcatccgtagattactaggtcactggaagatgctcctcttccatttagagaccctataaatagtttttacctgagaatgcatgccagcggcaaacctatttctttgtcagtaactcttttacttgttgtccttgtgaacatctgtgcttgcagtgaggatggaagtttaaattgtggatactcaagcattcgaggtagaagggcaaccatggaagacttctatgacataaaatcttctagaattgatgataaacaaataaaattttttggagtatttgatggtgaggcattcacttttcgaacaccttatttgctcagtttaattaacctaacaccatttgtaatcacaggtcatggaggtacccgcgctgctgggtatttgaaacaacacttatttgaaaacctcctgaaacatccagggttcattggtgatactaagtccgcaatgagtatgatgttttctcctagatccttacttaaaaataatgcagttcatttagtagtgaacaagatcttacaaatggtaaatttgcaggtgagtcctataaaaaaactgacgcggatttcttggatgctgaaggcaatattcaagttgggtctactgcatcaacagcagttttgattgacaaccatctgtatgtggcaaatgttggtgattcaagggctgtaatgtcaaaggcaggcaaaggttctgtttttcttaaattccatcgcttcactagtcaaacttgcatgtccatgacacttgccataaaaaaaatgataatagtgtatactactccctccatcccaaattgtaagtcattccaagaatcttggagagtcaaagcattttcatgtttgaccaaacttatagagaaaaatactaagatttgtaacgtaaagtgagtatattatgaacatataattaaagaagaatctaatgatacttagttggtatcataataataattattttatcatataaatttggtcaaagttaaaaaagtttgactctccaaaattcttggaatgacttacaatttgggatggagggagtaactactaagtatcacttgataccttacacgctaacaatcagttatgaacattttgatcggttgcccatcatcatgattgctgccttgatttcattgtaaaaagatgtgatataagagggatgtccaaaaggtggaaatcatttgaccgcatattttaccacagacctgtatcatgacacagatgaagtgtattttagaatccagattaacctgggcatttggaaaatgtcaaaaccagccctacatggtagtcgggttctcaaccacctcgcgactccaaattaactggcgtggcaacagggttctatgggctattttcgaatagccattgcctgtactaccctaagaaaatagtcttcacagctgggccatatgaactattttctttttgagaacgtgacgttcatgtgtttcatcatcattaagataaggagagaataaaaaagaatacagtacattacagttaaatacagtccagtgtgcaacgcaccctgacaagaagataaaaaaaatgggtgggttgttgtttacaagacataagccgacccaaacgaagaaatgaaactgtgaaccacacattcgctcccgaccccatgccggttagataggtgaacaagcactgaagactccacatttgttgacgagaaataaatatgtctgcactctgcagaccttccagtggaaatggttcatctaagcacgacatgatggaagcacatgcttatacgttagtttgtgaagagctaaactggggttaggatgattttggctgcacatatggctttcaagtctttcattgtttgttttgtggattttaaggtgatttttttttgacaaaacctctaacttgtgggagatatttttaaatccacccaaaaaattattatgacaacaaattcaagtatggagcaagtttgtgctgtattcttttcctccagaaaagaatcatctaacttccttttattcttgttcatttggtgaaaaagggagcaactgatctatataaattggttagtcataattgtattgtatggtgggctggtgtcataaaagctagatacattatgtttccatacttatattttaaatatttgatatgtactcccttcattccaaattataagatgttttggcttttttagatacattgctgttattatgtatcaagacagcgtatatctaagtgcatagcaatagctatgtgtctagataagacaaaacgtcttataatttggagcggaaggagtatgaagctgtatatttgctcaaagaaacactctcaattttatcttgttttgattttgactaacatgtattttctatttattgaatgcatcttaggatgtgtcgttaaagcaatttggtcactcttatttgcagctattgcactctctgatgaccataaaccaaacagaagtgatgagcaaaaacggattgaggatgctggaggagttgttgtttggtctggtaagtcaaattgatcataacaattgctgggctcgttgggtaattggtttaatgcgggtttatctttctgccaaagttattactgtttatatctacctggttgaaattcaattacatctacatcacaagaggttcatccaatgatgttttagatgataatggtaaatgtacttttcaggaacatggagggtaggtggtatacttgcaatgtctagggcatttggcaatcgtttgttgaagcagttcgttgttgcagaccctgagattcaggtttctcttgatgctcataaactttgtatttcatccattgcaaggggggaaatacaatagaacctctgtaatgcgatatttgacgacattaatgcacttaatcacaaatggaggcagtttacttacttggaaacttcttgtcaggatctagaaatagatggtgatgtggagtttcttattttggctagtgatgggctctgggatgtggtgccaaatgaggttagtatgccatataccaaatttggtacacgtatatgtgttatttcttttggagtaatctccctgttatgctttctttgaaaaggatatataagtagtttcatatgcacagacacatacatattgacaatgaaatgcgacttctgcttatgcattatatttcaatgacattgtttaggtgctgctgttgaaagtactttggttatgcaccaaataaacatgaaaacttgctaagctatgtcaagttctaatgtgtaggtgctttagtttgaacacatccaatttatctttagcttggattgggagtatcttcatttgcaaaattattgtaaaaaaatgaagcctcaagttatcagcaatcaatgacatttatattggattttgctagctagaaagttttgttgaaactgattagtaagcttacatggaaaagatttactgatctagggacaaattgatagtagtgtctccacttgttactgcttattcaaccattaaatgctcatgaaaatgcatgcattattcctgatatacgctcgtggcatgtgtttgtatttcagaaaagaaaaattcacgtggtgtgtggatcacaatactttctctagtcgtgtagacatgcagtgatgttttccttgacgattttttcttgtgcacataataaaactaagggtcagcagaagctgcactcaactgtttctttccttgtctgtgctgattggtacatatggttgttccagcatgctgttgcatttgtgaaggacgaggatagccctgaggctgcagcccggaagcttacggagatcgccttcaggcgtgggagcactgacaacattacatgcattgttgtagaattttgccacgataagatgattgatggttctctcccgtcaaccaatcagagttgacttcgtcatttgtttttaattattccagatttgctgtcattgctgcggctctcaagtatggccgcatcattggttgtctattatatttgttcgtttaatatagtcctgccttggtgattttgtttgtttcggctcccccaattgattagtttttttttgcgtgatggataaagcatgttgtttggatgctcaggcactgcttcgtgcacactggaccctgagcacccatgttgatattacttcattttcgatcttagtttatattacttcatttgcgatctctttttccacaccggtaaaaccggatttcattaccaaggcaacgaaattacaaagttcatattttgatccaagatccaagctaaaatccaagctaaagagaacagacatatgtgacatatgttcaccgagagaacacatgactgaaccagccaaaaaaatctccgacctaacaaggactagaaacaccaaaggaacaacaacgtcctagcagcaaggtt

SEQ ID NO: 4309 - DNA, 5258 bp, Sorghum bicolor
agcactaaatatagataaaaaaatagctaattacatagtttgtctgtaatttgcgagacaaatcttttgagtctagttagtttataaaagaatgtaattctcgctattagataagtcaatcaatttaaactttgactaaaattatacaaaaacatactaacatacaaaataaacacccttaaattagttatataatatatttttataataaattaatttaaagacataaatgttaataatatttactataaacctgcttaaaatgaactattttgattggcatggatcctataattacgttcttttatgatggacgaaggtagtaaacaatcagctaaggccttgtttagttcacccaaaaaaacaaaaaaaaaactttttaagatttttcattacatcgaatcttgcgacacatatataaagcattaaatatagatgaaaacaaaaactaattgcacagtttgtctataaaatcacgagatgaatcttttaagtctagttacttcgtgattagacaatattttgtcaaataaaaataaaagtgctacattatcaaaatctaaaaactttttgtacctaaacaaggcctaaattttactcattcgtccataaataaatgcacattttatttttcgaggagtcaatttttttaagtttaacaaaatatatgtacaaagtatactaatatttattatattgatatgtgccattaaattgaacataaaatatacttttataatataattatttgtaaatataaatattaatattatttaatatatttttagttaaatttaaaaataaattaattcttcagaaaatgagacgtatatttatttatttaaaaataaattaattctttagaaaacgatatgtgtatttatttattatggatggatggagtagtcagcgattcaaataggcccaaagaacatttgtgtttataaaagggaaaagaaaaggaaggaccaaggccttgtttagttcagaaaactttttggttttcggaactgtagtattttcgtttttatttgacaaacattgtctaatcatgaagtaactagggttaaaagatttatctcgtgatttacaggtaaactgtgtaactagtttttatttttgtttatatttagtgcttcatgcatataccacaggattcgaagtgacggagaatcttaaaaagtttttagattttggggtgaactaaacaaggcgcaagcagggtgcatgcagctcgagcaaatgtgactggtggccccagcggcgggctgacccacctgaccaccaccaacatgcgccttgaaagcaacccgcacgcctgtcggtgatcgcagtcggcgctgcggtgtcagtgcgtcactactttccacacgcactcctccccgtacgcatcagctctctcgtgaatcgtgatcacgtctgttgctctgtgcccttgcccccgccgggcgccggggccaggggccaccgcgagccaaagaagcaaggcatgttctctcgtaacaatacggcaagaagcaagccatcaagctcggaagtcggaacacagatgacagaccgcgctaattacggccttgtttagttcacctaaaaactaattttttttttcaaaattccctattatatcccatcttacgacacatacacgaagcattaaatatatacgaaaataaaaattaattacacagtttgaccgtaaatcgtgagataaatcttttgaccctagtcagtctatatttggacaatatttaccacaaacaaacgaatgtgctacagtagcgaaatccaaaaaaaattcatattaaaaaaggccttattcgtttcgtttgactgaaagttatgacaaaaatattaacaagcagggtaaagaaaatcctccctgcccgccgtgcttttgtactcttctgattctccttggctggcgagcggttgccgtactaagtataaacggcaaccacgtcactcccgatcaacggtaagctaatctcccgtcccatgtaaagcagctcgctgtagccttttgtttgttcttttgttgccttccttttccttttctccgcactcatcacttgttgcgggctcgccgccggtgccccgggacacccacccaggactctccacaaggatccggcgtgcgcggagggcaccgtgcaatggcgcggcggtgcccgtgcaggctgctgctagccgtcgtcgtgctcgtgctcgtgtccgctgcagcgcaggcgcaggcgcaggagacgtgctcgggggccgtgccggcgccgccgcggcgcggggcgcgggtgtccgtggccagcttcggcggcgcgggcgacgggcggacgctcaacacggcggcgttcgcgcgcgccgtcgccaccatcgagcgccgcgccgtgcccggcggggcggagctctacgtgccgccaggggtgtggctcacggggcccttcaaccttacctcgcgcatgacgctcttcctcgcgcgcggcgccgtcgtccgcgccacgcaggtcggtcagccgcccagcaagcgagcctcatgctatctctctccctccctcccgcgcgcccgcccgcccgcccgccattgctctagcgcttctgccccgagtcatggcgttctcgtctagtcgtcttcgatcgatctttgtacaaacagttacttttactagaacaactggatccgtatttgaggtttcctcttttggagatctcgagatgcgatcgaattaagaacgaccctagcgatttcccggagtgggattagaatgcatggatctaatattggtgatatgccgtcgttaatgctcttccattaacttattaaaatctatcttccgttcatttttttttgtttaatattttggaattatgtgcggtaaaagggtattgagaatacagttacccagatttttatatgaaacatttgatttgcgctctcttggtgcaggacacatcaagctggcctctgatcgaaccactgccctcatatgggagaggacgagagctgcccggcggaagatacatcagtttaatccatggcagtgggcttcaggatgttgtcatcacaggttcttgctttgcggctaccctaagttctcatattaaactgctacaggggaaaaaatctctgtttgtgccacacaatggaattccttcatataaaataaagtcttcagttaagttattgatggtgatgatagtttgtgatggaaactgcaatgtgttcaggtgagaatggaactattgatggtcaaggcaccccatggtgggatatgtggaagaagggcacactgctctacacaaggcctcaccttcttgagctgatgagctcttctcatatcatcgtctccaatgttgtctttcaggattcaccattctggaacattcatcctgtttattgcaggtgagcagcacgattctgtttacatacttctgaccagaatctcaacgtgttccttattccttatgcgtgtttacaaagaggaaaccgctggactactcacgaactaaacacaagcagagatgatgcgctgtcatctttctgccattttttccagtccagatccttaggcctggtttagatcaaaaagtttttggattttgaaactgttacactttcgtttgtatttgggcatatactagttgttttgatgccatatgcagtagcattgagtagatgggtgcaacttgtaccctcattcatttgcaccatcatagattgcacaagaactccaggctgggtgtcctatcgtgtcatcataagagtacaaaaactgttaggagcaaccagtgaaccataacgaagtacagaaatttccagatgatataccaataaagccagcatattgatgtcgattcaactttgttttcttgcaactgtttctagcaaatgcgtacttgtggtccaaaatctgcttttattgctgtcccagctgagaaataaatgccggataatctttcctgtgtgcagcaatgttgtgatcagaaatgtgactatcctagctccacatgactcccccaacacggatggaattgatccaggtacagatatttattccctcccggtcaagatacagatgcacgaatgtactctgttctcgatcttaaagctggagctgtggtccaaaatctgtagattccagcagcaacatctgcattgaggattgctacatttcgacgggtgacgatgccattgccatcaagagtggctgggatgagtatggaatcgcttatggccgccccagctccgacatcaccgtccgccggatcacaggctcctccccttttgccggcttcgctgttggaagcgaaacatcaggtggcgtggagaacgtccttgcagagcacctgaacttcttcagctcagggttcgggatccacatcaagaccaacaccggcaggggaggcttcatccggaacgtcactgtctccgacgtgaccctggataacgtccgctacggcctgcggatcgtcggcgatgttggcaaccaccccgacgagcgctacaaccggagcgcgctcccaatcgttgacgccctgacgataaagaatgtccagggccagaacatcaaggaggctgggctgatcaagggcattgccaactcggccttctcccggatctgcctgtcgaacgtcaagctcactggaggtgcgcctgtccagccgtggaagtgcgaggctgtcagcggtggcgctctcgacgtgcagccgtcgccgtgcacagaactgacttccacgtccgggacgagcttctgtacaaattcactctagatggcagctagctactactgtgcgtctgtatctacgagtatgtacacatgtgttttaaagcttgggcaacccaaccatttatcttcccaaaaaattaagatgatttcactaattaaattgaacctttctatacgaagagaatggttcttgattcccataagactaaggccttgtttagttcccaaaaaattttgcaaaacttttcagatttcccgtcacatcgaatctttagacgtatgcatggagtattaaatatagacgaaaataaaaactaattgcacagtttggtcgaaattgacgatacgaatcttttgagcctagttagtccatgactgaacaatatttatcaaatacaaacgaaagtgctcgattttgcaaaattttttggaactaaacaaggcctaaacaaaaaatgtgagagtgagtcactatttttcttatttacttggttcaatatattttattcataaaagtcctgccacgtcccctccttattgtat

SEQ ID NO: 4310 - DNA, 7165 bp, Sorghum bicolor
  misc_feature (5862)..(5961): n is a, c, g, or t
actaagttcatgtcagaacttggaagcatattatatccagattgatcaactttgcctctttggtgtatagtcttctgtgctaaaatgtgcaaagatctggtacttttaccctttttgtgtgtaatataaaatgttacctgcagaggttgttaatgagcaacatttttagacttccatattaccaagaaaaataatgagactcatcaaaataagattcagcatatctaatgtacttaaccaagatgctggcatgttgctttgtttgtattaacttcttgacgtatgcacataattttttgataatgatacttgggagtattgtccttttacacagtaagctgctaagtctgtacttgtttttggtgacatgctagtgttgctagtttgcatactattactagatcctagtatctgagttaaggtttcctatatattttcttttcttagtcattatcatgtacatccaaatactttctctgaactgctgcctttaatttcctttacaaattgtcaattcaggttttctcacttgaggatggcccatgtggtaacatctggagagccattggagtaccagtgagcatactacctgaggacacaagcttacctattttcgtagattggttagagtaagtttcagaagttatctctcctgctgttttcttcttggttactgtatatagtgtttcgtcctgcttttactgataagatatgtggcctcagcctcactttctaattatttcctcatcaggtttatttgcattatttctgcagctatgatggcatacttgtcaattctattgaggcaaggccagtattctcaaggtagtattagataactagaattgtatgaccatagattgttctgtttgaaattgatagaatactttctcaaaatcagatgtttgatttggatcatgtgtctgtgccttcctacagtcttctgcacgagcctttcaaatccatacctatcatttggactgtgcatgaatattctcttgcacatcgtgctaaagaatataatgcgagtggaatgattcagctcataaatgcttggaaagatgtattcagcagggcaaatgttatagttttcccaaactatatattaccggtatttacttctgatctatttgtgatttcaacgatcattgagttattgtcatatgaatgaagatcctctgacctaaaagtataattaaatatttccctgcaggtgatgtatgctgcatttgattctggtaactatttcgtgattccaggccccccctcagaagcatttcaggttgacagatttattgctaaaagttaccatgaagatgtgaggatcagcttgggcttgagtcccaaagattttttaattgctattgttggtagtccattttcatatggtgataatttgatggaagaggcgcttgtcttgcaagcagtaagtcctctgttgcagagatatcgctctgagaatagcacacaatctgaactgaaagtaaaggtcttcactgggaacataactgagaagcatagaatggcccttgaggttattattcatgtcttcatgccctgtctgatcatgtgaactgttatttacagtccgattgctttaaattgtatctaaccctgtattagttttctggttcatgatagtctgttgctctaagtgttggctttccaagaggtgcagtggagcatgttgctgctgaagataaggacaacctccttggtgcagctgaccttgttatatattattcttgtctcgaggagcaattattccccagtgtgctagtccaagctatgagtcttgagaagctggttatagctccagaccttgcaattattagaaaacatgtatgttcgtgatgacacctcatactagattgtgattcatctctagtttcaaatactgatgaatgcatatagtattctaaataaactaacatggttgtcatatggtgtagatcgatgatggagtaaacggacttctgtttccaagaaagaatattggcatgttagctcaagttcttcttcgagcagtgtcgaatggtaaagtgtctgtttcagggcaaaagattgcttcagctgggaaggcccatgccaagaatcttatggcttctgagaccattgaaggctatgctgtgctactggaaaatactgtcaagatccccactgatgcactgagccctttaactgctggtgagatacctttagctctgaaacaggagtggaaatggcacctattcgaggatgtgaagcatttacaccgtatgaatacaagtttgtctggctacaagatactccagaaactagagcaggagtggcatagcaaccaaatggaaaactcttctttgagtacaaccaagatcagtgacgcattctctgcaattgcctgggaggaacagagagcaaatgaggttatggacatcaaaagaaaaacggaggaagacgaggtaaaatgcaaaggttgcgtattcagcaatagtttgcatagtcattcattatttctttctctcattctttttgtttatttttaaaaatgctttgaagtaagtagctggagttgattgttatgtagttgaaggacaggaatgaccaaccacatggaacatgggaggaggtgtacagaaatgtgaaaagggtagagaggttaaaaaatgaattgcatgaaagagatgacaaggagcttgagcggacaggtcagccactttgtatatatgagcctttctttggggaggggacctggccctttctgcaccagagctctctttatcgtggagttggcctggtaagctgttgttaccactaagcacaataaataattgtggtcagcttgaatgttccaaagatgcatttagataattctgatgttataaactcatttgacaggcaattctaacatcgaggatatgagctataatgaacacatagattagcaaaaaaattgcaaattcaaagatttgatctggtccttaaaatatttcgagtaatacattccactacatgctaagggactcttcaaattctggtctaatatttttttttggttagataagcctttgatgaatgatatatgaatatagcaataattttgtaaactcaactcctcttgatgtatgtaaagtgatgatgtgtaaactcccatgtgtgtcattggatggtactccctctatcccaaattataggttgttttggcttttctaattctaggtacatagcttttgctatgcacctagatatacactatgtctagatatatagtaaagccaaaacgacctatgatttgaaatggagggagcatttgagtgatacagatttataatcagccaagaaggcagaataccacctgatttctcaatcattggtggtggagtccatcactcttatatggtgccctctatccctttcaaaacctgatccattgaaactacatcaaagaaatccacttggtgaatacatgatttagcacccaaaatttgatttgtgctagatattttatctttgggcaaaatagttgctaaaactaaaatgagcacaattattactaccagtggaacaaatatggcattaacaagaataacatatggtatagctttgcaaatatttggatggataatgttgataatttacttctctctttcattagtcttcaaaaggtcgaagaccaggagcggatgatattgatgcttcttctcgtcttcctcttcttaataatatctactacagagatattcttggtgaatttggagctttctttgctctttccaacagaattgacagaatacataaaaattcttggatagggtttcagtcctggagagctacagcaagaaaggtaacgatcaagtgtgtttattttcctttgttttcctcgaacacacaggagagcagagtgtcattatattaagaagagaaagacccctaacggggaatgacctgtacagcagaaatcactgaaaagaaactaagaaacgaccaaagaccaacaaaccagttatggccatatatgctaccgagctctttcttctttttttaatatcttttttattgggtaccatggatttcatgaatctgattgataacatgatgagtaggcaagtgtttctttgtaaggaacatgtgcattgagtgcagtgagaacaatccacattgtcttccagaacaatttgcaccttatttgtactgagtagctgtttccctgaacaggcaaacttgtcaaaaaatgctgaatctgcaatcttagaagccgttcaatctcaaaagcatggagattccttttatttttgggtccggatggatcaagatccaagaaaccatgctaataaagatttttggtccttctgtgatgcgatcaatgctgggaactgcaggttagccagataaatgtgtttcatgtgttgaattaattttcaactctgcaaatgtaatggtctgagcaaatttgtgtcattttttgtttgtttgtttatttttagtcccttgttggatttcatttctagcctaccccaactttgcttgggaacaaagcaccttgtttgttactgctgtacatagtcatagtcaattctttgaagaatcatcaaacatttactgagcaatcagattttatgttcttttcttttacagtactctcctcgtttcaaattataagttgttttacttttgttctaagtcaaacttgtctcactttgaccaagtttatagaccaaatgtataaacatctacaatatcaaataaacgcactatcaaaatatacttcatggtgtctctggtaaatcttatttgatgttgtagatgtttgtgtattttctataaacttgatcaaagcttgagaagtttgactttgggcaaagctaaaatgatttactgtttggaatgacgggagtagtcatttaaggtttttgtatcagtgcctatttcagtttatcatcgttacagaactacgagatctgttacgttaatatgtgctacatatatggtatatatgggtatgaccatcctactaatgtaatcagctttgtgttgtatgcttttcaatggtagtattgtcatagtggtttttattctgttacaatggaactaatctactctgcacttgtacctcaaaggttagctgttttggaagcgttccaaaggatgtatggtgtacatcttgatcatgacctggattctctgttacatatgcctaatgatggagacacttggtctgtgatgcaaagttgggttttgcctacacggtcattcctagaatttgttatgttttcaaggtatgggttatgtttttggtatcttactgacaatcaagtgagtgttattacatgtatagctagataatatgtatgcactggtttattatctgatgttatatgtgtatcaaacatactgtgaatacctggatgtagctgatctaaacatatttgtgtctgcattgctagcagtatattgttgatgattatttggggttgtgtactttgtggaaaattacctgttaaagcgcagccttgctttaattgactcagggtccaaaaaaagactagttctcaactagtatctcgtcatttgatcatttcataggattgtgttgctataacaggcatcctagatgttaatcaacatggatgaagttttttggtcgctatttgcttgcttgcattgttctatgttcattccttttacctgataggactatcataccataggaattcaggcttttctatatgcttcattaggtgtttacagtatgctcttgcttttcagaatgtttgttgatgcattggatgcacaaatgtatgacaaacaccatcaaactgggcattgcatcttgagtctccacaaggtgatccctttgccacatctttggataacattattatnnnnnnnnnnnnnnnnnnnnnnnnnnnnnnnnnnnnnnnnnnnnnnnnnnnnnnnnnnnnnnnnnnnnnnnnnnnnnnnnnnnnnnnnnnnnnnnnnnnnatcctgtccagagcatagattttcttaagatagaataatctatagtgtgaaatgtattccctagctataagaatcgagatcatcaccatgtcaatatacatggtttgccctcatgtgcttagaaaagaaaagaaatagaaactcaccatccgcatctcccttttaatgatgttatgggcagctttcactagatgcttgtagttaatttatagagaagctattagaagaagttgctcctgtgacatttttcttattttgtacaggaccagcactgctattctcgcgttctggagttgattgtgaatgtttgggcattccacagtgcacggcggatggtctatgttaatcctgagactggtgcaatgcaggagcagcaccatctcagtggcaggagaggtcaaatgttagtgcagtttttctcctacaccactctgaagagcatggacgaggagcttgcagaagagtttgatttggatcacccggacaggaggtggctctggccacaaactggagaggtcttctggcagggtctctatgagagggagcggagcatgcggcagcaggagaaggagcgaagaaagcagcagagcagagagaagatccagagaatcaagaatagagctcggcaaaagacgttggggaagtatataaagccaccacctgatgatacaggtggctcgaatgatacaacagtagatttgtagcattttgaccatacttggggagttggggtgatgattcttaccgcgggaaattttgttcattctttcttcgttgcgggtgatgtccttagtcctcactgactacccccggacgggtgtgaatatttttgggtcagttttgtcgtgccccctggtgttctgggtgctttacaggcgacgttgtaacatatatctaggccactgaattgtcaagttgccatcttaggtgtaaattggagctcccgtagcgttaggtgtttttcttcttttcgtttaagcttctctataacagaacagctgctctgcttgcagtctcggtacagatttagttgactgatggtgtcattctgtcatatttggtggcctgcgctactttctaccttcgctattgataattttgctcaacatactgtaaaacctgttatatcttcagttgttttggtgtcttcatgggcctggaaactggcaaaagtggttcatcggagcaggtcaagagccatcaa

SEQ ID NO: 4311 - DNA, 7659 bp, Sorghum bicolor
tctggtttgggttcttcccttctattatgttatagcaaagaaaagttagatttacacagtttcaataaaactagaatgtaacagtgtaaatctaccggttgtctcataaaataacattctagttttaaattctaccagttgtttatgtgaaaaatcttattttttttaaattttaaactaaacaaggtcctgtttataccttttttttgtgtgcacacaggtcctgtttatacctgttcctgctgcttctgcacaatgcagcccagaggctacaggcggtgcctgccgccgtgcgaagtgtctcctcaacccgtcgactcgtataagcgcaggtgagcatgccaaatcattatatagataaaaaatcgaatgtccttagatctattaaacaaaatcgaatatttaaacatatgcatatagtgtttagtttactctaaaatccaatattttagattttctgtcacgtcgaatcttgcggcacatgcatgaataattaaatatagataaaaaaagataactaattgcacagtttatctgcaattacgagatgaatcttttgagcctaggtactccatagttgaacaataattgtcaaatacaaacaaaagcgctatagtgttcaaatccaaaaaaaaaaatctaaacaaagccttggtcttgtctccatatagaggaacactagttaaagggatgctataacttagtaaagccagttaaaggggcttgatgttgagacactagagcagccttggaggctaaagtcagtcttagtaaaggtttcagatcgaccgaagttatcacgtgtggagtcacatgctgagggagcatgcaatctatctttaagctcgcggcgctacctcctcgtgctctccaccctgccctcgctgctgttatcgtcctcgttcctgtgcttatcctcggaggctaaggtcagtctcactggaggtttcagattgaccgaagttattgttctcgttcatgtgcttgtcctcgaccccgccctcgccactgttattgctcctcctcgcccccctgccaaccaccgcccccacgagcactaggggtcatcagagaaccctagagcctacgacgatagctttcttttcctccccctcttgtcggagctccaccatggctatgctcgtcgacgacgacgttaagctccaagctccaaccatggcacccccatccctaaacctgtcccagtcgcctctgccaccgccacgaaccaaccgcctgacctccttcccaccgcctaggtggtctacctcccccgaccggtcctttctaagctcgcagaattgaagaaaccctaactcatcgttgccgaaactctaggcggaccaccagcttctttcttcttcgtcttcgaccccgtgccatcgagctgcccctcctcttcttcatctccagtggcaagcgagcgcatatgggccgcccttcgtgacccatgttcagcgtgctatttgggctcactaatgcatttgcttttgtatctagctgcataaaaacgagttatctctcatctctcgtttgtatcaacgttaattttactatagacctattattaagttgctttgactgcatctcacagaagtcagcgaaattgtctgcataccacagttgctgctacgtggagatcaaaatttacccattcaaaaaaaaatacccattcaaaatttaggccttgtttagttcgcaaaaaatttggtttttagctactgtagcaatttcgtttttatttaacaaatattatccaatcacgaagtaactaggctcaaaaaattcatctcacaaattacaagtaaattatacaattaatttttattttcatttatatttaatactccatacatacgatcaaaaaattgatataaaatgagaattttgaaaaattttgcaaactaaacaaagcctatgcagtgcaaccagttgcccgtccacccggccggacaggcgtaggtccccagcccctgcccgagcctgacctcttcgtctatcaccctcaccccgaaacaagattagattagatagcaaaggcgaacccacggttaaccgccaccgccatgatgcctccgacggccaccgcgacggccgtcttcctctccgcggcgcccccctctttctcaacccgccgtcggcgcagccgccttcctgccatctccgcatccctttcgccgtcctcctcctcttcctcctccggtaaaacccaattcccttcctctctcactcacctccatttcgcccctaatctgaattgcacgccgcgtgtccagaggagccgctgctggtgcgcgcggcgcggggcgaggacgggctcccgcgcccgcccgcgtggatgatgcggcaggcggggcggtacatggcggagtaccaggcgctggccaagcgccacccctcgttccgggagcgctccgagaacacggacctcatcgtcgagatcacgctgcagccgtggcgtgccttcgcgcccgacggcgtcatcctgttctcggacatactcacgcccctgccggccatcggggtgcccttcgatatctccgactccaaggggcccgtgatccaatccccagtgcggtccgaagagcaggtgagggagctcgtccccatcgaccttgatatgctccagttcgtcggggagtcgctaaagattctgcgaaatgaggtaattcctgtatgcattttatgctacagaaagctggttccattgagttacttgtcgtagtgctctgggattactaaatgatagtgctagctataaatgcacaaggtattatgagaagtccacgcgtgtgttggcatttgatctaccactaccagatgcattgtcgtgtgaaggattcgattaacttcatgtcaggaaaatgatactaggaatgaaagtattggtagttactggttagtgctatcctcaagcagatgcagttgcactttaatcatgcccttactgtcacaaattccgtgcactttggtagcctcaagagtgttttggctgcttatgaatgcctacagccgaaaagaaatttcaggaaaaagaggttgctgtggtggtttagttgtaggtttcgatctattatgagttaatgagaaaaacttgacatttgaggtatatcctcggaaaaccaacatgattttccaacacttgcaactttagaaacatgccatgcacatcttaatctctctggacattgattagtctatgaaatgcttattatttgttattatctgaattatatatttatgccagtgattgtttgaaatctctgctgatacactttggcagttgggcatttcatttcaatttataactattagtaattagtggattgtgattatattgaacccaaagtcatattcctcttgttctcattgttgaatattctgctgacagttttttctcatcggaatatgtatatgaacatcaacagcttatttatgagtgctgttttattgatacaaattggattgggtatagttcagcaaagcattctgccctacacttccttcgatgcttataaatcttgtttcctcttctatcctctagattgatggaaaagctgctttgctaggatttgtgggggccccatggacaattgcaacttacgttgttgaaggggggatgaccaacacatacacaaatataaagagcatgtgccatacagctccagatgtcttgaggagtcttctttctcaccttgcacaagcgatatctgactatatcatttaccaagttaactctggggcccagtgtatacagatatttgattcatggggtggacaacttccacctcatgtgtgggagcagtggtcaaaaccatatatcaaacaggtgactcttccttactttaactgctttcatgtattaccatctttatggttggtggtgttgctatgtatctgcactgtcttctagtacaacattgatggctcccactaaatgctctaaagctcagtatctcctaagaactactctcgaaatgcttctcatattggtttgcatattatggtaccgcattaatcccctgcaatttatggtaccgcattggcacattgcaagactaggtatggttatgaccacgagttccttataaccacgaaagtggaatctagaaagtggcaatctttcaaaataacaagtacctggtgtttacatcagcagcatgttttcagtccacatggaattggaattttagatactgtatgatatgttcctgtaatttggtttgcatatcttcaatactgaaactagcacattgtatataactgccttacttggtcattacggtaatttccacaaacttggtgtatttagaaggaaaaattcagaatttcatcttgacctagaaaaatgtgcaaaatatcatatagcgtgtagactgttatttagagctcaattaaaagatttcatgcaagttttagatttcctgattctgttcattaagcttttctatttcttcgacagattgtgagtaggattaagaaagagtgccctcatgtaccccttgtgttgtatataaatggaaatggaggtttacttgagcgcatgaaggacacaggagttgatgttattgggcttgactggacagtggacatgtctgatggaaggaggcgccttggtaatggaattagtgtacaagggaatgtggatccagcatttctgttctcaccattaccagtactgactgatgaaattcataggttagtaaaggctcaaagatttccatttaatttatttacattattttgagtttttggttagtgctcatgtgcaattcattaatgcgatcacctaaagtgctgcctgagtagtatacatcttcatgtcgggtatggttggttgcgtgcactatgataaacctgcattacaccctactccctccatcccaaaaagagtgtagttttagaatttcagacatcttgtttgatcatttgtcttattcaaaatttttacataaatattatatattttgttaagacctattttatcattagagatactttactaatgatttatttattttataatttacataaaatttttgaataagacgaacggtcaaatacgatttctaaaagtaaaaaacgtcactctttttgggacagagggagtatgcagcacagaccttagcctgtataactgcatgcaatgacgtgtgtttggtttgcttgcatagccctttttcattgtaggggattgtgtttggttgcttgcattgagttggatgcagtcacctctttgttactgtggtaggcctaaactctatcacctcattcctttttcttcatctccctcatcctttctgccgttcctggtcatatgacatgaacagcatcattaccacctccgtccccaaaatccaaagcagcaggccttccttctccttttgctctctctgctgctcctgctaatcacaaatcatctccttggaaaacagttcatcttctcacagccagctgtcagcccaaattcaacacttgtccaattgactgaagctgcaaatcgagttccttctcagcgttatttgaatcccaaatctgtgtatttctttccaattcgccccacaacctggagttggattaaaataatattgattccctactcccacttcttcatggcttggagatgtgatccaaatcttgtaaatcgagttctcattcccttctccatacttcatcgccgctgtaggcctcgagacggatcccactccagtgttgctcctccaagccaggtgcttgtcagttccatctgtgtgcagttccccagcatttctgcgcatgcttgtctcccttgtggctgccccgcagcctgctcgtggacgagctccatgcgtgaggcgagctcttgtggctcgtcgcattgctgtgcgtgctcaacccttgcgtctgtgttccctcactcgagtctgcgctccgcatcagctactatggccgcaaggtggtggtcgacacgctcttgctggcagctctctcttggcctgcagccatggatgcgactaatttttgcatactcgccctttttgcactgcggtatgctgcatatgactaagtccaaccatccaaacaaaggccacctgcacgggagcctggataagtgtttatgcaccaccaatcagccccttcatgtattttgttacaccatcacaacgatgatcttcttagtagttatcaatcagtagtgcagctgtacagtttgcaaagctcagtagttaacaatgatcttctcttgttgtcaaaaaaaaaaacacacaatgatcttctcagtacttatcagtgagtagttctgattcaaaccttcagttgtgtaccaaactatcccctatgtattcaagaaaaaggttgtgtactaattaccaaactaccaatggatattcgtccttagatctattgaactattgactgaagaatagggaataaatgattgtcacacaatccgtatcttcttttatgttttcagtaatatcatgaaacatgtatagtatcattactatcattaagccttactgtttgttttttgttgcatgggatggttggtgcacaagcataaatgggctttgcctccagtcattacattccaatttccttttcaggattagttgctatgaactgataatgatttttgtctcttactgcctgctctgcagggttgtgaaatcagctggtccaaaaggtcatatacttaacctgggccatggtgtacttcagaaaacacctgaagaagctgtagcacatttctttgatgtcacaaggagcttgagatatgacacccttttccaaggttctgttgccgaagaactgcagcctgttgcttgacagcggcaatggcattcccatcttccatcaagtagtctatttgatctgccatatatcatctagagtcacagtagattcctagtgttgtctgcatcctacctttcaagagacactcattttgttgaagcctggatatgtcttgtagagatcggcagcagagcaaatgcaattttattcactgtttgtctgttccattattcttcagactgaagaagggatgcatgatgcatgcaacctggttttgaagtagagctggggggctggatgagccagctcagatcgcttattgagccagaaggccagctcagctcaggcttgtttgagcatttatctaaagttttagaatggtaataatacaaaagcaacccatccataaggcttaaatcaaacagataaataacaacaataatgcatacattgtaccatacataatgcatccataatctattattatttattattcatacatccatctaaaacaaagtgatagagccatactaattccaaattacatgatctggatccagccatcaatcaatttgtaaagtgcaatgcatcaagtcatacaaaactaatacaaatttaagtccaatagctttggctccttagtcttggttgttaactacaggagctaaaacaagcacaagtttaaggtcaatagttttggctcgttaggcttgcaagtcagtttttgcgagttaaatatacaagctaaaatgctagcatgacttgttgaaaaatactcactccatcccaaattgtaagttattccaagaatcttggagagtcaaaacattttcacatttgaccaaaattatagtgaaaaatactaagatttgtaacgtaaag

SEQ ID NO: 4312 - DNA, 3176 bp, Sorghum bicolor
gccaaagacgtggcccttgaccactacaaattgggtgagtatcccatttgcgaggagagtgtttcaaccaagagttattaccaacatgtcacaagaagttggaggaggcagtggagataatgacatgtgagtcgggagatgatagaggacatgtgaggacaacaccgtagtagatcttagtgtattcatcaactggaagtagtggaggggaaacatcaatatcagtgaacacatcaaaatggaaacatgttctattgctagagaagatcatatgaccaaaggaagcacctctaaatgcaaacttatccaaagcacctggtggacagttatttccataacagatagaaagcaaaggaatatgagaacacaacaaagtatcttggctagctagatcagtgacataacatgggcatttgggtagagagattgatagaaagcaaaggaatctgagaatacaacaaagtatgttggttggctagattagtgacataacatcgacatttgggtagagagaagagagttgtttgtggcaacatttggaaaagggcaagcggagcagaatgagacattaggatcaaggagaagaggcagaaaccatgtatacaaggtagatttggatgggtaagagaagaaaacagagcgccaagggtggcaagaagctgcaaaggcaagaaggtcaaggaacgagcccaacaatgcaacaatggagtgcaccaggccatctgggaggcctgcccaatctcaaagctcaaatataacttttacaggtgaaagcagcttctatgtgacagatttctaaacccaaagcaaacattagtagattgaactggatataataaagaaaacaaagctctggtaaatttaaacgagacatggctagcacgtatggtttctcataatgtcaattatatgtataagaatgcagaacaaaacatgcaaaagcgaaacaacgattcttgttatgcccatggttggattatatggatatttctgtttttgctaagataatgcatacttgtgcaatataaagtcttttgagcactatcccagtgtcccttcaattagtaatttcaaagagctagacaaccatgatttgtcatctttgatctatgaaatatcaactataatcaccataagatgcccttaataaaaactgatggtactcctttacacggttaatggggggcttggtcccttccctttatacataagaataccaaaatttaataaatactactactagttcattaagatttggatacttgcaataaacaaccaaaataagaaccaaacgttactacatttggggatccaaagaaaacaatggaggcaaaggcaaagggggagagggtacagctaagatgagcaattagcgtacatgtgtcatgcctgaccagtggactgtgagcggaggtgcgacagtgagatccttctccggcagttccgtgctgcctttgagctggacgagggacaacccaatgatttgagtatgaaacgatttcttaacttaagagttgtttctttcatattcgctttctaaagtttgtctcaactgtgactcagtgaagactgaagacactatttatacatatttggattttccgctttatataaaacttttacgtatgcacaaaactcccttttctaggatttctaaataccaagtgatctaatggtgtatgccatcaaaatcaaattgacgtacacctttaaatttgaagataccaagtgatccaacggtgtatgggatcacgcatgtgatgtgagtctgtatgttccgcgcgtagtcgacacaccatgcatgtgacggtggtgcatgcaacatggccaggcaggcacagaatgcacggctcgcgttctccgcctcacataaaggctggcgctttcctctcctatttttcctcacacatgcggttccacttcccatttttgcctccgtccacgtcgagggacacactacctgcggacgctcgtagcaagatcgtccctattccccaaaaatgagcaaggaagaggaggtgcgatccagcggtgccgtcatggatgcgggaggggaggaggagagacgggagaagagcgtcggcctgatggccggcctggtagacaaggccaagggcttcgtggtggagaaggtgacacagatccccaagcccgaggcagcgctagatcgcgtctccttccggagcatcagccgcgagggcgtcgagctgcacagccacgtcgatgtcagcaatccctactcgcaccgcatccctatctgcgagatcacctacaccttcaagagcgctggcaagtacgtcatgcatgcatgtccctctctcataccacaaatggccgcattctgattttgtttaatttcatatgccatacactcatacttgatctctctcacccatggtggtttgttcctgtatgaatcctagggtgattgcgtcgggcacgatgcccgaccccgggtggatcgcggcgagcggcagcaccaaactggagctgccggtgaaggtgccgtacgacttcattgtgacgctgatgaaggatgtgggaggggactgggacattgattatctgttggaggtggggctcaccatcgacctccccatcatcggcgccttcactatcccgctcaccactgaaggcgagatcaagctccccaccttccgggacttattgttttaagcaattcagatgtttggaaaatgaatcgatttgtttatttcatatcataattagtgttgttcaaagcaatgatggtcgattagtaatatttgggcttttatatacaagtatttagagatttaaaactatctcacaacgatgtgagtttaagcttgaccattaaaaaaattctaacctgatgtatagcgaacatatatggcccctatgacatgattatttttattggaacgatatacatacgtgatcaatacaactaacatgtgtgtcaagatgtatgagaaaagttcatctagagcatctccagcaattcccacaatccgtttccaaaaatagattttggccaagatgaagataatactgagtccagcgatacacaaaagaataatttttgatcccaatatatttatgctagcccaaagtccgagcatatttgcgcccagcttctgtgcaccacctaattggggattctgaccttctcatgtgcatttgcatagccatga

SEQ ID NO: 4313 - DNA, 6112 bp, Sorghum bicolor
taattgcacagtttacctgtaaatcgcgagacgaatcttttgattctagttaatctataattggacaatatttaccacaaacaaacgaaagtgctacagtagcaaaatccaaaatcttttcgcatctaaacaaggcctaagttatatcactttgacttttttgttacatagattttgttatatatagacatacattatatgtagatacatatagtaaaattgatgtaaacaacagtcaatggaggagtagatgatattcaaacgcaaaagctattattttttgatatgttaaagatgtgcatacaacttgactaatgtttggttaaaactaaaaaaattgaaaatcttaaattctaatacactattataaggatggagaagtaattatcacctgattaactatataaactaacctatcaacacgtgctcttacacgggctacaaccttagaaaacatcaacaatagttaccgctaagagcatctctaagggattctttatatccttcctaatttataggatatagattttaattaagaaaattccaacaacctcattaattggatctccaaatatagacattctctatttcgtatttttcactagccaaagatggataacgaggatggctctctagagtgcgtgcaatgcatagaaaagttgttggatacaaagatatagaaaataacatttactcaaatatctctccaaatgatgatttagagtaattttagaaagactcttggagatgccctaatatctatgaataatacttatgttttcttttatgaggcacacgatcatttatttattttatattatattgtttatgtttatgagcttataatagttggatagtatatttgataacaaatttaactttataaagtttgtattattatagttaaaaactgttagtcaaattattggtcaaacaatttaaagtttcaattttgatatgtgtgtgttccatataaaaaattggtgggggtggcgttgcttctataatagtgcgtgacctcccatcttaaaaagagaagaataatgtgaggggaggtggtgaaagaggaaacaataatgatggagcaacaaagccaaaatgaatgaccatttgatttcatcaagcaattcaactatgccagttgacggtccaagtaatttgctaaactagtgaatgatgacatggatgatggatgcaccaaagaagagttagtaggttcgtacttaggggtgtttgggactgctccgctccagctctgggttgccaaacacgtctagctccacgaactccgctccacaaaaaaggtggagctagaggccagctctatgtttttcctggagtacctcaaggggtactccagtttttgaagtttgatacttccacatggtgaggtacttacccaccctgccactcattaatcacgggattagttcctgtaaatgcttccccttccaacgccacgacctcgtctcttcacaggattagttactgatgacttggtacacatcactgaaaggaaaaatctactttgataataagaaaaaataataataatagtttatactaagtttggtaaagtgtttctgctgtcaggcagttttttttacaagtgctaaacttcatttattttttagtttgcactagttacagttcaaatttcacctaaggctttgtttagttctgaattttttttgttttgagtactgtagtattttcgtttttatttggcaaatattatctaataataaattaattagacttaaaagatttatcttatgatttatagataaactgtatatttaatttttgtttacgtctatatttaatactctatgtatatgtcgcaagattggatgcgacgagaaattttgaaaggtttttggtttttttagacctcaatggatttgctcgcggagacttaagcacacgtgtcagtggtcagcggtcagcggtcagctccatcgcctacaaggactcgccgcaatcacacattcacacacatcgcccggcacatgcctctgcctttcctctgcttctcttccactgcaccaatggtgaccagcgttctgctgatactgcgggaaacctctccgtgggcgctggtcggcgcggcggcgtccgtggcgctgctgtggctggtcgcctggacactggagtgggcgtggtggacgccacggcggctagaccgagccctacgggcccagggcctcaagggcaccaagtaccgcctcctcaccggcgacgtgagggagaacgcccggctcaaccgagaagcccgcacgaagccgctggcgcttgggagtcacgacatcatcccccgcgtgctacccatgctccacaacgttgtaaaggaatatggtaatttctatgtgcccagatcattccccacatctaaaattgattccttttgttccaaattaatgaggggaaattatttgcgatttttatatttttttgagcccatttcctgcgatttttatcatatttactccgtgaatgcccaaggacgaatatacaggagttcaatcagaagttcggaatgtttggttcgagattagcttgggtaccttttatgcactaatgtgatatttatgtgcgtgtaattgacatgaccaagtctgaaatcagattatagattttgattgcacgtgtcaaaatattgagctacatatcctgtcacagtatgtttattttcccagttctgaatcttgttttgtgactgccaaaatccgcacagaatcgtttggttgcagtctgctagtcctcctacggtcctacttacagggttctctgccttacgagtgaagcaaagccagggagctaattttgaacaatggttgcagcttatcttgtaaaccttatgtggacctgctctatttttttctttttctcttttgatgttccctagttcttttttttttctcctggcttataaccttactgtcttttttatttaattaataaaattttctgcaggggcttcggccccttcagtttcatcaaaaaaaaaaacttacagggttctaaactcaaatgtagggacaaattcattcacttggttcggcccggttccgagggtgataattccagatccggagttagtgagagaggttttgtctaacaagtttggccacttcggcaaaccacggtttagccgtcttggcaagttactagccaacgggctcgcaaatcatgaaggagagaaatgggcaaaacacaggagaattctcaatcctgcattccaccatgagaaaataaaggtcattgttcactaaatctgttcctatggatatatttttcttgtttcaaattttagtatatcatattggatagtgaacaccctaagtgaactaacattgttttttcatccacagcggatgctgcctgtatttgctacctgttgcactgatatgattaacagatgggaaaattcaatgtcttccgagggatcttctgagatagacgtctggcctgagttccaaaatcttaccggagatgttatctcaagaaccgcatttggtagcaactatcaggagggcaggaacattttccagctgcaaggagagcaggctgaacgccttatacaatcttttcaaacaatatttatccctggctactggtttgttcttttccttataaacagcagcaatttgctcatgacactcactgcgtaggaatatttacttatccgtgttttaagataatgacttgatatcatttctagtaaaggaagagatacagaaaagacttctccacatccaagaatattttggacacaatctacattttacttctacttcaattgtccaaactgagtagggggataaagactagggatgttctgcggtaggaatcaagaatctattctgttataacactgttgaacatatgcaggttcttgcccaccaaaaataacagaaggatgaaagaaattgatcgggagatctgtaaagttctgcatggaataatcaggaaaagagagagggcttttatagatggtgaaggaagtaatgatgacttgctaggcttattggttgagtctaatatgagagaatcaaatgggaatgcgaaactgggaatgagtaccaaagatattatcgaggaatgcaagttgttttactttgcaggtatggagaccacatcagtcctgcttacatggacgttaattgtgctaagcatgcaccccgaatggcaagagcgggcaagagacgaagttttaaaccactttggaagaggtagaccagattttgatagcttgaaccgcctgaagattgtaagtatgaaatcattgttcttttgttcaatcaaatgcaggaattcatagatattaaagacattattaatttggagcaattgcaactctgccaccactttgaacacggttacaagcttgccaacagaaaattgcataaataccactaacactgtcatttgagtggcattcgtgcaataaataacaagaaaaccagtgacaaaattgcaaatgcccctattaagtttccattactttatcagaattagattgacaaaattctaaaaaaatcatctaaaaatagctacttttgtgattttaatttccagacaattgaattctgctgatagttgtctgcatgccattctggtggagaaactactgctttgcttctagaactgtggggccttacattccaacaatgtacattaatatcttgaatgactcactgaatatactgtagaagaatgctggagatgacctaaattaggtgtcgaaggaaccttgttatttacatcttgcatcctttttggaaattgcagttttagactgttccaggaagtctattgtttgtttacatgtgtgagaaaccccccaataactctgaaacaaaaacttttccaaggaaaaaacaggatatctaatttttatcaggattaatgatcttgaccctctgttttggttctgcaggtaaccatgattctatatgaggtgcttaggttgtacccaccagtgatcttactaaccagaagaacttacaaggaaatggagctaggtggcatcacatatccttcaggtgtgagccttctactgcctatcattttcattcaccatgatcctaacatctggggaaaagacgctagcgagttcaatccacagaggtttgaggatggcatttccaatgcgaccaagcatcaggctgctttctttccatttggatggggtcccaggatctgcataggccagaactttgcgttgctagaagcaaagatggcactgtgcaccatccttcaacgcttctcctttgagctctcgccatcctacactcatgcgccatacaccgtgataactttgcaccctcagcatggtgctcaaatcaggttgaagaagctttgaccatgatggtcatactgaatggcaaaacatatactgctagtaacatatagtgattgtgcatgcatgtagttttaaattcaccttgcatatgaacaataagaagaaagtgtgtatgaatggagacatgggttgatggatggtttgaaaaataatgatctgctttgtctggtaatgcgtgcatggtttgaaaaaaaaatgatgttgcagccatagtttattggcaaaatttgctgttggacatgctaagtgatggctctttgttggtggacatatactttcgagcgatttctaaaagacacactagttaataaattggttggtggacaccgtgcctaaaaaaaatacttttataaaatagatataaaatcatataagtgctctaaattatgccataaaatcttcatacagtaaaatattgttttgcactgaaaatgactatttttcctatctttataaataaacaaagttaactatggttaaatttgtttatgtatttgtaggacactaaaaatcttgaaaaaatcatagattacatacattaccaaatcatgactatgctaaaaatatcagttcaaaataataaagttttttatatcaattaagcctgacagaagataaatctataactcagttatggtaaatatatctagacaaatgcttggaaaaaaaaaaaaactgaaacaacttcgtcgaacgccccctagctagttggtcacgtgctttccccaaaaggtacgtggccac

SEQ ID NO: 4314 - DNA, 7274 bp, Sorghum bicolor
tgaaataactagacatttttgaatagggccatgccacgcttgtatacggaaagggtaaaaaaaaagttaagtttattacaccatagtagataacaataactcatatcagttgcatcaaacaagcactgtagttttgtactgccaggtatcttgcactatttacttcttgtttttggatccattctttggtacctgtaaacccatacagcataacttgaagatgaacagcagtgcagggataactgaagcctaggagaaaataaaagggatatggacgtttataagaagcatgtattctaacagactacctaatattattcagattgtgtgacattctataaaagacccaaatgcttataaagatatatcatgttgtaaaaatttgatctgcatttcctttcgtaagcaataaaacaagtctcttttgggagttaccatgatgaaaaagttaaaatataatctcaataataactctgcatagggaaaacttatccttctgcttatgattattttttttttctattacaagaaccactgtagaatgggaaaatcactatcttaaatttaaatctacaagaacctggaataattagtgctacatttcaatgtctaatgagaacagtttcttttggacattccaattctcctttgaaaatgatatatagttcctgctgtgatataattcattgtatctgtgagtggtaccatggccaaggaagtaaaaagagatgcatagaggttctggaatgacttacatttagagaatagttaaaaaggctaaaacaaccagtagggggtggggggagggggacagaaattttcatgagggaccatgattgaactattgagggtgcaaaaaatattttttttcaaatgtggtgaaatacctaagagatgtgcacctagcatagttttttctttgggctccccttggcctctcctttcctcgtcccctgaagtatccgatttttttcctggggaaggaaggtgatctgggaaacggtaatcataagagggagagctatgcggcatatgccctcaaaggcactttggcattatcgaagcaatatcgatctctgttagtttatcttgcgtgaacgtttgtggaaactactaccttacaagcattagtgacagctcagaaagttatttctgaaaggtttcatgtgtaccgtgggaaatgttgccaactcaaacaccttcaatatgttgtttgcacgcaaattcttctggaagaaaggtgtctaaaactatgagcgggttacagaaaggtacaaaccacggctgtgcattttggaagtatcatctatagatgtttgttgaggggaaagccgcacgccaaagttatttactcagaaacagcttcaacacacaattgtctgcgatatgatggcatctctcacgcaccatcacctctctctcatgtctgtttattttattgccctttctgctcataaaaatcattaagagtttataaacatgcataggcataccaatatgcacatctattaattagccagaagatcatcttcttattctttagtttagttattgtttgaaaaatttgtccaggcctagggagctcgtgcacagtactaatgcatcttcatcaaatgtgaatttcaaaaaggaagtaggaacctatgagagtattgttcaaaattaattaatggcttctattatgtttataccaaaggccaaggacaaaattggaatgctaatgatggttggctgcgtgagtctgtcgagatacttgtgagaaatgtgaacctttgtttccgtgcatggacataaaaccaaaagcttccagcctctttcacggtacttgcacttgcaagaaatgagaactccttttcatttctgtacgtggacgtaacgccaaagcatccaggctttttcacggctgttcatgcctttacacggttcatctccacaagtatgcctcctcccactctatataagcacatcaacagcacacaattagacacaggcagcaattggggccacaagaacacttggggaggcaagtgtgattttgatctcgcagccaccttcgtgttttgttgtaagtatacattcccttgccatctttatttgttagctcaattcgtaatcgggaagtattagtgggtagagggcgagatgctatcatctatgtagtctgcaaatgcatccgacattatacaggttgctttgtataatttgaattgctccattcttgccaacattatattgcaaggtatatgcctagttgcattaaaagttctgtcttttgttctaaaaccattttagctgcatgcaatttttgttcacggggataaggagatctgtttcggttactttgcttgaggagcattctttacgagtccagttttgtggaagtagtaaatctcggtttggtcataagacgccatattgtagcgcaaacttatattacttcagtgttcaatttatcgtaaatgttccttgctgtaaaagaattgcctacttatttatttgaattgcaggtgtgtctagtagttggaggagatatgcagttttcactagcatcggatgcgaactcaggtcctcacccaataagaagatcttgtgagggtggtgggattgacaggttggaacgattaagtattgggggcagcaagcaggagaaagctttgaggaataggtgctttggtggtagagttgctgcaactacacaatgtattcttacctcagatgcttgtcctgaaactcttgtaagtatccaactcaatttttactcttacatggtggtttactatacatttgtcttttcaagggaaatttactatactttttgtgttttgagagagttctactatacttctgttggactgatcattgtaaagatttgttcaaatagggtcatcttaattgtttgaaatctgggaactgtggcttcactgcactcaggaaaaggcaattcatggttatggcatgaataacttatggaaatagaccttagagttgctgcatgattgtcacaaatcattgctatgatatcttataatagttctttctactttgcattacatgtataactgcaacttttagttgcgttaaaaaaaacccctgtaactcttagaccactcaccactgtaatctttcctgaatttttgtttaatggcatgtataaactcaccacttatgtacttatctaggaaaaaatagtctaactctgtgccccatgtttgcagcattttcaaacacagtcctctagaaaaagttatgctgatgcaaaccatgtatctgctatcattttgggtggaggcactggatctcagctctttcctctgacaagcacaagagctacgcctgctgtaagagataacattgaacatcaaatgttgattactctattatagtattatacagaatataaatttcgaatttatcttagttttgtacagtatttagtggattcttctcattttcaagatacacaattgaaccataattgaagtatgtaagacagccagttaaaaaactatattcttttgggagactttcagtcaaaatttcttagaaggttttttggtccagatgttctgataccttatttttttatttggtgcactacttaggttcctgttggaggatgttacaggcttatcgatatccctatgagtaactgcttcaacagtggtataaacaagatatttgtgatgactcagttcaattctacttcgcttaaccgccatattcatcgtacataccttggaggcgagatcaactttgctgatggatctgtacaggtagtttacctcatctttttgatgtgtaagtaggactaacattgtatcgagagaataataaagagatgccaagattcttctctagaagtttagatccaaaggcattgtggttcaaaacactatggacttctaccatttgcgtcattactttgctttaacgttccattgaatggagcaaattattgattcatacaagtgattaattaaaaaactaattgttccgacatgcaggtattagcggatacacaaatgcccgaagagcctgatggatggttccagggtacagcagactctgtcagaaaatttatctgggtactcgaggtagttgatattttctcgtttatggatggccattcactcattcttgtagcattgtttctttgtaattttgagttctcctgtacttatttaggattattacaatcacaaatctattgagcacattgtaatcttgagtggcgatcagctttatcagatgaattacatggaacttgtgcaggtatggtgtgctcctgttcctcatgtttctcatttgtcctgattttggattaaccaactatttttgacatgcattatttccagaaacatgtcgaggacaatgctgacatcactgtatcatgtgctcctgttgatgagaggtaaatcaattgtttatatcatcctaatatgaatatgtcatctagttatccaacacaagatgcacatggtctaatctgctttctttttcttttctttgggaagccgagcttctaacaatgggctagtgaagtgtgatcatactggacgtgtacttcaattttttgagaaaccaaagggtgctgatttgaattcgatggttagcaattccttgtgtaatccaattctgttgtgttcctttctttcttgagacgaaccaggtcttttagttctttccatggatcatctgttcctggcttatctagaaatgattatctattttactgtaaatctgacaccaaagctaatagctactgatgttgcagagagttgataccaacttcctcagctatgctataggtgatgcacagaaatatcagtacatcgcatcaatgggcatttatgtcttcaagaaagatgcacttttagaccttctcaagtaattgctttcctgtgatttatttctatccaattcctagtttaccttctaacagtgtcaattcttaggtcaaaatatactcaattacatgacttcggatctgaaatcctcccaagagctgtactagagcataatgtgcaggtaagtctgatctgtttggagtatgtgttctgtaaactgtaaagttttcatgtcaaaaagttgttcttgtttcgagacaccactagtttctatttataaatgtacgatttatgtatttttgcttccatgcatcatacagactaacaatacattttacatattgtattagacatgcattttcatgggctattgggaggatgttggaacaatcaaatcattctttgatgcaaacttggccctcactgagcaggtattctgtcatatatgtattctgcactgcatatatattacctcaaattcaatcaatgcatagaacgtgtgttagagcatcttagttccattttattgtgcttcagttaactttatcatctaatagttggtgactagaatctaaacacaaattcacctaatatgtttctctcttcagccttccaagttcgatttttatgatccaaaaacacctttcttcactgcaccccggtacttgcctccgacacaattggacaagtgcaaggtataggtcttatggagcacaattgttacctcagaacaggatgttcgcatacttgaagacttgtttttctcctccacagatcaaagatgcatctatctcagatggttgcttactgagagaatgcagcatcgagcattctgtgattggagtctgctcacgtgtcagctatggatgtgaactcaaggtacatctctgccaatgtgtatgctgatttttatacattctcttgcatcaaatttgattcgagccaccacaatcagtgcaactgcaagcttctagtattgatataatattcaatctgtttagcacgtgaacacctcaattcttgttgttactgtacatcccacccaatcccagaggcccagattaccacgacatgaatacaagaagaatgttgaacccagatctagagtttcttctgtttggtggtactgttgcaaattggtggtgattcattttgtttttgcactttctgataacaacaggactgtgtgatgatgggagcggacatctatgaaactgaagaagaagcttcaaagctactgttagctggggaggtcccagttggaataggaggaaacacaaagataaggtgagtattggatgtggaacaacattgtatatgtataacgaccggtagttcccaaatatcacactcactgacacctgatggtatcctctgatgatttccaggaactgcatcattgacataaatgctaggattgggaagaacgtggtgatcacaaacagtaaggtgagcaagcgcacctacatgggcgcagaaacttgtgtgctcatctatccattccaatgctggtgtgtgaccatgcgttgttccactctttgtgacagggcatccaagaggctgatcaccctgaggaagggtactacataaagtctggaattgtggtgatcttgaagaatgcaaccatcaaggatgggtctgtcatataaaccgggtgcctgtgcgcctgcaaaacaagaacctacaatggtatcacatcgatggatcgtgtaaccttggtagggaagagccgcttgccagaaagtccagcgttcgggcgcaagatgcatagcctggcatgctgttccttgaaccttggtacaatgtactaataagctgccctggaagttgcagcaaacaaaccttttatgaacctttgtatttccgttacctggtttggattaactctatctttcatcctgtgctactaaaatttccgtgtttttctaatttgctgctgcctctgggatctggctacgatgaccgatgaactcctgtccattggttcagcacttcagctctgctcgttagaagcaaaggaattcagccgtgtctgtcgtcctcggctcctcgccatacgctctttttgcagagtgtagcgagttcgcatcctcctattcccacactcggcccactcttctccatgtcgatctcagtcgttggcttccatgcagacaagctagagcagggcatcctttcttctgccgtggccccgggataagagtgagttcccgccacaatgcgttcccttcgatgcctcgctctacacgggatttctggcatacgcgggcagtgtgtgccagtgtcggactttccatccgatcgaggaccacggaatcgatgaagctcatgcctgggtggttctgtgcttcttcgcatttagtgcaaaaggtacctggaatcccggggtcatctcggaatgaggagcatccatgtgtgtgtgtttag

SEQ ID NO: 4315 - DNA, 6455 bp, Sorghum bicolor
gtttcaagctctgacctacgaacagaacagcgagctgggtccagagcctcttgatttggtccctgtctcctatcgtcacaagacatttacaattcctcgaacctcggttctgttccagcattcaaacgccaatcatcattttcttttttttaaaaaaaaaaacttatatctcttgttttggccgtagcagatctgatcctgggagtctgaagaggtcgcggtagaatctgaagccgccctcgatctccggcgcagcagcagccacccgtgtcttgcgagccgtgaccgatggagtcaggctagaaccgagcgcccgccctgcctgatctcatctcatctggaacaaggacggtgacgacggcgcgtgcagggcatgggcgcatggccagccgcagccggccgggccggcggggaggccgccgcgcctcccgtgtcccgtggacggacggacggacggagagattggggggatcgacatcgattccaagcggatggatgggtgattggacgacgaccggaggacgcagacttgcagagcagagcggggtggtggcgtgggggcccggcgggctagtccggttgcggcagttgggtcctccggccgaggtgcggacaagcacgacgcttccgcccgtgaccgttgccatgtgaccccgggagagcacacatgcggacacgcgtgatgccctcccagcatcgccggccggccggccggcccccgcgcgtggacgctttgctggcttttggcaaaatgactgtctgccagaggtgccaggactgacggcaacgcatgcatgcgcccatgccgatgccgatgccgctgccaccgtggtggtgcgtgtggtcattcctggccacgtatgaatgtgcctggcttgccgcgggtattccacgctccgtcacttctttctagccacacatgctcccggctgctgcatcaaactgagttttgcctagtgtatgtcattccacacatgagcattttcagtgacagcgcctaaaaagctcataaactgagttttgcctcggtcatgccatggcccaggctcacggagtcatggacacagtgaataatcgaatcggtcgcccacatgcctgcctttatttggttcctgcaacaagattgtgcgctggccacataggcatggctgtactgtacacggtacagcgtagccatggcaatgccaggagcgcagtaatgctccttacaattgaaaagaaaaggcagtgctggatgacctatcttgcgacctctgtacggagaatcatgcaaagtagtagtagtccgtatataactattgtaacatggcacgtctgcacatgccaatggatgctagtccagggctccaggcaacgttacccatgagccaggcaccacttggacaccagtaattgtggtctttcaaagaataaaagataccggtagttgtaatttgattcggtttacctcctgttttgttggtgaactccacgaactcctcgttcggaagttgtaataatctcctggctctcaatgaaatttctacagagcctcaatagccagaagttcagtactcctcccgcacactgcttgtggtacgccatgcaaacactgcagtggataagtgtgtacaattattttgttctggctaacctctaactacaatttcaaacaaatgatcatcaatgctacaaacaggaatgtccataaaaagaatgccgggctaatccctcacctaaaggaaaaaggccaccggcagattctcgtgtaatagcacaacaaaggaaataaaacagcgctacaaatgactatggtgatgaagaaaaaggtgaacactgcaacttcactgtgcagatgtaagactgatacacatgtctcccttgcgtgcacgtgagttggggccacatatcccaatcattttccatttcactttcacctaaaatcctgacaaacgggagcatggccggctctggggtttgctatttaaaacccctttctctctttccctcctcacaatcacaggcctcccgctctgtgttctctatctactacccagcacacaatacacactctaatctccacacagccagtagatacggacagaaggatgaagctgagagcaaaaggcctcggcctcctgcttctccttgtcctgcttgctatttgctccaccattgaagtcagcgaggcgagaagaggcaagcattggcggtcgtcgaggagctcaccaggctcctctcagctcaagaaaggcaaaggaaagaagagcagctcccgccggcaacacggcagcaaccggccaagtccgaagccaccggtcagctccacgccaagctctggtgctggtaaaggaaatcagaatccataccaaccaagcccgaatgcccctccaagccctgccaatggcagtaggcattccactcccaagctgccgccgacttcaagctgtgggaagggtcatcaacagccatcgcagccgccaccagcaacctcgcagggtgcagtattcaatgtggttgattttggagccaagggtgacggagttacagatgatactaaggtcaatagcttctttgccctgcaaatgctctgtttcaaacaaaattccattataaaattgtcaagcatcatgcactatctgagccagaaatctcaaaattgcaatttcttccgtgagtttgcgatttagatgctctgtttcaaactgatctttgcatgactttcatgaggacacaatgatgtcgatcacctccatccaggggaaatgtcgtcccaatgacatcttgagatttgaatttgccatgcatattttcctctcccgaatgcttagaaattggaatttagcatgtaatgctagcctgaattcattttgccataatcaccacagcttatgatggtgagcttttcaatgtgcctacgatcataccagttttactctcactgtctcacatgatctgcagtacagagcctgaaaagttgtcaccagcgccctatttttctggagtcttatttgcatgtttgcatgtgtttcgatctgttccctgtttggcttgttctttccttctcacatgattgttgcatatagcagcataatcagatccatttacacatctagctggccaagtttttttttaagtcatggtagagaacaaagtacaccaagcaagtcaggatatacaaatgcagaaccttttccacagctcttacaagacgtttctgtgtacagagaaaacaaacaaaaccaattgtaatatgagatacccaggctttacaagataagagaatagcgaactttctctctatggcattaacagagcacaattttcttacttttgcaagaacacactgcatgaaccaataacaccattttttttgtttttattacaaagccaaaaaaacaaaaaaaacaaaaactcatggaaattttgtaccgggttaataacaagaaaataagccatacttaacaaagttttccaatatgcaccgtctcattgtctgaaagctctatcgatcctatataattttttatattttgagtaacttcaatttttttgaaaggaaaataacttcattttttacagtttattttgtttttgtgtggtcataaactggttcttgttttggcacagtgaccaaaaagaaataagacatagtgcaacagctgactaccctgcttagggatctggattactgtgtttttaccccccccttctcagttaattttgtgatgctagattccagaggaccgtcttttcagaaatctagagctaataattgtacgtgcatttgcatacaggcttttgaaggagcgtgggctgctgcctgcaaccagggggcatctacagttctcgtaccaccagaactagagttccttgttgggccaatctcgttctctggaccttactgcaaaccgaatattgtctttcaggtaatcatgctctcccaaatgataagatactcaaaagggctttctcaacatagcttgaattgaccaacaaaaaggtcaaaaagtaggacaggactgtatttaatctaatttgagatgcgcaccaatggaagactaagttcattgagtaatgtcgtttaatgttgtactcactttgcagctggaaggaacaatcctagctccaaccagtgctaaatcctggggttctggcttgctccagtggctggagttcaccaaactaaatggaatagttattcaagggaacggcattataaatgggagagggcaacagtggtggacctacttagacccagaggatgaggatgatgatgacacggtgagagctggccaccaagtgtataattttctattaagtactcaaaagaaaagttggtcatgttaagtgcttactttggatgctttcctgcagtacgatgtggagtttgaaagaatgccacagattaaacctacagtaagaatcactaatgcacactattatcataccatactgaaatgaagtaatgaaactctgatttcatacctgatgcaggcattgaggttttatggtagtttcaacgttgtagtagctggtatcactattgtcaacagctcacagtgccatcttaagtttgacaactgtcaaggagtgatggtccatgacgtgactatatcctcccctgagaacagtctcaacactgacggaatacacctgcagaactccaaagatgtcagcattcatcatacaaacctggcttgtggtaattccttaaaacttactgtatatctcaattcaagaggcatctaggctatattcatgaaactcaaaagttttgttttgcaaagctttgcaacaaagacacatttccatcaagaacactaaataaataagacaaaaaaaatacaaagaattacctagggtcaaccgaaagcctgcatctcagttctgtttcgcctgtatactctgcacgtcaaaggacatgtttcagagttaaagagtacactgaaaaacttctgtaaagtagcataatccttttgtcctattcgatacaggtgacgactgcatctccatccagacaggatgcagcaacataaatatacacaacgtgaattgtggaccaggccatggaatcagcataggtggactaggtcgagacaacacaaaagcatgtgtatcaaatgttacagtaagagacgtcaacatgttcagaaccatgaatggtgtcagaatcaagacctggcaggtaagcttgagaacataagtacaaaaaaaattcttattcaacatcagacattagtacataataatatcacaatagaaaaaactgaaaaaggaaagaatatgtatatgtcaccatttgatatctatacaagcaataaccttggaaagttccaagaagaaaaatgatgatgccagccaaaacaacaattcctactgagctaaacaaagtgaaatctcatttctcgcagggtggtgtaggattggttcaagacataaggttctcaaatatacaagtctcagaggttcaaacacccattatcatagatcagttttattgtgacagaagcacttgcagaaatcaaacatcagcagtggcagtatcaggagttcaatatgagaatatcagaggaacatttacaatcaagcctgtccattttgcatgcagtgacagcttaccttgttcaggaatctctcttaccggtgtgcaactcagaccagtgcaagtaccccactaccacctgaataacccattctgctggcaagcttttggggagctctacactccaaccgtccctcccatagcttgcttgcagattggaaaacctgctggcaataacttacagtcatatgacgacatatgctgaaagtgcctttgtctgttgattggtgcttatccatgagtggtcgttgtgatacatgcgaccccatttgcaccattgcttgttgatgtgcacatatacagatattttgaggtcatcttattacaacattttaactttttcatcaaagtaaacataaatatattcatccaaaatggtcatatagcaagagtatgtacttgagttctccacaatgagtaaacacaatgacaaagattgtttgtttaaataagtgtaaacagggctacagcaaagggccgaaagataattgataaacaacagtaaactgcagccgtacatctacaatattgatacctaatcctgaagagtgagattaataattagaagtcgattcctaaaggataccaaccagaaaaatctcttggatcaaatacgaaaagaaaatgattgcttgaagaaactagagaatggttagaaaaatgagtaaatgtaatatagccagtttctagttaaccaatatgacatattgcaatgcacaaatatgatataccactgttaacacttagcaaagggggtattgatgggtatagctgaaataattatgaaaaatggagataaaaatgttctataaatatgcagaaagaggaaataactaataaaaacgtggtatttagaaattaattctgatgt

SEQ ID NO: 4316 - DNA, 12940 bp, Sorghum bicolor
aattaaatgtgacagcaccaattaaccaccgaaccatccgtcccggtgatcaataaacggcagccacatcttgcaccgaccctgaccctgatgactggtggccacaatatagatagatgatatctcttcggggccaagaaaagctccaattgcacacagagatgtcaatttcttcgggaacgagaatgagatagtaattagatcaattttatcctcacgaaggacttaaagatagccccatcaggtatgacgaggatgggagccatttcccgtccccatttcccgcggggatcaaactccccaaaatcacagcagcttaccgaagttcccaacccattataacatctgatcactgtggaaagagcgttgtagaagaacttttgacaacagaacgtaaacaaccgcactcatcacaagttagcaagcttaattcaataagacattctactgtatagagcgatatcatgtagataactaatctgtatgtaaaggcaaagtgctgactgcaattgtggtgcagttttttccatcgccatttttcctcttttttttttctgtttttctgggaacttttaaacgccgtgtaaatttcgttgtagccttctcctccccctccccccccctttttttttctcaagtgttgttgtagcctttttcacatgcaaaagccaaaaggcagagagcacctgctgttttcctgctaaagaaaaagaaacagccgatcactagcaagcccacagtcactagcccacggcccaccaactgtaacggtaggcgtccctgcctgccaagtcatatagtttctatactcattaaattttatggtcctaatggatagtttctatagaatatttttatatccaatcacattcattctctctttattcttagccaatcatatcacttcatgtcttggattttgtgtagacatagtttctaatttagacccagtttctatgatttttactctctctcttcaataactacattgacacttgagcaaaatgcttaggtggcactacaattaatgtctatagaaattatgatagtttctgcattgggagtgttctaatcccgccgccggccgccgcacaccgcacagggagaccggagaaggaaggatgaggggcaacgcaacggtgatgatgcacagaggattcagattcgcgtgccgctggcgacagcgggatgacacgcacggcgaacggatggattcgatcgactgtcagccatttatcataataaattagagaatagtaccttctctcgtgacttatcagccagaaatgtacattcgtgcttcttcattttcttaccatcaattcacgcgcagtagagtaattcaagctagcccgtctctctcatagccaagaacaacagtcactagcttgattccgccgctcttgtctcggcactccggcaagcaaacaactgacagcaaagctccctcgttttcttctgcctgcgttcttcttccaagtctccatctctcgtgccaccgcgcacaacggtccaaacggctccctcgccgcagcagcatcgcgtccacacaaactgcacatccaccagatacggcggtggtgatccgatccagcgtcgtttctcgacgacgacgccgccgcgcgtttctgcacccacgcaccccgacccggccgcgcgcgcgcctgaccgcccgtgtggtccaggggacgccgatcggcgcgcggccgtcggccacacggtgcccggcgcgcgttatcctgggtgccgcgcgcggcgagggaatcgaagcgagtggcgcgctggcggatgaggcggcgagtggcccggatgcaccggcgcaggcgagccgcacgccgccgcccgccgcggcgctcgcgcgcggaccgctgccgcctgccgccacacaatgcgagcgcgcgcgcacacacacacacaccacccgggcgggggggctgtagtagtaacggccttgtcttgtcggcacgcgcgcgtccgtgtgtataaggaggcaggcccgcagcacagggggcaagtggcactcgcgcacacagcacaattgatgtccgccttccccgtccgcggctccacgtccagcagcagcatcgtcgccagcctcggcagcagccgcgcccccgcccccgcgccgtcctccgtccgccggcgccccagcctcatcaggaacgcccccgtcgtcgccgtccccgccaccctcgtggtacgtacggagtacatgcatacaccaatgcgtgcatggctcactgcaccactgagcgcatgcatgcatgtcgtcgtcgtcgcttctgctatctgtccactcactcgcttcatctagctctcggcgtctccacgaaatgctgcaccatgcaaaagtgcttgctccaattacacctaggaggttggtagtatggaccatgcatgcaggatattaattctagaaaaaaccaaacaaaatccgagtccaacgcaaggattatttcaaccaaaagtaataatgcacctcgccacgtctatatagttttgctgcttcgttgcgctcctcaatcatcaatagggaaaaaaaaaaagtgcgtgccagccacgtatagtatgtcctccataagagtatggtacggtggaggggcaccgcacccttccgggtctaccaagagctactaacgccaggtctgcaaatgcggcataccatgcatgtatatatatagtataatctcatgcatgttctccacttattttggaccaaaaatcatggaatactataccacttccgcccatcttgaaaagatgtcattcttcttaactctaactatcatttatcacatcaaaatggatatgctattaaaatatacttcatggtgaatctgattatgtagtataaactttggtattcttttatatccaatttgtcaaatttaaatcactttcccatcatctagtagccagctatgcaagtcaaccatctccaatagaatattccggaagggaggtgtttccaaagagatcgatggccaatgatagtgctagtttgaagaaggcaaccactagatgcttgctttcaatataacagaatttccacaaaaaagtctcgagtgtggaaagaagaaaaaagctccaagtacacttgtttagtgatatcgcgagcgtataaaaaaataatatagggctggcttttccctaaagcgataagaccagtacatgatagctacagttagctaggaagatgtcgaagtctcgaagagctaatccgcgcgcgtcttttggcttttgagttccgtttgatccatggcacatccaggtagaggtatagttcaataaccgaccatcaataaagcgctactagtgcccatcaacgtcaatttacttttttttataacgcccataatttcctggtttgctttaatttggtcactgttgggtcttttaggctagcaggagaaaaaaacttctttttctttgttttggaggaacaaaatttttgcagcatattgaatcatcagggacacgagttaattaacggtttttctgtagtaaactttggtagtgataatccgcaaacttgtgaggctatagcagtatgtacgaggagcgaggccagattttcgttgcgcgacgcgacatctgacactgatctgatgcgcgcaagcatgacaccgaccgcagtaccggaccacggcgctctgtggtacagactgtacagtacagtacagtacaaaacccgtagctgccatcagataacgcactagataattagatgtgcggaaaagggaagaaatagtaaaaggagctagcacatcattaaatcgaaataagaaacaaatactgtactccaaaagggtcgttccggcatccatcgatggttcaagtagcagcaaccatactgtacatgtatattcatatttatatataggagtgcatgattagccgcgcgcggttcctcattagcacaccaacatgatggggtaagcaacaaattaagcacggcagcgaatgcccggattaggaacgcacatcagggaattgaacagcaagctttcgtcttggctggcatgatgatttgatcagcccgctccaataatttaggaagagaagtggcacgatcctgacggttggtatgggtgtgaagggactaatttaagcgcgccgcgataagcaagattcccagggccgtgtgccatcgcctgttggcgtccgatccgaagctggcagaatttgctactagtcgacagtccagactccagagggcggaccgcacgtagccagcctatctatactagtgcagatctgaatgatcagcgtgccagcgtccttggatctgggaaccgatcgaaacccctgcgagggacctccttttcttcggtccagttgcagaattcgttaatcttgtctgggaacgagaaccctcttggggaaatactaacgttttcttgcggtgtcgggaggagctagctagggagcaaaagggaaggatcgcgctcgcgcagatagatggccacttgtttgtttgtgcttggtgtcccgtacggtacccactgcaccgcacagatcgtcagaagattgctgcctcccagtctcggcctcaaacgattacgagtacggagtacatgcatatagtaccacctccgtttaatttatggcccaacattacacctggtgggttggtatgccaatgaacgtcagcactcctgattgttgcatataatccactaactaaatagacttaaaataaaagtttagcacgagcgttcatccaattcataaaaaagaaaagaaaaactaggatggcgacctcacattgtatatgcgtcgtccacaaaagccgctctcagccgttaccgattttttctgaacgcgcgcgttgcatggtgcctttttctcttcactgacacaattgcacacgtcatgttgctagtaagcgggaggacgagcagctcatcaaaagtcaaacgagagagaaagggagagagggccacaccacatccattgatacgggaggagagacgaaagaaaacacaaggagatgagcagttgcctttgcctccctaaaaagaaggagggccagggggcggcagcgaagccgtccatagattcaaccacctcgacagtcgttcagaacccgaagcctacccaacctccacctcctccctccaaggtccgtcctctccttctcctccttcctcatctcctcccgcaccctccacaccatcctccaatcagcacacacaacaaatctcctcatccattcctctattttctttttcaccattggcatcagtagccactacatgcaacttccactttctctctacgtagttattgtgtttgtgcaaagaaagatccatgttcctttttttttaaaaaaaaatcacctttgtgcattcttttcgtgtgttcagtgggccggcaaggagggcaaaattgcatcatgccccctcctctctctctctctctctctaccccttatgctgcatcacaatcacgagcatgcaagtcagtctttctgaggatggcgaactctgaccgatcgacgatgtttctctgttgatacataatgcagggcatggacgccgtcgagcgcttgaaggtcgggttccagaagttcaagaccgaggtctatgagtaagtcattctgagctgttttctgcacagcacccgcgtctgatttaatcgtttcagtttcagcctcatggtgcttgatttcttttgtgaattctgcgagctccaactgatcccgtgccccctttgatttattttttcgcagcaaaaagccagagctgttcgagcctctcaaggctggccaggcccccaaggtatgtgctactaccatactgctttctcttcccggctcccttgtacgtttttttttttttgtctctagctagccactcgcaacccctgctgcactattcatcatccaccctgacatgtccctgggtgcgcagcgcaggcagcattattttcgccggccagtaacgaggtcaaagctgcactagacaaaagcaaacggattgtcctataattgcacggcttgtcggcattagcggccaattggctagcagtacgtagtcttgttggataataactagtcctgtaattgtgtttgtacaattctgctccatgcatgggtcccgtcgaggccatggcgcaaagaaaatggtgtagtgggatgcatgcataatccttcgcagctcccacccggccggccgccactgcgcgcggaacactaacgacatgcgcgctgccagtgcatccccatgtgcaaagccatacgccctgcatgcatgctaggtggtgatttgcatttggttggtaaattattgagatgccgccgtccctccgtatataggctcactttgcagatggcggatatagttatgttattatattgatttttccttgagtttcctagtagtataacgtggtaccagaatcttgcaagtacacagtttattgttttttatgggagttttgagctggcatcgatcgatcccatgcgcctaattttatgcattcatgcatgatgatgtaactagctggggttctactagttttctttacccataaaagttcggttactagtggtcaaatattcattgtagtaaaggagcgaagataaaacatacattaatttgaactactcctatagtatgatggtcaattccaccttctagccgtgttgaattcttttttgaactgtacgtaatggtcacttccatcattactacatttgaacgcccatttcagatgtctcatcattttgatttttgtttgacactcacatacacaacacaaagagacgtgaaccccaagtgtaggtgtgtattagcgttcatcattccatgcctaatgtgtgtgtggtccacccatgattgagcacaggccccccaccactgctgtgatacattattgctgaaactatcgtcgaccgaccggtgctgtacctgtacgtcctgtggttgtgaagcactggtccgtcgctcaccgcacgcacgggattctttcttcatcgtgacttatgccttgttcaagttcccaccgaaatccaaaattttttcaagattccctgtcacatcgaatcttacggcacatgcatgaagcattagatatagacgaaaacaaaaactaattacatagtttgcctgtaaatcacgagatgaatcttttaagcctagttagtccatgaatagataatatttgtcaaataaaaactaatagttggattgaactgtcttctctcctgtcctctcacacaccccttgcaaaagcagttaggcgcataaatgttgggcagggccaggtggccagctttagcattcgcatcctcgaggaatatatgctctactactccacgtctacagtacagatgtctcaaagttagtggaaggtgattgcattacgccatgcgtcttaatcgcatttgtagcatggatttggacacccacatctcagggccggctagataaacccgtcacgtgaaattcgttctcggttcattcattctttcatgcatgcatgcatatatgctagcctagctagctcacttcgcgtgccaacttgcccggaaatattcctgcttggccgcgcgccgggaatgggatagatgatagtagatcagcgtgttgtttttcttggccgctgatcgcccccaagaaccacacggaaactagcgtagaatatccttgtcgcaacgcaactactcaaaagacgtaccagctggcgggtcaaacctcaaaagttgccgccttttggttttattttaggtctagtcctccactgatctgcctacctgcttatcgataagagagagccacgggaaaccggcctgatggtgatttccctcttttcggcgagacctgacggtgattttcctctgcagtacatggtgttcgcctgctccgactcccgtgtgtgcccgtcggtgaccctgggcctgcagcccggcgaggccttcaccgtccgcaacatcgcctccatggtgccaccctacgacaaggtatgcatacacagacgacgtccaatacaatacgttctttttgttctcacaatctcacgctcacgcgctcgttcgatcgcctttcgttttgtcgtcaatctgcagaccaagtacagcggcaccgggtccgccatcgagtacgccgtgtgcgccctcaaggtgcaggtgctcgtcgtcattggccacagctgctgcggtggcatcagggcgctcctctccctcaaggacggtgcacctcacaacttgtaagtcatcactttttttttatttatttatttcacggacacacttagcttgaagcgtgtgttgtatttcattaaaccgaaatgtatgtaataatcaacgtaaaatgtacgtacaagcagctaagtttcattcggaacctctttgtgtgcctcgtgtcatgattttttttttgaccctagcatgatgtctctgtttggtttggtggtgtatgtatccagccacttcgttgaggactgggtcaggatcggctcccctgccaaggcgaaggtgcacaaagagcatgcctcagtgccgttcgatgaccagtgctccatcctggagaaggtacgtacaccgtatgtacacgcattgcatgaatgcaatgagttgattttgctcacaaaagggaccttgtatttttctgaatgtttctgcaggaggccgtgaacgtgtccctcgccaacctcaagacttaccccttcgtcaaggaacggctggccaaagggaccctcaagctggtcggcgcccactacgacttcgtgtccgggaagttcctcacatgggagcctgtagggttcataaccttcatccttacattttcaattgtacatactgtatctgagaccacatggttttacctcctggcacactccagatccaaacttcctatccattttctctccttccttgccatcgcaattaatttctttctaagaagaacaaaatcaccaccaaatccaaccacaacacttgaaatccgccccatgcatagcacttgaaaccagccccaacatcttaattgacctacttctcatcttcttcggatataagaagattgaaccctatctccaccgcaaatacatatatcgcgttcacccgctacaaacttctagtccagttgtcgcctggtcctctatccgcttcaattaggcttgccgttgcatcgaatttctaacctcgttggtgcaccaggctcgtctgtggtgatggatatgaggccatggccatcgaggtccatctaccacaaagatgccactgcctttttccatggccaccatggtttgccgaatcagttgtcccccgaggaagcaatcatcatgttggagtcgttcttctctacaaaacgtgctcaagtagccatcgacattccgcttaagcgatatatattgtccacaaaagctgtgcttgaccgttactcatttttcatcaaatcccgcgttgtgcggtgtctctttctctcactaaaacgattgcacatgtcatcatgttgatgttgctagtaatctagacaatggggcagctcaaaaggtgaacgagagagatatagagagaaagggagggagggagggccacaccgcatctatccatctgactataagggggcaaaagaagaaaagaggagaagatgagaagttgcatttgcctccctgttatatatcaaaggagggtcaatgaagccgtccatagattcccacacctcgtcactccttgagaaccagaagcccaccccatccagtccaaggtccgttccctcatcctcctccctcaccctcgccatcatccttcacatagcacacacagtaatctttgtccgtccctctgttttcttttcctctattgccatcatgagcctgcaacttctgctttctccctatgttgtattgtgttggtgcaaagaagatccatcttcccctttttgatcatattttatgcatgctttccttatggtccgtggcaaggaggccaagcattggcatcatgccccttctatctctctctaccccctcatgccccttctctttctctctctacccccgtcatgctgcatcacgatcatgagtatgcaagttggtctttccgggatggcaaaatgaccgatggttttctggttgttggtcttgtaggtgatggacgccgttgaccgcttgaagagcgggttcgagcagttcaagatcgaggtctatgagtaagtcatctctctacttagagctgttgtttttttaatttgtagcacccatgtttggtttaatattttcagtttcaaccacttgatttattttgggaattctgagagctccgactgatactgccatgttgtcttttttctgcagcaagaagccagagctttttgagcctctcaaatctggccaggcccccagggtatgtgtagggatgaaaatggatcaaatttgtatagaatcaaatccatatatcacctcttaacacatttttattcaaattcagttattggatacatatacttttgaatacaaatataaaacaaatgtcttgaatctgtatttctattcaaagatttactcaattcaactcaaattgtatattgctaaattcaacgtacatgtatacaattttactactaaattcatcgataaaccttttttgctttatcaattttttaggtttacaaactattatattgaaacatttgtgtatataatttaaaatgaatggtgacagcttgtcgccattagcggccaattggcaagtactagtagtagtctgttggatataatccctccatcctaaatatatgcagaaatcatctattgaggagtaattctttttttcagtttaactaaaagtataatttatttcgaaaaaatactaaatgctcaatctaatgatatttattatacactataaacattaatatatttttaatataaatataattaaaatttaaaaatttgaagtttcataaagcgagatgtacagttattttgggacaaaagaaatagtcctataattattttgtactacaaaagtctgctccatagggcacaagcttcaactttggcactactagtcataggctcattgcgcaaagaaatggtggtgggagtgggatacatacatgctccttcttttcccgatcgatcgacctgatgctgattattttcctctgctgcatgcatgcagtacatggtgttcgcctgcgctgactcccgtgtgtgcccgtcggtgaccctgggcctgatgcccggcgaggccttcaccgtccgcaacatcgccgccctggtcccaggctacgacaaggtacgtacacactgaccgtcgtcgccgacgacacaaaatggccgtctatttctcctcggcccggccggccgccgccggccgggcatgacagaggatcgaggactgacacggccgcgcctttcgtattcgtcacctgcagaccaagtacaccggcatcgggtccgccatcgagtacgccgtgtgcgccctcaaggtgcaggtgctcgtcgtcattggccatagctgctgcggtggcatcagggcgctcctctccctccaggacggtgcacctgacaacttgtaagacgccaccgtaaaatatacaaagtttcattaagataaaacaaaaattcttttgtacctctatgatgattttgatcccagcgcatttttatctgttgttttttttgtggtgtatccagccactttgttgaggactgggtcaagattggcttccctgccaagatgaaggtgaagaaagagaacgcttcggtgccgttcgatgaccaatgctacattctagagaaggtatgtacaccgtacatgcacgagcagttagttgctgcatgaatggattaatttttgctcaccggagaaccttgtatttctgaaaatgtttctgcaggaggccgtgaatgtgtccttggagaacctcaagacctacccattcgtcaaggaagggctggccaacggtaccttaaagctggtcggcggccactatgacttcgtgaaaggagagttcctcacatggaaagtctagagctaaggcacccggacggcccaactcctacatcatcataaatttataccacatatatacctaccgatatgcacccgatcgatgcgaatgcgcggagtactacatgcatgttttcagcaactacatatatacataccggatcgccccaatgtgaatgtaataagcaatagcattttcaaccgctttcatttctaacgccgagcttttatgtactatatatataatatgatgcataattgaccggcttgtggtcaaaagacatcaactataatccttttttcataatattgttatgaagagtttacctcttttttttgtcattaacggatccagagaaacaggccaggagggcaacacgccaacaccctccgtcctaaaatagagtgcattctgacatttaagatgtgtcccaaaatatagtacattcaaggaacatgaagataatatttacttaaataaagttacggaagaggaaagtaattgagtgcttactatattttctataagaaaacttagattgcaacctttaatcatacgaataagatcatatttcaatatattagaaagttaagtgagtagtacatgcgtctattgttttttctctctctctcttattttgtcttaaatagccataacgcactgtattgcagagcggagggagtactttggaagcatcaagagcaaaatccaaggatggaaagccccatatgaacaactaagatgataactagaaatcatactcgccatacacgagtactttggaagcaagaagagcaaaaatccaaggatagaaagccccatataaacaactaagatgataaccagaattcatactcgccatacaccaatagatctaacaaacagcactcaattcaaaatgcttaattagacaatacatcattaatgatagaaaggtacttaataaatagcttccgataattaaatgatcaaat

SEQ ID NO: 4317 - DNA, 3082 bp, Sorghum bicolor
aactataccatttgccctcatctgaacaaagatacttataacttcaccaacatgcgcctactcaagaaggaaacccatcatcattgtccaagtaacaacattccgaaaaataattttcctgaaaatctctcttcctatctcaatatcccaaaaactcaagtacatgccaagtattgagtttgtcaccgagacatccaaatcaaagccgatcttaactgcataagcatgtacactcttgcacattccagggtcaccacaaccagcatacgcttgagcgacattaatcacggtcacaacattattaggatctgacccaaaacaacaacacaacctcttgaacgccaatactgcttcctcaaacaaaacattgtgcactaacccggagatccctcaaaccgctgaaaaacgccaatgcatccatagggtgcccacatttcgcatatgcatccaccagtgcggttgcaacaaaatgattggattccatcctactctttgctacctacccatgaatgcactcggcaagcggcatcacccagcccagctgccgcaagcaacacaccggccaaggtgaacagagtttgggcacacacctgccctcatcatgctgacaaacagcccagctgactcatggaataacccactcctcgcatgccgatagattgccgccgagcaggtgaccacgtccctaacaggaacttcgtcgaacaggctgcgggcctgggtgcgatggggtggcttacgtgttacgtcctccacggcattttgccgaacacctaacccgtgcaccatctgacctcgaactgaacccaaaaaccccaacgcgcagaggttattaaacgcaatgaaattgggcattcctaatatgttcctagtaactgtgatgttccagtgcgcgaatctgttttgtaccttcggtgacggtgccgaaggagcagaaggcgtccgtgagggagcgctcgtccacggaccacgacaaccctgcactagcaatcgataaacagaggcgtagtacggtgagagctatgatgcaatcgggaataatatgagactcgacagacgaggatgcgggagagcagagcgataccggcgccgaagagcctggagtcggaggtcggcggcggagcgccaggaggcaactcgtcagatagtttggcagcagcgtcggagagagagcgtcgcaggtggtggccgtcgtagaggagaggggcgaggcgcaggcgggagatcaagagcacctgaggcatcattctggcgagcggcggcgtggactggttttactggcaaaagcttatatcgtcaaactattactgcgtcaaaaccaaaataatgttacaattttgtatgaattcaaaacgagctgtttaaattcattcgagaaaagaaatctgttgagaccatcatatttacttttttcacaaactgaagaatacggtagcagctcttttctttgagagaatggtagcagctctttcaatctgctgactgcttttacgtgtactattcttttacctctttccatttcgtgatcgcaagtgctcttctcccgccagcgggccttgtttagttcacttcgaaatcaaaaagttttcaagatttctcgtcacatcgaatcttacggcttttgcatgaaacattcaatatagacgaaaacaaaaactaattacacagtttgtctgtaaatcgtgagacgaattttttaatcttagttagttcatgattagacaatatttatcaaataaaaatgaaagtgctaaataaaaaaattttcggaagtaaaccatgttcgttgctaatccctctacttcgaacagctgtactgtgccgttcggcgccacatgtcgccgcgcatgccacgcgcccacgcagcactgcgggcgccgccacacgtcgctccgactccgaagcccttgcactttaaccccatggaggctggatccccccgcccgccatcgcccagcgaccaacgaactctccccttccatccgctctctcgcctcgccatggcagaccggccgccgctcgggccacgcgcagccccgcccagccccaccgccgcccggcgcggccacgcgtcggcgtcggcggagcgccagcagcgctcgctgctcggacgcgccgtccagacgttccaccacgtccacggctccaccacccagctcctgggcttcctcgcgcttgccgtcaccctgaccgcgctcctggtcctggcgggcgtcacgctcacggccgcgctcgccgcgctggtcctcctcagcccgctcgtgctcctcaccctcccgctctgggcgcccgtagcggtggcggcgctgctgacgggggccgtctcgctgatcgcctgctgcgccggcgtggccgccgtcgccgcgggcacgtgggcgcaccgctacttcacggggcgccaccccgtcggcggcgcgcaccgggtggagtccgccgctgaccacgaccactacgcccgcgggggcacggtcgcggacgtggccagccgagtgagggggtactacgacgcctacgcgcgagagtacggcgggtacccgccgcgcccgcacgctcgggtcaaggacgccgcgcccggggcgtagcgtagcccgtgtgccggcgcggcatggttgatgaatcatggggcctcgggactcgaggtcggatcacatgttaatttttagctgtctttttttttttgctcgtgctgttcatatggttcgtcgttgtagcagtcgtgtttcgctagaagcggtatggccatgtaatttggatttttaaagggtcttgacctatttcttgttttgatttttgaacggacttgcatttacagtttctatctgtatagaaaaattcataaaaaaaacttgatattaacataaaacaacttcatctatggagctcattaaaacatacaaggtgaatgagagatgtagctgaaatgtatagtaggttcgcccagctccaactcgcaatggtgggcccctgtatgaaattttacgagagcatatttttagaagttttacatgtggagtattttgcgcaaacaattcattaacatagctctagttccaatggtaaagctgctcgtggagctaaagaa

SEQ ID NO: 4318 - DNA, 3033 bp, Sorghum bicolor
ggattgattgtttagtggtataatcaaaattccaaagttttgtagaatatatattttaaaatctactaaacaagaattataagtttgatgcactatctagaagatattgaatattgtaagttatttacgccataatcctctggaaggatttaataccatgaaggatatttttttttttggtttgcacaactattatgtggtcatttatacgtgaagcatattgctcttgattatacccatataattcatagaagaattatgagccaactttttaaaagatatagtattgtggtaccgcataccattaattaagcacatatttttgaatagtgtgatttgaacaataaagtttgaattttagcattatgaggtggagcatatttttattgaatctaccttgaaggtaaaccactagaattacaaagatcatatagatcatatttgctaaaacattgaagtttatgcatagatcacgaagataaatatttattcatgaagaatagaatatcctgaagaatatatgaccacgaaggttaaatgttatactcttcttttttctatgtgagtttttacttgaaggtttctcacacaaggtttttaatgagacaacatgtgcaatgcaatttcgaatgtgatgtactcttttctccaagaatcgtttttttctattgggtttttggatagagtttttaatggggcatgagcatatcttggtaatttcccaagggggagtgttgtaaaacatgcagacttaatcctagaaggaaaggagaatgagaaattctaatcctagtctgtttgtatgttggctcttactaactcttaggccttgacaagtctatatatacgtggaagctctatgttgtaatcaccaatattcagaggaataaagaatagtctccgtatcttgtgtatatttgtttttctactttcatctactatgttgatcatgagagacagagagagagaaaggtcccaaccgctagcaacatgttttataacagtctttgtcttcacggtcgagaggagcatgcatggactagttttgtctcacttagttatagaattatttaggtgtatgcttgttaaaaaatgtttataaatctataattaagttatacataattcagtgagtattaaatttttactatagttcaaacatacaataattagcttatcataaaaatttaccacaactggaccatagaaagtgtagctatgaattaattatagaaaaacattgactaaggctaaaacaaaaaaatgtctaaaacataccatattatatgtgcactatgtagatccactcatgtagagtcaagtaaaaatagatttttcattttataatttttatattatttactatgatgtttttaaagatttaccaaaataaataaacaagaaaaagacaaaaccgcctttgaaaattgcttataaccatcagagaggtaaaatgaacggttttaaaagtttagggaggtggtttatccggttttagagttcaagaagaaaaaatagacttttgtaagtcgaagaggtaatgtggacttttcccttttgaacattgaggaggttagatattttttttttgttttttgttttttgagcaacattgagaggttagatggaccttttattctctggcccgtgcgcgcgctaaatggcctgtttaccgctgggccaatgcgcgcgcggcgtctaggcggatgtcgcgattgtaagatactgggccgggacgggacagtggaccagactgcacagccacatgggaagcctgctctctcttccccttccggccttcccggcagttcgcgtcttcgcgatccccaaccccaacccaattccgccggccggcgctctccatttgaaattgagattcaaattctattccatacccgttccatccccttctccggttccggctcctcctcgacggaacccgtcgccgtcttcttcggctcgcacctcgcctcaccattcgccactcccgcctacgatatatggcgacgcgcgaggagtgcagcatgtccgacttggagatcggcaagtacatcggtgagggcaaggtcggcacggtgtacctcgcccgggagaagcaggtcggcccgatcaacttgtgccctccaattctctcgatcaccctaaaatttcgcctccaatggaagttaatctgcgcgtggtgatgatgatccagagcgggtacgtggtggcgctgaaggtgatattttcaaggcgaagctggagaagtaccgcttccacgcgcacctgcggcgggagatcgagatccagcgcgacctcgtccaccccgatgtgctccgcctcttcggctcttcgcctggttccacgacgaagagaaagtcgtcctcgtcctcgagtacgcggcccgtggcgagctctacaaggtccttcgcgccgctggccacttcgacgagcacacggccgccacagtaataaccccgtttcccttttgcttcactgttatttcccggttgtgtacttgtgtctacggttggactgcagttcgtcctactaatgttaacctgaaccataatagtcgaggcaaagtcacttgtgactgcaatgggtgtgatatttttaggagaaaaatacagtggggactgaggagccctctactgttacttgattaaaacaaaactaggatgaaaaggacagaggagaaagagggagaggtagagggaaagggaaagggagagggagagagacacctgtgcaaacaatgtttcagaaaactaggctgctagcccgtgagcctgagtaggtctattatggttggcaattgtatgatattatttgcactcaagtaatggatggtagcatagaaagtcttggcccaacttgattttacttgaatcaaatatcatgtatgattatgacgccatgagtcattaattgatggtacactctgtggaaaggttacaagttaaagttacagctcattaaaaaggcgttgaaattaatttgatatttgaaaattttagtgccattttgtaagcttccaaaatgacatttaga

SEQ ID NO: 4319 - DNA, 7189 bp, Sorghum bicolor
aggaccgcgggtttaaataagaggaagccgagggtctctttaagagttttcaccccgaaggggtatcttttaatcacgatcgtcgattcgcaaacggacggctggtattcgatctgggcggggctggccggcctcctcgccggaacaggagcggccgcggcggatttccattgccggcgtcaagctcctcgccagagttcaccaaagcgacgctgcggttcaccaaaaaccacaccgaaggcactggagtgaagagaaaggaatggcgagctcaccacgggggtcggctcggcccgggaaggagcagttgcgcgcggcggcggtaggagttcacggcgagatccaaactccgaagaacgcgacggctagggctcggatagaactccgtgggtgcgaaaggggtccctcggggtgcttaggaactttatagaggtttgattcctcgaaaaaggcaagggatcgcgggattacggttttggctcgggaaggaagcttcccctgctcgcgacacggctgggaagaagaaggaaggtgggataggggagactgacgcgcggggcccggttggcggtgagagaggagagggagcgcacctgcctgggccgtttgggccgctgcggtgcggtggggggaaagggaagcgggccgggggaaagggattaggcccagggggttggctgggttttcctttttttttccaaagcattttcacaagtgaatttgaatcaaatacattcaaaccaaaaagccaaaagcacagaattaaatatgctccagcatgaatgcataacatgtttctgaacttatgatgagttttaattttcacaaaattatttgtttgctagattcaaatgcccacaaaaacacttaattaaattaaattaaatcctataaattgaaaatcagtatttcgggtgttacagagcatcttcgatacttctccaagatcactcatcatcccataaaattgggggtgatgatctctttttgtgctccaataatctttcaatataattctttttttatggccactaaaatcttctccatctcgcctcaaatagagggggttatatatctctcccaatatggaagttcattatcatcgcggcgatcctcgtcgtcatggtagagcgcggacacggagggatctcgaacgtgtccacagggtcttctccatgcagcgggggtggggatttgtgggacgagcccttcctatcctccacgatggccggtttcgccttaatgtcgggggccgacagtgggcgaagatgccagcgcaaccatggctggccgagtcgcgaccgaggtaacaatcacttgaggccatgggagaagtcgccggaggccgtgtggtggcaatggtcacggtcgccggcaagttgcatggtgacttagccatgcacggttgcctggaggccatgccgatagggtgcgatgaccggaggccatgctcggttgcctggagaaaggagagagagagagagaggagaaagaatgagaaagaagaagaaaactgctaactagatatcatgtattggaggagattattagcgatttgctacaataactcttccaataatgtaagaaaacaatattgatggccatcagtatcactctactgggatgaagtattgataaactaaaccactatcaatataatacaaatgcttacgacgagaaaacaagcctctctgtttacgacgagatagcatgggaagtcgtaaacaagcctctcttttacaggcgggtcagggggacaagcacacgggcggccgcggcgggtggccgagccaggccgccgctgccgggtgctgactcgaaagaaactgcgtcgggcggcgtgtctcgttccgcccactagcaacaccaaccccgctcccgcatcaaccgccgagatcgtttccgacccgcaaaccaacggccgatcggatcgccatacgaagaacgcgcgatcgtttaataataacgctcctccaccgccgcgccgcgacctacttccccccctcacctgctttcccccccaattcgcgtctcggggtcctcttggaccagccacccggcggaggcgggcacgccgagtgaccggagcgccgccgccaccggcaaaagccacggcacggcacccatggagtcgcgcgccctcctgcacgcccggcccgccgccctccctccccgcgccggcctgcgcctccctctcccactcccgcgcccgcgggcagtctccctcacccccgccgccaagcccgcggcgctccagtccccgctcctcgcgtcgagaggccccttcctcccgcggcacgatgcggttctggggaatgggttcctgaagcggagagcggccagcgctggcggtgacgtgtccttccgcgcccaggcggcggcggcggtgccggcgccggcgccgcagccggaggagtccagtacaaagttcctcggcatcgacgtgaagacgctcaagaagatcgtgccgctggggctcatgttcttctgcatcctcttcaactacaccatcctgcgggacaccaaggacgtgctggtggtcaccgccaaggggagcagcgccgagatcatcccgttcctcaagacctgggtcaacctgcccatggccatcggattcatgctcctctacaccaagctctccaacgttctctcacgggaggcgctcttctacaccgtcatcttccccttcatcgccttcttcggcgccttcgccttcgtgctctacccgctcagggacgtcatccatcccaccgcgctcgcggacaagcttctcgccgcgctcggcccgagcttccttggccccgtcgcgatactgaggatttggagcttctgcttgttctatgttatggctgagctctggggcagcgtcgtcatctctgtgctcttctgggggtttgcgaatcaggtcagtctgaaatttggattcttggatcaatattaccatgtaatgttaatagcttctttaattatatagtgaaacaacttgttttgaaccatctcatagctaataatgatttgactggttggtttggttattgaacactgacaaaagatggaaggctaaaacttgtctctatcaggttagtttaggcagggagtggtttgttcgtgggataatgggttggtaataaaacattttggttttaagtaggccctgcattgtagcttggctcattgtattgcataactttcaggcttaaaaaatctaggtgctcgttgctttcttttatgaatatgctgggctccattattgttcactttccatgatccaaatgaggtttgagctattgtcagtcttaaattagttgtggatgtctattacattgaacaacttggctggatatggttcacactttataactcctttacttttgcaaatctaacgtgtctctgtcttggggctacttttatggccagaaaggaagggccctggttgggtatattcgtctgttatttattcgactaccatttcttgttttacgagggatatgataggggaagcctcactgtgacatagacatcaagagaatcaatgcagagtgaaaaaggcttaaaacaagaaaagaaagggaaaatcagaacatggaataagcttgtctggatagtaaagaaagacaacagccaatggttatcagttagctaataagtcaatacacaatatactttgaaaaatgaaaaggttgcacaaaggcaccactcctgaagcaactatttggatcaatagactctgtttaaacaacaatcaatcataaaacattctcgttgacttttttttccctttgtaaaatcaccaagtataccagcatgtgtttcaactgtatcttcagttcagcatctgaagttgtcaacaaccagattatcaaccacgtgttcttaaggaccattaagctcatgattgttggtttcttaatttgtttttgtggttattgcaatcgtattattatcacatatgtgtgctagtatgtaacctttctacctccaatccaaactcttgtgggagtttctttcctgtgaattcccctcattagcttgatgggaaggtttctaactgggagtattatgaagagtgttcaactgttcacaagtaagaatttccagctagatactactccctccagttacaaatacttgaggctttgaccaaaatatggtcaaactgttagaattttggttgccaatagttttcagaatagtttggaaacataaaaatcatatgtgtagttttttcttgaaagctatattcataatatcatgcttattagatgttatatctatactctaataagaaaaaataatggtcagagttaaaactcgaagaccatagaaagtcaatggcgacaggtacttagactggagggattagtgtttttctaataagtgattcaaagctttttagtccatggagcgacatcttaaatgcagtagccatcatctgagtgattgaataagttgcacctttgaggagtatggacatgtcagccagatgttgcacgcgaggagcattgatattatcccctcttgttgactgatggatccattttcaagagctggttaaaggtgagctgtataggggaggggggaggggtttctgctgctcttggttgcagagttccagtggagttgttgattaggtttttgggcttccattggaggaccgaccaactgaaacatgtaccttgcagcagctctatgtttctatatggcactccggtgtctgaaatttggatttttttttatattcgcatttgttgaaattctcatcaaatgttgaatcttcaggctccagcttgatctgattcatgttctttttcagattaccacagttgatgaagcaaaggaattctacccgttatttggccttggggctaatattgcccttatcttttctgggcgtactgtgaagtatttctcaaatttgcgcaagacattgggtcctggaattgatggctgggaagtatctttgaaaggaatgatgagcatagtggtacttcttggactggtcataacttccatctattggggagtgaacaagtttgttttgaatgatccttcacttccaaagtctgatcgtaagaagaaaaaggttggtacctgtggtttatcatgctcccttttttcccctttttattgctactcaactcaatctggtaacgatttattcaacaggaaaagcctaaacttggtatgaaagagagtctgaaggttctgctctcctcgaggtatgtgagggatctagccaccttagtggttgcttacggcattagtatcaatcttgtcgaagtcacatggaaatcaaaactcaaggcacaggtaatctttctcaactatctgttcttttcatattgctttgttcctactgttatctattttcagtattcagtaacacttttcttattcactgcagttccctagtccaaatgaatactcatctttcatgggtgatttctcgaccgcaactggaattgcaactttcacaatgatgctgttaggacgatatatactacgaaaatttggctggggtgtggctgcaatgatcacccccactgttctgttgctgactggtgccggattcttctctctgatcttgtttggacagccactgactcctatgcttgccacgatgggtatgacccctctactggcagccgtttatgtgggcgccatgcaaaacatatttagcaagagtgcaaagtacagtttatttgacccatgcaaggaaatggcttatattcctttggatgaagatatgaaggtttgttaatctttctggattatatcttcttactattctcatgtgacttaatttctgatgatgcatatggtcttttctaaagcctgttaaatatcgtatgtatcttggtcctgtagtgtagctataaaaatggcattcgttatatacctgcatgtcatgtgtgactacatggcagatatgataactaatgcttttcaattaagtcaggtcttgtgaacatcgtactgtttttcccaaatgtcctcgaacttagaatcatgtgtgggtggctcaatgattcttgatgtcccactgtctgcaccatgattatactgcacataccaactccagttccctctgtttgcaggtaaaaggaaaagcggccattgatgttgtttgcaacccactgggcaaatccggtggtgcacttatccaacaattcatgatcctgacgtttggatccctggcaaattcaactccataccttggcggcatactgctggtcattgttctcgcgtggctaggcgcagcaaactcattggacaagcagttctcggccttggctaaggaagacctgaagaaggagaaggctgcccaagagaaagtagaaccctcgctacttaaggcgcctgcagaaggcactggtgatgtaccggtggagcagacaaatggatctgtgacgagccaagcaactggaacagagagctcaccgtcgaactcatcccccattcaatagcttcatcatcagaagttgtagttaggagagtgattacagtgagcagaaataatcggtaaaaataattcatggctttcaagtttgtaacagtgtgcagcgtcaagctgctagtaacttttctttgtaacatgagcaaattttgacagccgacagtgaatgccgttctggaaatggccccgaccctttgtgccgacgtcaaatgcataaattgttttttttttctgaactgaatcatgtcacagtaaagaaatgagcttgatgcgtggttgtcttcagtagtattagctgaatgttcagcaggagacgataagtgcgccttcaaaagttgaaacataacgcatccaacaaggggtgtcgtttggaaccgcttgaattcagattcttgatgaaaattatcgagagtgccaccaaaactatttggaggtgaaaagaatgtgaaattgaactcgcttgaatttggattcttgatgaaaataatcggaatgccacccaaatttgagctgaaaataatctgaattgatctgaaattgaactaggagctgagaatcttgcgccgtgagggttgaaccgcgtttccccaccgctcattccagtgagcatcatgatccagggcctgattttgttgtttgctaatgctggagcatggatcacatcaaactgattatccgatttactttctcactcttccactgctgccatgagaggtactcggaaatgcagta

SEQ ID NO: 4320 - DNA, 3815 bp, Sorghum bicolor
aaagattgtatgcgttaaacactaagcgagcaatgatccactgcctagagttttagtgtttctaagcctttaagaattttgttaagcattcttaaacccttaagcatttagtgatgctatatacatttagaattttggtattgatacaaattagagacaaagagtggaaaagcaaatgaaacaatgactagtttctcatcacctctttttgtagtggaggtgggaggggaatttttcacaatccctcaaactgcatctacgagcaaatgaaggaatgctctctatccaaaatagagtcaaccaatcagagtagcactaaatcatagcaaggaaagcaatgtcagcaaatcctgacctttatgtgtatgggcaaacgacgaaccactcatcctttgtcgtcgtctgcttgctctggatcctaacatggcaaaagggacactcccttccgctgttggccgacgcacttgagcctgtcgagatcttcatcgggcttccactccacatcccgccatggctgcaacgacgagtagagtctagacaacaagctttgcagtgttgtcgtcgcagatccgcaatcctctgtggcagtcatctccagcgacaacggcgactaaagcctatgattagggttcttaggcgaggagaggatatggagacatagaagagcttatggaagggaaacataatggacgggagagacgaggcgacgagggtttaccacgggaatgctcgtccatataaaatgatcgttgccatcatatacctaacagtgggcccaaccaggtgggattagtagaaaatggcaaggagtggcgagttatgatttttttttggaacatggtgcccggattgtaatagtatgcttcgggattatgaattataatagtgggtatccaaaattagagaattgtaagggtatatataaaaaaaacctttgaagccctctatttctcatacccaccggccatttccataaatcccaacgccacctgaggcaacagccgccgccgtttcttatcttcctcgctgcgccggcgctctgctccctccccaactagcgcccggcacgaatgcgacggaggcggcgctcgggatcgggctctcagggctttcccaggctcggcggcggcgtcagcggctccccctctcaccggtcgcctcgcgccctcgccaccgtcctccgctcaccggccggcgacactgcgtacgcacctccctgtcccctccctcctccgctggaccatcgacggcgcccgtcccctgcggcgcgcgccgcgcgcggccggcaggcagcgggagccagcagccggtgctccaccaaggcggtcgcgccgctttgggagcgcttatgccccatagcgaagcgctgcccgtccgcttagcgctgaagcgtgcgcttagtgccactttttggaaccatggtcataccgcagttacttttctgtttgggaataggaagattaagtaccttatcaagaaatgctaacctgtctaatgttcatatgtttgtccagtcttcgccacagtatttagaatgtggcatgtgcaaacaattattaagatgtatgaactagcactatggtagatcaatagtaatggttgttgtagaagaggagctaaaccgataggtgctagcatatatgggttttataactgctttacaagcagtgtaatttatgtagggtgtgctggtgtttatacatgtcatgtagacggtactccacatgcatcagtaactgacacctcacatttatcatttggataaatcgagtataacattgtcttagactgtctgggaatattagtcacctaggtttaggccccattttgttgaccgagaataggccaatgctgtcttctaaaacaatatggtttcaattgattttcactttcttttccaatatgtctatatttatgtgtaagaagaaaatgctctctgctgtttcttaggagcaaatctatttttttttcttcaggtcatctctctgtctgcttgtttgatgatccatctcatggaagaccattcatcgtgggactacctaccagttgatcacattagaattcctgcattcaactctggagttgtttctgaagctagcaatggaggcaacgacttctcagtatcattggatgccgtcgttcctgatgatatcctggagaggattttcacattcttgcctatagcaagcatgatgagggcaacagcagtgtgcaagagatggcatggcattatctattcaagcagagttgtgtggacccacatgctgcctcaacggccatggtacttcatgttcacctctaatgaaactgctgctggttatgcttttgaccccatcctccgcaagtggtatgatttagagcttccttatattgacaagagcagctgttttgtctcttcttcttgtggcctagtttgcttcatggacaatgacaacaggaacaccatttctgtgtctaaccctataacaaaaagctgcaggaggcttttagagcctccgggtgaaacattgccagactacagtaccattgccatgaaggtggatcggctgtctcataagtactccgttacattggcaaaatctaagcagattcctgaagattttgtccgatgggacttttcagtatacaagtacgactcttcgagtggtacatgggcaacttctgtgagtgaagtgttcattggttggagaggaggtgatgatagtgtcatatgtgacggtgtcctgtactgcttgattcattccactggtgttcttggcaatgtcaacccccgtcatggccttatcatgtatgaccttgctggtgaaccatctgagacttcgttaatgcaaacgtcaatctcagtaccttgttctctcacatgtggccgtttggtaaacttaaaggagaagctggttttggttggtggaattgcaaaacacaacagacctgatatcattaaaggaataggaatatgggagctccatgagaaacagtggcatgaggtagctcggatgccccacaagttcttccaaggatttggtgaactcgatgatgttttcgcctgcagcggtatagatgaccttgtctacatacaaagctatggtgcaactgctttgcttgtttttgacatgatgcaaaagcaatggaagtggtccttgaaatgccctgtgagcaaaagatttcctctccagcttttcactggcttttgctttgaaccccggcttgatatcgcagcttagtatgtaccaatttatctttttgccttttattagtggaatcaaaccagctaccatgttaattgttattcaggaaattccatgcaagttttgtcgcattctttcaaccattttcctgttatccttttctgagttgtaaccactgatggcccctcattggccctgcatgatgcaattatttgtttgttctgacatcagattataaatgcatagaatgcttcacatgtgctcacttgcttatggcccaagatgtaccttgatttgcagaaacagtattaagatgtacctttgtttgcaaaaacggtacaaatatgtactatgtttttcagatttcccaagttcttgcctgaactgcgtcggcaatatctgcatagcatgtttaacctgttgcatataattgagtgacaggttacctttacaggttagaggttacagcatgaccaggcagataaaagtttcagtgctgtaaatgatgtcatccgtgttgtttttgtttgatatcttgctgtccaatatgagagcccacaccctatcccattatgtcatagctgatatttgtccctttccggtcttaatcgacaagttcgactgttcaca

SEQ ID NO: 4321 - DNA, 8116 bp, Sorghum bicolor
ttcaagattcctcgtcacatcgaatcttgtggcacatgcatgaaacattaaatatagacgaaaacaaaaactaattacacagtttaactgtaaatcacgagacaaatcttttgatcctagttagttgatgattagataatatttgtcacaaataaacaaaaagtaccgaaaacttttcacttctccgaactaaacaaggcccagatctctaatcggggaataaaaaaaacttgcgctccacgcacactcgctcacggctcatccccatgtgcacaacagacacaggaaaaggtggagtgacgaggcgactagacgaggcagcctctggaaaaaagcgcgtctgatctgctctggctgccggtgccgggctaccggtctcgccgccgcgccgcaccgaccaaaccgtcctgcacctccacaaacgtcaaactcgaacgcaaaatccacggggaaacccaaggaaaccagcaaaatccacacgaaaacccaagaaaactcgcgcaagctgcccatccaggcggtaggaatcagcacgtcggcgcaccgcagcacgtaccgtacctcacgcgcacaaggtgcacggaaactcaaagctcgttatctcacttaatttagaccttgtctagtttttaaaaattttcaaaatctacataaagcattaaatataaataaaaataattaattatacagtatgactataatttagtagacgaatattttaaatttaattagtctatatttaaaaataaatattaaatacaaataaaaatattataataattaaatctaagaattttcgcgaactaaacaaggccttatgaccagctcgactcagctcggctcatcttattattatagtaacaaactgagttgagctaaggttttaacttgttagctataacgagataacataactaagggcctaaggccttgtttagttccgaaaagtgaaaagttttcggtactgtagcacttttgtttgtttgtgacaaatattatctaatcatgaactaactaggataaaaaaatcgtcttgtgatttacagctaaactgtgtaattagtttttgttttcgtctatatttaacgtttaatgcatgtgccacaaaattcgatgtgacgagaatattgaaaacttttttgttttgaggatgaactaaacaaggccctaactcacgagcttgcttgttattcaacatttactcacgccacagcctgctcgtcctggctcggcagaatcgggtggccagagccagacagacaggtggggacatccgtccccacatggcgggccacggaacgtagccccacagccccgctgccatcaatcaaaaaaaacggaacggtgtagagccgcagtcacgggcggaatcacggaatcccccggcgaggcgagacgaacccgaccagagcctgcgtccctgtccttccttccttccttcctctgcccccaggccagggccaggtcgctcgcatgcatcgcatcgctcgcacggcacgaggtcggtcgatagagagagagagagagagagcgcggaggcggagcgggcctcgggtctcgggcctcctgggtctcgtctcgtctcgtccgttttaacgccacctcgcttggcttgcgacgcaaccccaaccccaacccccaccgctacggtgcggcagcagcatcaccattcaccacaccatcaggaatcggacgccacacaggggccacaccaccacaactctcccacccccaccctcgccgcgagttgctcagtcgtagcgagcgaggcgggggccacagcgcggggcgaggcgagcgtcccggctgggcagcgtcgcgggggctcgatccaggttccaggggagggagggagggagggccagggatctccactctagcgtccgtgcgggagcgcgggcgtcgcatgcggcggcgcgccggggcaaatgcgggtagcctcgcgggcggaggagcgctgacgcggcgggaccggccggggagcgatgcaggcgccggaccagcagcaccagcaccagcaccagcagcggaggaaggtgaggggggcagccgctctcgtctcgccgtcggtgggagtttggtttctttctcgtgcgggcggggggtggttggggtacgggtggacgcgcggtcgtctgggttgggttgttggcgtttcagatcggttggcgttggcctgccgctgccggggttgcaccttgcaacacgacggcagctctgaaatcgtcacctatgttgacgatgatgtgaaataaaaaaggtgccttctttgcctgaaaatctcctggtcctatggatgtgcacggaaccataaggatttatttattattattactcgtgccgtttttgccttctccgcaattgttcctcgtcttcgttgcggaaagacgatcgcctagagctcaacttcgatttcagttgtggagtcgccacacacacacacacacagtccaggttcgtgcgtttgcgtttgccaaagagaatttttgagtctcgtcgttttcctggatcgggagttttctgaatttcccaagagggaggttctctgttggatttgcccgtggacgctttttcttgataatatctgaacccttttatctgaactctcttccggtgttgggcgacgtcctcttttctaccctccaaaggaagtggcatccttcgcgacttttccaactgggtcgaatacaaattgctccttaaaggactggttaggccttgtcccccacccagttaatccgtgatggcacgccagaaaaagctgattcagttgggtcatagaggagagtatcgcaaatgaggaattagattcgctgagtagtttgtgtttatcctaatccattctgtggcctctgtcgactttcttttcctttgaagaaagaaaataacttaatttgttctagtggattagcttatcaatatattctatacccactccggaggcatgtcgattgagatggttgtatgcccaggaactctcccttaaagagtcattcttcgacttctgccagtcttatttttgtctctcacacttgatcagccctgctctgctcattgctggaggcaaaggaaggtttgcgctggagggtaggtgtagtgtaacaagaactatcagtgcccagttcctggtaatgtcttcctgagttagttgaacacagatatgtttcagtggtcatttgggtaggaattaggaagggtaccaagcttcacataatctggttttctcgttcacttttatcttgagtattctatttatacttttgaaatctggtattctcatgaaagttgtttcttgcaattactaaggacagcatgtattatctaccctaggatcatccaataaacaatccaaattttctctaatgctattccttctgtccacactatcgaaatcttgggatctgacattgggtttagttcttcgagcagattccacatttctactcagttgatttggtccttctaatttaatcactataagtctatatgtttttgtttattagtagtgctttgctgaacagagttgactcagtatgttaaactttgctcagggttcgtcagagatggacttcttcagtgaatacggtgatgctaacagatacaaaatccaagaggtcattggcaaaggaagttatggcgttgtttgctcagctattgaccaacataccggtgacaaggtggcaatcaagaaaatacacaatatcttcgagcacttatctgatgctgcccggatccttcgtgagatcaaactacttcggctattacgccatcctgatatagttgagatcaagcatataatgctgcctccatcaaggagggacttcaaagatatctatgttgtatttgagctgatggatacagacctccaccaagtcatcaaggcaaatgatgatttaaccagagagcatcatcagttctttctctatcagatgctccgtgcactgaaatacattcatactggtatgcttttttttctttcgcaaattgatgtcttagttagagtacagtttttttatctttatgattgtcatacctcatactacaatttacctgtcttggaatcatttctcttgaataatagtggggacaagtactatttgcatggaggatcagagtagcgtgttcacacattaatatcactttagcattaatctattaactataaaactgttgttgttgattgtttctgttcttctattttgatttttattataaatatatttggacactcatctgatacatagactacttgtatccactcactatactttcaaagctattgtaattactaggtgccatccatttttagtggttgagccatatcaactacattggtttctatctgcatgctcattagctatatcttccagaaaaaaacagaactgatacatgcgttttatgtgattgcagctaatgtttatcatcgtgatttgaagccaaagaacatattggccaatgctaactgtaaacttaaaatatgtgattttggattggcaagagtggcgttcaatgacactcctacaacagtattctggacggtatgtaagacactgcctcacagatttgacgctacaatttatttaacaggatatattcatactctatttcaccacttaattataataatctgttttgcaaaattttcaggattatgttgctacaagatggtatagggcccctgaactgtgtggatctttcttttctaaggtaaacattcctcacattccagtatagggtcacttagcagttctacttctttcagagcatgcattatggcagcattgagcaagatgtactctgtttcatattgtgctgttccgtgcttcatgcctttaacacccagtgttccatagctgactgttatttttgtgtttcacctcatctgattcccattttgctaattaccaggccgcacactaaaggattattccttccaaattgtttgttcagaagctgcatttttcttcagaacttaatatttctagatgggatttctaccttttagtaggcattgccttcagagaaaatcacagattaactgtagcagtgtttggttcggtgtgggaattagcatttacagtaccctacagttctccttagggactaaatgttattttcagctttatcctgtccttttctttctttttgtgctgttgaattcaggatctcatttcattgttctatgcagtattcaccagctattgacatatggagtatcggttgcatttttgcggagatcttaactgggaagcctttgtttcctggaaaaaatgtggtccaccagttggatttgatgaccgatctcttgggtactccatcacttgatacagtttccagagtatgtcttctcattcatgcctaatgttccaaactaaactgttcacaaagacaagcattgatcctttcgctactgtagattcggaatgagaaggcaaggaggtatttgagtagcatgaggaaaaaacatccagtaccattttctgaaaggttccctaaagcagatcctgctgcactcaaacttttgcagaggcttttggcatttgatcccaaggataggccaactgctgaagaggtaagcgtttgaactgtagaatccaattccacattctgtacttgtatttgcttagtgccccagccttatatcttaaaagtcactcaagtgatgtttcttttgtcattgatgtacaaccaggcattggctgatccatattttaaaggcctcgcaaaagtagagagagaaccatcatgccagccaataacaaaaatggagtttgagtttgagcgaagaaaggtgaccaaagaggatgtcaaggaacttatattcagggagatattggagtatcatcctcaacttctcaaggattacatgaatggaactgagaaaacaaactttctataccctaggtatttatttgcaaggagcaaaaatgaagtctgaatctttaatttatttatgtgtattgccacatgctacatgccaaggtgttaaatttttctaattcttcttgtgcagtgctgttgacaatttccgaaggcaatttgctaacttggaggaaaatggaggaaagagtggggcacacacggcttcatcagacaggaagcatgtttcgctcccaaggtgacagattttttctgagttctctttctatgatttaggctcctgtaaaatcctttttttgcctgaataaattaaattcggttccacagcttcctagttttgggggggagtaaaatgaattagcttacatttgcttgttcaaaagaactgatgtttgatgaccttgtgatactgtgaaatcagaggctagcaacttagttgcttgttggttttttttttttttttgaaacttcttggattattattagcttatactactaattagaattccccatcgaaattggcttctgacctttactcccttctatttgcaggacaaccacagttcattctaatccaatccctccaaatggaatctcccaagttcctcaaaagattcccacaggtggtaattcctcctaatgaatattatgttctgcagacaccaccaatctaatataatgttattttctgtaaaaaatccagctagaccaggaagagtggttggtccagtaataccatttgagaatgcaactgctgttgatccatacagccaacgtagggtggcgaggaatccagtacttcctccaaccaccacaaacctgtcagcatacgcctatcaccggaagtcagacaactcaaacagagagctccaacaggagctggaaaaggaccgtatgcagtaccagccagcacagcggttcatggatgccaaggtagtatcacagatgtcccctgacttgaggtcttcctactatataccaaaaggtgtcccgaaagctgatggcgcagatagagctgctttgcattctagcatgattcatggaatcgccccttttagtggcattgctgctgtaggaggtggaggtggctacaacaaggtcaatgcagttcaatatggagtttctaggatgtactagttctagttgcattggccatctccaaaatcctcagttgagttgaagtaataacatggcgaagggtggaaagatttaggtaccaaagagctgccatattggctctgagccaaagatacaaagctggagtatgatctcggatcaaggacgacgtgtgacatcagattgaaaacgctattgggcaacagtcatggttctgtccattggatctagcttttcggaaagcaatgccttcaccccgcggaaacggtaaaataaaaggagaaaaagggcagtgccgtcagttgattgctgcttataagaagcaaagggggcagagacgatttttacatggaaaattatgtactttgcaagaaaggaaacatgtgggaataaaaatagtgagcctacgtttagctctgtatataaagtcacttgattttatatgtattattacggctggtgaaacccgcttctttaattcaaagctgtagaattttggcctatgtttagctctgtaataccataggcagttcagattgattcagccgttggtttattttgccctctttacctctttgtccgtattacttttacattagaaaatgaaatttagcttggacattaagccgtcatcctccctttccctttatccagttcaatcgtttcctcttctgatgttgtctcaagactacattgaccgtcaacaatacatgtgagtaaatatttctgcactccaggcgaactacaggcgcctaaagaaaaatgtaaactcaacaccgccagcaccagcggtgttctcccggtttagaaagggacctagccatctagggaaggcatggcggcgaggcggctgtcgcacggggtggtcggtgtctggatgagagtgagacttgagatgtcagcagggaatttgttgacgctgattcgatttcagacaccggtaggggaagatcacccagaggcggcacactgcctagcacgcagcggtcccagtggcgaggccgaccagcgggtcagcgaggcagattagatgcccgttcgtacaataaacccacaaatatcttctggaaagacccgtctgggagacacacggtagaaatgttaagccaacacccataaa

SEQ ID NO: 4322 - DNA, 14297 bp, Sorghum bicolor
gaatacatatcagaagctttggtgtttaacccatattgagacattaaggtagcttctttgtgcatagttacatttttattttattaccccatttggagagctccagctctcagcaccatgtcaaatttggaatttgtaacttaaaataaagtgtcctcgataacttgatttgggtgcttgtttcttaaagaaaacccattttcctagttcctcctagtttggatctcgtttttgcaaactgagccagcctggtggtaagagtgcctgctatgccctcaccaaactgggctttgaaccgtggtgtcatacctttctcgttgcattaagagaaggagagttaggccaaaatagctaaacacagcgtacaacacatagtcacatacccacacacgctacatcacttgcccgtggtcaccgggctatacttttacatttttcatttgcgtcaaagacatgtaagttacgacccgctagaccaactcccaactataggacagggggcctagaagcgaccaacgcgccaagacctttcgcaccagccagtatccagagttcagattcttcatgcaccagaataaatgttctgttcactctagggatgatcccattgaataccacgtcattccttgctttccacagggtccatgcccctaaaacgaccaaaggcaacataaaggtatgcagtgcctttgtgtttggttgtcctgcataggaaagctggtaaaattgtgtttgtttatttacattttattgcatatagtcaccttatatgttctattacaggtctcctttttctagtaaaggtacagaatgtgtaaatatttcatttttgtatgcccgtcggcttatgcaaatctgcatttgtctaattcggaaaacactttttcaaacccccccccccccccccccccccgaaaaatctggtgtactagttaatgctgcattggcctgctttgagcactgtgcacatgcctggatacatgctaatgcaggcaaccaatcaaatcctgagaatatcaaataatccaagtatgatagcttggacattggacaattacgttgttttccttaacattcttgcagtgtctgggactggattgacggggctagagagttgaatatagaagatgctcgttccttggccactgataggtggaaccttgaccatgtgagtattcgttaggatctgtgatgcttgtatttgtttttgtacgtttatgatatttggcctcacatggagctttgatgtatgctgatggacagtttcatatataattactctttgccaaaatctaggtacttttgtacctgtcttaagtcaatattttaggtttggccaaatttatggagaagggtttcaacatctaccacatcaaaagagtaaaatatgaacatttttcatagtggacctaatggtgctcgattgagatcataaatattattattcgtttctataaacttggtcaaacttaggatagtttgacttatgaaaaactatagtatttttttggggacggatggagtattgtaaagcatttctggtaattaaataaattattagtttatttagagataagccccccctgctttatttcaatgtaaaacaaagccaacagatccagttatgtacaacatatttgtttcaatggcaaggagagaagccagtgaatttcggagaccaaaataaggaatctcttgagagacgagtctggttgtacttctatagtaatggctattcagctttagatatctgttcctgggatgaaacttgtccagggaaactatcttgggttgtcttattcatgcagaatcaattcttgtttctgatttttttttcatataatcacatcatttctatgtttactcttgaacaaggatattcttttcttttccgccttctattgtctcttttatatttggtatcccccccccccattttctcaatttctactactatttttatatggcaggttgactatttcgttgactgtcactattccatgccggatgaccggctatggttgattggtggcacagctgcagggacgttaggttactttcctgtaagaaatgatcacgcaggagcaataggttcagccgaagcaatccttgaaggaggccatacaggagttgttaggtccgtgtacccctctgcaggaatccatgagagccttgggcaaaacaggggcatctttggatggacaggaggtgaagatggtcgtttgtgctgctggcgctctgatgaaatcgcagagataaacaaatcttggatctctagttcactagtgtgcaagcagcaaaagaaaaccaagaatcggcatcagccctactagccgctatggataccgtttgtaacgtttggcactgacaagggaaagcctggcctgtatgtgctgtgagcatgtttatcttctctttgaattataggtcgtgaactcgtgatgaaacatatttgagtatccccgcacccggagtaagtcctgggtgcagttttgatgttgcttattgtttgagattgctaccctagttcagcaactgattatcaatctagccaagattatgtgtacgtggtgcgcgcgcgaaagagtctgtctaggcgtgtaggaagatggtgcacatacagatatactgcttgaagatggagagagagagagagagggatggttgggtgggaggattttttgtttttctctgatcctctcttaacagcaccctttaatttgcgagacgaatcttttgagcctagttagtcaatgattagacaatacttgttaaatacaaataaaaatgttatagtgctcattttgaaaaaaatggaactaaacaaggccttatactacggctgtgtttagttggtgtagaaaaaaaaaatttgtgacactgtagcacttttgtttgtttgcggtaattattgtccaaccatagactagctaggcttaaaagatccatctcgtaaattttgactaaactgtgcaattagtttttatttttgtctatatttaatactccatgcatacgtctaaagattcgatgtgacagagaattttaaatttttttgcatttttagggaggaactaaacaagggctcaatcatcagaaatagtagttgatataaataattacagaatgtgtattgttgcagcaggttgatactgtttggtcaacagtcccttgtgtacgtctgttttgaccgtgaccgcacgctgggaccgcgttcttggctagtgcatgcctgcattcaagaccgcacgctgggacctctcatcccggcggccagcggccgcagctgctccgagcactaccagcagcgccgtagaagatgccgctgaggtgcaccgccaccacctgcagtagaggaaggccgcctcgcactagccccgctgccgcggcctcactcgcgcgccggtcgtggtggcctgggcggacaacgcgcgtcttcgctggacaactgcgccgtttgcaggcttatccgtccgatcagtatcacacggtgcagaacgtcccttggagaagaggaaagaaaaataccagtaaaacctcctcgcccccacggacctgagccgcctccgccgccctcgcgcctcgccgccggagaagcgccgctcgctcaggagccatggcaccggaaccggaggatgagatcatgaacgagaagaaccctcgccccttggacgaggacgacatcgccctcctcaaaacatatgtgcgtgcctcgaccccccgtttggatctctctgatttcgtggatctagggttctttggtgatttggacttgggggcggggcttcggattgtgtcggttgtggttcgggctcgagatcggtttagggtaccagatttaggtcaccgtgtgtgatttgaggggggagaaattgctgatgtttgctggatgctgttgcaggggcttgggccgtactcgaccagcataaagaaggtcgagaaggagatcaaggaaatggctaagaaaatcaatgacctttgtggtgagtgataattttgttatgacttttttggtgtggcattggagatgtaggccagtttgtttctgagttggtcctaaggataagtttgatcactttgtggcgttttattcatcttctagcttaggctgttgggttattacactgagaattatactctcttgccaacacttgtttcagctggctattatttacttgcagctaatagggagtttcatttaattgacgatctcatctcatatatagttatccaaatggttaagatgtagtgatgcattatttagtgtgttacacttgaaacattctagtttactgaacaagggtaaaaatcgatgggaactgtttctttagtgatgcctctgtagttctggcatgggggtgctgctgcctgctatatactaccctgtactctagatatttgacatgttatttacttaatagtgtagtaatgacatgttattaacttaataatgtagttagaggaattggctatgagaccacatcttatgtctggtgttttctattatgtcttatttctggcgttttctattatgttctatgttgttctgcaattcagcagcttgttttaatgttagcaagctccttttgacctgagatgtgctcttatactaaatgcagggataaaggagtctgatacagggctggctccacctagccagtgggatttggtttcagataaacagatgatgcaagaagaacagccattacaagtatattaactgaacctgatattgtgttacttagtagtttttacagatttgaattacgacctaccatgcatggtagttgggcgcaatatctttttggtttcagttttacatgtgccagcacactaataacttatctttatcttcctgcaggtagcaaggtgtacaaagattataagccctaatacggatgatgccaaatatgttataaatgtaaaacaaattgcaaaggtatgtcatgcttgccattttacttccatctcacgccacctaaaaactgtacacctttttcttataccttgttttgaatcctgcagtttgtggttggactgggggataaggtctctccaactgatatcgaggaagggatgagggtcgggtatgccatcctgtatttttcaaattaagtatatcataagtcttaaagtgtcttcttcctttagcatatcatacttggtcattcatttctactacagcactatgatgcatttatgtacttgtgataaatgtttacaaaactggcccatctttccagtggttatttgtaagaaaatgatatgccatcatccaagctgtatgtcttatgagaaaaatgcttattgatttgagttattacttattaataggcttaaataagcaatggccattcatgtagtgattgccgtgtcccttggaaagatgttgtgaactttacatgtttgacatagatgagaaagcattgctttgttgaatcagctgtcctccatgactatgacttggtaggtgcgtagtgctttctgaaaagcaatattgaatctattgtatctttgtattttagcaatctttgaatactgctattgcgttggaaataattgtcagctgcatagattggatgcgagtataaaactctgccctacgtaatattaagagatgaaaaggttgtttaatctaaaaatgatcctctgcatttattttattgctgaaacatggactcgccttttcgttatttctctatgcgttgtgctattgttcctgaataagttgaaactttttaccacctagtgaaaaatttgtgatctcacacctgatgcttgttgcagtgttgatcgtaacaagtaccagattcagatccctcttccaccaaaaattgacccaagtgttaccatgatgactgtggaggaaaagccagatgtgacttacaacgatgttggtggctgcaaggagcagattgagaagatgcgtgaagtatgtgatcctttttccttgttgtgagctggcacatactttgtcacagttagttatggacctactttatttaatctttcctgtatcatttttgcaggttgttgaacttcctatgcttcacccagaaaagtttgtcaagcttggtattgaccctcctaaaggcgtcctttgctatggtccacctggtactggcaagactcttcttgcaagagctgtagcaaatcggactgatgcttgtttcatccgtgtaattggaagtgagctagttcagaagtatgtcggagaaggtgctcggatggtcagggaactgttccaggtatatctagtgctgtgaatccgtaaatccagttttttctgttgaacatatttctgaaacgaattcctatattgtagatggcccgctcaaagaaagcatgcattgttttcttcgatgaagttgatgctattggtggtgctcgttttgatgatggggtcggtggtgacaatgaggtgcagcgaacaatgttggaaatagtaaaccagcttgatgggtttgatgcaagagggaacatcaaagtcctcatggccactaataggtatttcattttttcattctactctcatgtgattacagttccttttaggtgattacctcgtactctattctgaagatattatctgaagaaacataggattttgaatatgcaaagttatgcataaaaacctattgtttataggctccatgccttaaactgacatggctgcatgaaaattataggctccatgccttaaactgacatggctgcatgaaaattataggctccatgccttaaactgacatggctgcatgaatatgtattgtttatgatggctataaaaatttttggccatatcccaggcctgagaagctgaccaccttctctgttttctccaggcctgataccttggatcctgcgcttctgcgtcctggtcgtctggacagaaaggtagaattcgggctacctgacctggagggccgtactcaaattttcaagatccatacacgaaccatgaactgcgagcgagatattcgtttcgagcttctggcacgtctctgccccaactctactggtgagttgctttgtggtttcatcagattgttttctgtttgatttgattgtcttacttgaagattttacgatagatggtcaggttctcacatagccttgcttgttactccaggagcggatataaggagcgtttgcacagaagctgggatgtatgccatccgtgcccgcaggaaaacggtgacagaaaaggacttcctcgatgctgtcaataaggtcatcaagggctaccagaaattcagtgcaacacccaagtatatggtgtacaactagtcagtgcgtcttcatgggatttgttgttttcagaactctggatctttttgatgattgtatcatcatggggattctatgcaaagattgttgtttgtttagcaaattggatccccagtgactgtaacctgtaccacatgtttttaagataaggttctccgctcggcgattcatgttgctcgtgtttatgactgatgatgtgcacatgacgcaaagttcattcggagaactcacgaaatgtaaatctcaggcaacgcaggtggttgttgctctgacgtctcatctggtttatggtttgctggttgcttttgtgcatcgtaaagtcagaccatataatggaagggtggtgcatcctgcgcctcgaaagagcaagcgaactgatcggcagtatttgataggtgatagaaaaagagcaagcgaaccgatcggcattttttgataggtgataggtcatatatacagaggtttctttgccgggcattatttgataggtcatatatacagaggtttctttgacatctcttacgacaggtcatatactatgtacaaaagatatatgtacatgtacccagctatatcatacatttcagccgtttcactgtaggcgctgcaactttctttgcacttgttgaactgctggaagctgctgcggttgcaagtttgcaacgcaggcacgcagcacagcaacagcaagttgatccaaacggacagtgacttgcaactttcaaatctccactctctcaatcagcttgatgcctgacgactccaagatctccaatgcttcacacacgcaaatacacacagagtcagcacagttgcacgtcatgataattccacaaggattggcatgaaaactatgtaacacctggaatgtagatctccggttgcagaggcctgatcactccttttgtctggaccttattctgtagcaatagctgcaatataacatgcgagagcaaatgaacatacattaatttccattttcctttttggcttttatccttatcattatgcaagtataattgtggttaggtttactaccagggcccctattgctgcaggaataccaacggtcagggccatggcagtggtggatctgccattttcaaccttcccaaactccagtagcgtcgcttggtgcttttcggtgggttgcccatctaggtattccacctcgacttcatggtggagcagtaccatgtcctgaatttacaggagctgcgtctcagcaatggttatccgacgaaggctattgattcaatttaatccattttgtgaacatgaaataaaaacagtatgaaaatggtggtataccagagtaaagaagtttggatacacattaatcattaaactggcaatctactgcaaatctcctaggaatcaaaagtgcatttttgtatctgagttttgtccctgtcaaatttatacaactgaagtgattaaggcaactacaaacaataaactagtaagagcatctccaaccattatgcatttgaagttatgtattttaggcaaattgcaaacccccaaatgaaaatggcaaggctaaaatcgggtgatctccaaccgttatgcaaaatgctaagtccatcatctttttttccgaaaattttgtttcggggcactccttcccgcgcggccaatcgatcccgcgccaaacagcccgccgtcgtctcccgttcaccaattcccgcgccaaacagccgcgcagtaccgatcgtgagctacgcagttcgtcgttcccattcgcaataccgattgcagtaccgatctcccgttccgttgtgcgctgcttcgtccaaacgcgcgcgcgaagctggcgaaggaggacgcgcgatgcttctcctatcgcgtgaagtggtagcggcgcgaagaaaaaccgcgcgaagggaagaaaaaagcccgcgaggtggaaccgagaatctcgtgatctctatttgcatagccggactcctttggcatatatgccaagtttccccctccaaatgcatagctatgtaaaatgcaaagtccaaatgcataacgattggaggggttttttttggagctttatgcattttggtaaatgccaagcccatttgcataatggttggagttgctctaagattgagatcattgcctcttttctgttacattcctgacttctttttatgacaatataaatataaggttaaatatcttatgattttataaagaaagatctgtactacagatattttaacagctacatgcaacacatgaaacatatgacaggtggtaagatagtattaagcctcacttgctcattgtggccataggccatcctctgttccattcgttggcaaatcacatcaaatgcacttgaatagcccttaggaatttgagtctcttcatgtagtcccaagaacctgctcgtgtattttgtcagttcgaaaataaaatacaactacagcattcatgcttcctgtttctattatccctaaatcatttttttcctggggattctttaacatattaacttgatggcattatttatattgcactacaacagttaaaaaaaagatgtgaattttgtagtacaggatcaggattaacttgatggttttgactgtcttagcagctatttcctttctttgcaacacctgagcttcgacagtctggcaatcatttcatcgtcatatccaccagaggcttcaatatcaaagtctgtgttagtcgttgtgatattattaagtagttcatcaaggaaacccttatatgttgggcgattagtatcttgcagcagtggatgatttgcagcatcaaagaaaccaattttcgacagggttgccattatctcactaaaacctgcacatgtgcagcaaaatgtgcatcaaagaaaccaattttcgacagggttgccattattctttttttttcgccttctattgtctcttttatatttggtattttccccccattttctcaatttctactattttcatatggcaggttgactatttcgttgactgtcactattccatgccggatgaccggctatggttgattggtggcacagctgcagggacgttaggttactttcctgtaagaaatgatcacgcaggagcaataggttcagccgaagcaatccttgaaggaggccatacaggagttgttaggtccgtgtacccctctgcaggaatccatgagagccttgggcaaaacaggggcatctttggatggacaggaggtgaagatggtcgtttgtgctgctggcgctctgatgaaatcgcagagataaacaaatcttggatctctagttcactagtgtgcaagcagcaaaagaaaaccaagaatcggcatcagccctactagccgctatggataccgtttgtaacgtttgacactgacaagggaaagcctggcctgtatgtgctgtgagcatgtttatcttctctttgaattataggtcgtgaactcgtgatgaaaacatatttgagtatccccgcacccggagtaagtcgtgggtgcagttttgatgttgcttattgtttgagattgctaccctagttcagcaactgattatcaatctagccaagatcatgagaagttctgtattcaagttttcttaggccttgtttggatgttgtcggattcatcgggtggaatttagttcaagttccactccaatccaccccaacacatgtggattgatgcgaatccgactacatccaaacaaggccttacttggaacttttacggagtgttctgtttggggaattaactcgtttcagaagtggtgatgtattaggaatttggtggtgatggaccaactcgttcttgtattccacaaaccagacaaaaaaagtagagaatgggatggtgatggacttcttcgttccacgatcacaaactcccttgcaacccagctcaacaaggcattgtccgcataataatagcagcataaatggagtagctttagggtgtatttggttcttggacttcttcctggcaaggggtgtttggttgtattgacaagctcagctggatctaacaaaacgcccggagcaaaacgtatgtttagatcaaaggaagccgccaagccaggaaggagaataacaggtgaatcagaggacaaccagaaaccacgaaaagaaccctacaagggctaatttggaaactcaaacccccctggatgaaaaaatccatagaaaaataatttgaataatatttagttctctatggaggttttccatctcagggtgtgcctccggttcttccaaattatacctgacaagagatatatgtttctttggatgttgcgcttagcccatattagtgctcctatttgacatccaagacctaagaatattttagtaggactcattttgaacgcgtgtttttttttcatgttctttagttttttttccctcttgtgaaatcagaaaccccccgtagaggagcaaagaacatgcactgacgttgttgttccatgatgtgcagtctcctgcacagtctcctgcagaaagtatcgagcatctcacatcaacctcccgcttttgttcggacaaggcgagtttcctaagattcacccaccgcggatacactaagcgttcttcccgtttgtaaatctgattcttgcaccgaagacagggagggaggtgcaagaacaacgcgtgattctctctctcaggagcacacgcgaatttcagagtgcacgtatgtatgtacgtgcgctgtgagattcacgattgataataagtaagatgacggcatacgttcggtggacatgtaggccggttccatataggcctctcagctgcgtgccactactttgttcgtcgcgcacggctcgttggtttcgctttcatttgcattgcaggcttgcagcttaatgccgtgggggtgcacctgcaccgaaaccaacggctgtgctgcgtgcgtgcgtgcgtgcgtggctcgcacgagctgggctggttgggccgtcggactcatacgcctttgcctacagacagaagacaggtccgaatcaataaagtgcggggtgcatatcctttatctggattgtctcgatcaggctttgccgcgtaaactgaaacgagttttgttggttctgttcgtttgcttgagattatctgacgaatctgttagtcatttagtgaaaaaaattttataacaaatcttttttcgcgagcataccaacttgacacatgtttcattaaacagaagaggagtgtcgaaggttacaacgatctttagtaatccgtaaattacttaggagaggtggaacctagagaacggtcaaagtaaactagaaaaggaacctaattactcacagcattgtgtgacgaggtggtcataagtgctaactacccaggtgcctgaagcccgcgagaatccaaaggtgtacttcttcgatgattgcacgaagaacctccttcggattggatagtttattgtcaaaggttcttgagtttctctccttccagaggtgccaggcgaccaggaagactagggagtcgaaggcttgccttagtccctttgggaccgatttgcgcgagcgaaaccaccatgaccaaaaaggagtcgtttgccacgagcagcatctggttaaagccaaggacccccaacgccaagtgccagacttgttgactgaaagtgcagggagtcagaatgtggtcgatctcctcaatgccgatgctgcaaaggatgtaacttggcgaatgttgtaatccgtgccgatgtcgacgcgctgctgtccagcattttctatgtagcgccaaccaaaagaagtgtttgaccttggctggatcagaaaccttctagagctccttcgccccaagaggcctgacaacaccagagaaaagtgcgtgataggccaaggccgaggagtacgacatgtccgccgaccatttccagcgcaagacatcaagtgaattctccgttagctgcacgttctggataatgtcccaaagcttcagatagtcaatcaagatcggtacaatgaaaggctcaacaatgtctcggacccaggcatgtccattgaaagcctccgcaaccgtgcgactgagttgtcggcgccccacattggccagtaggctgggagctacctccctcccggagcagccattcggcatccagcggtccggccagaagacgtggtccttccatcgcctagaatgacgtccatcgcagccatggctggcttgactgcagtctacattgctagtcctaacgtaactatactaccacgttaaaaagactcttataacaaattaacgaaaaatatttcgaaccataacttaccagccaagcaaacaagctactgtcatgttgccgttggaacggcactccggccacaatcctgcgagagggccgaccggccgggcgagtgttggactgttggccgggcgcacgtccgctttgaccggacctggcccagattcttggacgtttctatcgcgacaggctgcaccagagattcgtgtccgcgtgatttcggatgattgggagcttatcaacgacgggtcggacgtcgggttcgcgaactaaacaaggccatactgcaaaaatatattgcttccagaagaccagaacccttgaacgctgatgattagcactagctgcagccgccacgcccacgtacgaaggctttgcttgcttacgctccaagttcccccggctagcttgcatagggatttgggagtttgggacggactcctgtattcagcatttgaatcagaaacaaaaattattattttcggtccttaagaaaacaccgctgagaggcgtggacctagtaacaattcattttagggcatctttacttttgattaattttttatcatcacttggagaaacaagtttgtttggtactagtaacacgttccttagcagctgtacgttatcatcctctattcaatgacgtgatctcctatgtcatcgtggcatgcaattatccgtgcttacggaaccgtacgttagatagctaggcgcacatgaacgccagagcatgatcaagggtcctgatgacgccgctttggcattattat

SEQ ID NO: 4323 - DNA, 4901 bp, Sorghum bicolor
agttgttcttgttcacaacaggaatgctccggtaacttgatagaatagaataaccgagggcacaacaaccggaattatcttaagcccacactgagcacactcttaagaaaacgacgggctcggtgacagcgatgtcaccgttaaacaggtcaagaagatggtaattcatggctagaccttgccgacgcatgtggatgtgtagtaggtgattgcactgtaattgactgaggaatatatgcactctttttttttctccttcttttgccaagatacataggattatatggacttttagtcacaggcagatcagtagcaatggtgtgacctgcacctgcttgcagacgaggaccattcccaatattcgttcgattgtgtgtctgctcctgcagatcagaccaggccgtcaaaatcatcgactgttcttgctaagatgctgatataaagagagaagatgccgattgggtaagagataatgacatggtgaagtggagaggaagatgactgggtgctttacttgctgctttatttagtatataaaataaaggcttactaaagggaaataatgtggaacagtaagttgagaagttccgtcaaattagtagcaatgtggccaggtcgtaaagatatctttcagttatgatctttttccaaaggcaccctaacttcactttgacacggcatccagatgaagaacatcttgacaaaaattaacaaatgcaacgaataccgtggattctcaaatctcctgtggggaaacaaaacaagaaggttcaagttgtccttagcttttgttaactaattaatagataaaaaaatacagctttataactagagatgactagaagtgcggtgatatacatgtgactttgcttgcgcacggtgcacacgttaacggcgggggaaccggatctttgtcttcttccaagatgcgataacacaccagggcctgaaagatttagcattaaatatgttgcaccaattttggtattataaattttggatgaggtgtttaaatatatcaaaaattttaatattttgtagcactatatcaaaacgagaaaagagagagctcgcaactcagtgcaattttgcacagttttgagaccttaagagtctcaattgctaaaacattataaggccacgtctttggagaaagtaaatttacggttccaagcaattggagcgttctactctctccgttttgaaataaagtgcattttatcatttgagaggtatctctaaatatagtatattcaggaataagaagataatgtttacttaaataaaaatacgggagataaaagtaattaagtgcttactatattttctataagtaaacttagattgcaccctttaatcatatagaataggattagattttaataaattaggaagttaagtgagagatatatgtgtctattgttctctctcttattttgtctgaaaatagccataatatattgtattaggacaaaccgatcaaatattaaacacgtgacatgggcgaattctgacttgcagatttgttattactgacacttggtaataaatatatacacagtacggtacgcagttagctcttaagtacctttgactttgataaacatttttttaatcgtctgataaaaaaaaattggtttatgcaaatgttagagcactcgattcacacaaaccacaggctgaaggatatccactgaaaaacataaaccaccagtctattagacaattattctgtcttctttcctgcctgcggtcttggtcctcttgcacaaatgcaccaaggtcccatcagttcacatcatctaaaaccaaagtgaaactgcacaggaatacagtgtgtacacctggattcgctctcggtttttgccttctgcgctcagtattcaactagtcaagtcaccaaaccatcaaagatagttaactgcaaggagctaaaccagaattagagctaccaacctctccctcttcttcctccgttgccaagctctctgaggagaagaatggctgcgctgctctatctcgcccttcttctactgctgacctttccggtttgctctggcgcttcgccatggcaaaccatgaccaccggctcgcacatacgaggagaggaccatgacaaggtcatcctcctctcgcctgatgctaccttctcctgcggcttccatgaggttggcacgaatgctctcaccttttccatctggtacaccacccatgccgccgagagaaccgtcgtctggacggcgaatccctattccgcagagagaggaggatactctccagtgaacaaatatggctccagggtatcgctaaaccgcgacggcaacctgatcctcacagataccaacggttccatggtgtgggagagcaagacatcgtcaggcaagcacacgacagtcaccctcctcaacagcggcaaccttgtgatcagtgactccagtaacaagatcatgtggcagagcttcgattcgccaactgacaccttgcttccggggcagaacctgacaaaggacacaaggttagtctctggttaccatcacttatacttcgacaacgataatgtcctgcggatgttgtatgacggcccagagatcacaagcatctactggccaagtccggattacgacgctcaaaaaaatggccgcaataggtttaacagcaccaggatagcagttctagatgacatgggtaatttcacatcaagtgacgggtttaagatagaggcttcagattcaggtccaggaatcaagagaaggatcacaattgattatgatggcaatttcagaatgtacagcttgaatgcatcaacagggaaatgggacatcacagggcaagctgtaatacagatgtgctatgtgcatggactatgtggaaagaatgggctctgtgactacttgggtggcctcagatgtagatgtcccccagattatgagatggttgatccaacaaattggaacaaaggatgcaaaccaatgttcttgactgatggaaaccaagcacgtgaggaatttacatttattgagcaacctcatgctgattactatggctttgatctatcctccaataagtccatcccatttgaagcatgccggaacatctgctggaacagcagcacctgcttatcattcacatacaagggtggggatggttggtgttacactaaagatttactctacaatggtcaggtgttcccatatttccctggggacaattatatgaaagtaccaatgagttttaacacttcgacgtactcaatctccaagcaaaaaaccctcacctgtggacccgcaggttctgagaatatgctaggaccagcaagtatgtacggaacaaagaaggacaacataaattggacatacttctatgtctttgctgcaatactgggagctctagagttgcttgttattgttacaggctggtaccttttcttcaagaagcataacatacccaaatcaatggaggatgggtacaagctagttacaaaccagttcaggcggtttacataccgagaattgagggaagcaactgggaagttcaaagaagagcttgggagaggaggtgctggaatcgtctacaggggagtgcttgaagataagaaaatagtggcagtaaagaagcttacagatgttcgacaaggagaagaagaattctgggcagaagtgacccttattggaagaatcaatcacataaacttagtcagaatgtggggattttgctcagaagggacaaagaggttattagtatatgagtatgtggagaatgagtcactggataagtacctctttggtgagagaagtactgaaagcttgcttggttggagccaaagatacaagattgcactgggcacagcaagaggtcttgcttacctacctacatcatgaatgccttgagtgggttgttcactgtgatgtgaaaccagaaaacatacttctaactcgagatttcgaagccaagatagcagactttggattggccaagctcgcaaagcaaggtagcactagtttcaatttcacccatatgagaggtacgatgggctacatggcaccagaatgggcattgaatatgccaatcaatgcaaaggttgatgtgtacagctatggggtagtgcttctggagattgtgactggaatcagggcttcaagtggcataatgttagatgaaagacaaatagattttctggagtttgtccaggaggctaaacagattctatctaccgggaatgtcagtgatattgttgatgatagattgcacggacactttcatacagagcaagcaattgcaatggtgaaaatagccttttcatgcctcgaagaaagacgcaagaggccgacgatggatgaaattgtcaaggtgctcatgtcatgtgatgatgaagacgactaccatcctgcttattcatattgacttgcaacagatgcaaagtggcaggcataacaagtttcatgccaattgtacctttggtcatgttactacaggaacaatgatttaagatgaactgaactgactgatgaaacatattgtaaagtgtggcaaattgtgatatttgtgtttagaatatgttgggatatctccaaatacgatacattaggatcatgtaatctcagcttaccttatgtctaagagaggtgtcttgccccataagtggagatccacccatgaggctcagcaatacaattcgattccacccaaatatattcctcctacatgttatcatgagtctaagttcacatatgaaccctagctagcactcgcttttgcactgcacgcaccttgagagatcaatctccaagactgagggcagcggatcctattgatccggccactatcgcaatcgcccccctcttccttgtcaatttttcctcgatcagccgcagtctccatccccgtacctcgtacaaagtttc

SEQ ID NO: 4324 - DNA, 13484 bp, Sorghum bicolor; identical to SEQ ID NO: 3616

SEQ ID NO: 4325 - DNA, 3508 bp, Sorghum bicolor; identical to SEQ ID NO: 3605

SEQ ID NO: 4326 - DNA, 8940 bp, Sorghum bicolor
acaaccaaagtagaactaaatcttcttaatttcaaacctaaccaaagcaattcctgaatgtcacgtttacctcttcaagggccctcgagctagcaaagaggccgatggtgcaagagctgaggacgaggcggatgtggctacgcgcctacgccgcagagggagacgagagccaggatgggccgatggggaaagaggtaggggagctaggctccaagaggagaggagcactacgggccacaacggaccacccagcgagcctttccaggactcagacacggccgtgcagcccgtgcttgctcgagcgctaaacatgtactagtaggaagcaggccatgctcgtgcttaggaccgggctaaacttgtggacctcgtgccagcccatcgcggtgagcgtgagcgtgagcctgagccgcgccgccggctgccctctcgatcacttgtagctgcgctcctccacgctgctggcgacattcgtcgccgtgggttccacggcctagctaccggcctaccgccgacgcgactcgactcgactcgaccaggggaaacttgttggatccgaaaatgaggtggggccgtggcgttagaggtggagggccggagcgcggagacgtgtgccgcgctgcctgtccatcaccatgagaataggggcccttgagcggctgatctcaatctcaacagaaacattcggtgggcgattcttgccttccgccaaccacgcccggcgccacactgtctgtttgcttctcacatccaagtacggtggcgccgagctggcggccacgggacgcgccagctaccgaaagagagaagccacctttcgctcctgatcctttgcttcgcactccgagaaataatctgggcatctggcgctgcactaaccagggccgaagaatcatcagctgagcaacttgttctgaaaaaggagttcgcaaaacgaagttcctgtttttttttcaaaaaaaaaaaacagagagaccgacgttcgagacaggcgagacgtgcttgtcaaatactggcgcctctcgtttcctgccgaacctctctcttctgcctgaagaaatccttctccaacaagatgtaggaccattcaggttcaggacatcatgatcgagctgtcaagggtcttgacaaactgcaaccagagtaccagaccacttcgtagcttcttaattgtgtacatacagtatgtacgtacgtagcaagtacagcataggggatacactgccactgcaaacaggccaatcacagtgttcagaatcctcatgcttactgcatgctcaaccggcgtgtggcaaggaagttcaaaaagactaccaagtaccaacgactgggcatcggcaacgattccgaattggatgaatcagtctctgaagttcaataaaaaacaaaagtagaaatctgtgtatatctgaaaaaaaaattacatattcttgcacagtcatgagaaacaggtgaggcggtgagctactgccttttgccaggctaagcctgcccaacgatccaactgataattttgacctgtccttcgctttattcttgccaaaacctggttcttatgattggaaagaagtggtatgtcacaacaggctcatttaagtaactcttcataagcttcttattaattttggtgatacatcaatttgccagggccaaggcatgaagacaaccaggaaaacagttcagctacgccgccagccccatctgaaaatgaatgaattctgcatgtgtgcatcggatgagagattgagatccagcactcagttgggcactagagtaggctgcaactgcaactgccgctccgggacgggcagtaggcaccgacattgcactaataacaaatccggtgtaattatgtaatccaaaaatactaataacaaatccggtcgtctcagaacgaacttccactggcgtggaaggtgaggaacgcgcttctctgcggtcaggcggaaggtcccctatttggtgggggtgggggaagaaggttggcagttccgtgtaccgcgagcccgcgcccgaaatttcacaacaccaaggccgagccaaaccgaccgtaggggggagaagtacaaggccaccaccacaaggagtgcgaggcgagggcgaacgccgggggcaagcgcggcggcggaggcagcaatggcggcgctgcagagctggcgcaaggcgtacggcgcgctcaaggacaccaccaccgtcagcctcgccaacctcaactccgacttcaaggtccgcccgccgtcgaatcctcactcacccgcccatggtttcccccgaatttctcggccgctaaaaccggctcagttcgtgaccgtcggtcgtgtgctcaccgtcggatctatggccgcactcctgcgctgcacgcctgggtttattgattctcttcggcgtgtggtttttgtttgcccaggatctggatgtcgcgatcgtgagggccaccaaccacgtggagagcccgcccaaggagcgccacctgcgcagtgcgtggattcctcccatgttctccctttcctttttttttgcttataatttgattttaggaactagccggatcgtagacgtagagtgctgtggtttctcaagcatttctcggtttgagtttgctgtctgatgggtttgtcggtgccggtgttgcagagattgtggcggcgacgtccatcgcgaggccacgggcggacgtcgcctactgcatccatgcgcttgcccggcgactcgccaaaaccaggaactggattgtaagcactgttgtactccggttcagattatttgattcgttctgtgtgtgtattcgatgctatgatggttgctttagcttctagattggtgccgatcttgtaatggtattgggtgatcgatgaatctcaaatgcaatttcgtttgttaaaaatgtgatcatactgtgaaactgaatgcagactaaatgatcaattggcaaatgtccaagtttcatgtggggttagtgaagatgcagctattgatttgggcacctgaacctcagtccttgcacactggagagctcgagctcatatgtttagttatataatactataatagtatattgtgttgtgagtctggaattgcaatacaaattagacctttattatctgtgcttttggtggcttgactgtatatgtactagttaatgtggatgcgggaacaaaaacagaaagagacgcgactgaggatttgttattttgcaatgaagatattatacaaccaagttgaaatttctttgcatagcataataagcttgtttacaaaagcacagtgaaaattctatatttaacacaattcttcactttttgtggtcacttttatttgaactgagaattgttgatttaaattgtgtggttcttttctgttgactctctgaagcctgtatgacaccctgtaatgttatgtccttggattaaactctttttttaatggttagttttttatcttacctgaattgtttgatggagttcagttgagatggcacaactctgactgttctgtgctaattttttggtttccttacagctatcctagcagcaactatctcaaaattatttggagttcttgtattcctattcagaatgttctgcttccttttgtaggtcttcatcaacctttcatcttagtagctaataatgtagaatagacctgatcatgggccacccaaccaacccaacccaaaaacacctaacccgactaatgcaccgggtgagctcgggccgtgatttttgaactgcaagaaccatcaggttgggtgtggattgtaatttttgaaccacaacaaccattgggtcaggcgcgggctgcattttttgacctagaacctgaccaaacacagagaaacccaacctaatctgaaaaatagcccaacccaacccgatttgtccgtcgggtgagcacgggccaaaaaaatttgacctgccactgcacttggtctggccaaaaaacggttgggcttttttggcccaatctgatgcttgaataggtctaatgtagaatgcgttcttcttgggttatgtaggttgccctgaagacacttgtagtgatccataggcttcttcgggaaggtgatcctgcattccgcgaagagtttcttacatttactcagagagtgcaaattttgcagttatcaaacttcaaggatgattccagcccaattggtctgtatttcttcaatttaaatttgacctgattttttatttggatcattaatattcttccgtatttccttctaatctattatctttatattttggaattatatccagcttgggattgttcttcatgggttcgcacatacggtttatttttggaggaaaaactagaatgcttcagggtcttgaagtatgacattgaagctgagcgtttatcaaagcaaggtcaaggacctgaaaaggtctggactctgacatgctcattcagtatttttatttcatttttttgccactttacaaaagctgtgcggtgttatccattatttgtagctatattacttgctggtgatacttcaacatgtaattaaacttctttgttttcagggccacagtagaaccagggaattgaattctcaggacttgctggagcaattgccagcactgcagcaattattatatcgacttattggttgtcgggtgattctctcttatccttgcaacaaataagttggattagtgaaagaaaccggttttataaacatatttagttctttggtctgtatttttctttttttaactaagccaacatgccactgcttttccttttgtattcaggcagaaggagctgcaaataacaattatctggtgcagtatgctctagcccaggtaagctctgtttttactgtcatttttttgcttcaacttctactaggtgatctttatattttgtttaacgagccaactggtcatttgtgaatctgtctggctatgtcttgcacttcatgacctattcaatgtataatagagcagttcagttccttctatgtaatagtttattcttagatctggggcatcttacgcaatttgagtgaatcctgcttctgtacaggttcttaaagaaagcttcaaaatttattgtgcaataaatgatggaattatcaaccttgttgacaaggtatattaatcttctaagtaggaatttgtctatgttgcactgagctatttctacttatgcttcctgtttcctgttggctgtcaaacaactgtgcagttctttgagatgccaaagcatgaagcactaaaagcccttgacatttacaggagggctggccagcaggtaactgccctacacggtagtaatgtgcaatgtatcttaacttgaagaagatcaggatgcaacaattgtgtgtgcttagacgcttatctgctatttttacccatcaacatctttgatgcttcaggctggaaacctatctgacttctatgaaagttgtcgaggtttagagctcgcaagaaatttccagtttcccactttgagggaggtgaggtcatttgtctcagcattcgccatgtaaatttttactatgtaagagtatgaccagatactcagatttgatttatcttattttcagccaccacaaacattcctttcaaccatggaggagtatgtgaaggaggctccacgtatgatgccagttatagagccactggttagttcctgggttctaataaaccatttggatttttgcatgacacctttacattttataacaagaagtaacaagtaggagcctcgacgatggtatctgtgtgatacttcctgtgccttgcatgttaaatagcatatcacaaccagtggtgaagctagagcaaatagagggggggttgccttttgggtgcatatacatgttccacaggggatgcttgtatggtgggaaaattagataacatcattgttttaactttttttttttttttggggggggggggggggggctttatttgccccccccaaacccaatggagcttggcctgaaccaaaattcattcttcttttaaatctaaaccaaagggccccaactatccgatgtagggaaacagttaacatcaatgtttgtggcccaatgaacaatttctcttttactttggtatttttgtgataattgtgtcatctgtgaatgtcacacgctctttttgggagataaatgattactatcaggtcaagtttataccaggcgatttacttattgtggaatggattcttatttcatcaggagcttcctgagcagcttcttctgacatacaaaccagaagaagaagaagaagaagaagttcgtgagtctgttcctattgcagaggagaaactgcaagttgttgaagaacctgctccagttccttcctcccaaatagcttcgcctcccaggcctgagattgcagatactggtgatttactggtaagtatgaaaatggtcatatgagtgacattaatgcttttacattataatctaaatgtcatatttcctcataggggttaggtgattcaacccatactgtgtcggcaatagaggagagcaacgcattggccttggcaattcttccgacaggtaattaatcaaatagttctgttattaattatatcattagttctgagaagtgtatgcatgcatgctgcaggtgttgataattcaacaactacacagcaagatagaggatttgatccaacaggatgggaacttgctcttgttactacaagcagcaacatgactccactgtctatggagagtaatttggttcgtttcttaatctttcattgaggaatctacctttcattggttgccacagtttttccaaatcaaacattttagagatgctgtgctgctatgtgctatgtactcttttttgtacaactttgttaagctcctgtagttctactgtcaagcttaactcatttactggttgaaaagtaaaaaccagtacactggtatgctggttcactgcagttgaaaactagtagcaatgagtagctaattcctattttatcaaagtgcaatcacaaagaaaagtaaatttactattttgtggtaactcgtatgaattactctctagagcacctttttgagaagctgtattttgcctccttgattgcttgggccaattgacagcaccacttgccatctacggagactcaatgagctttctggaattttgtagtatggataaaacttccagaacatataggaactgagatgcgcccaatctcaaatgactgatggttattcccatccacagccgttggaaaagcttcttatgaatgttcagttgatagttgacacttcagacaatactagaggaaatttgggattcacaactctatttcttgtcatttcatgaattgccaggtggcatacattgcctcattgacatttgttgttacttttctacctcatggcatcattaccatggtctggaaaggtgtaaatcattgtatggctcaattgatactttctgcttatgcaacagtcgtttggattttgatagaacttgacagcatttctgctaactttagaacgtttgctagattctgtagatgaaaccctgcctatttacaggttgctctccattggtaatgaaatatgttctggagtacagtgtgcagattgatgaactatgactaaacaattaatttattgtgtggagtattgtttagcttttctcaaaaccaaaatatggtctttctgtgttccaaaaaaagaatgtggtttcggtattaccaacgattctatttcagatcttattgtgaggtatataacatggagtctttttctatttgtagggtggtggatttgacaagctcacattggacagcctatacgatgatggaacctacaggcagatgcagcaacaacagctatacggctcagcccctcccaatcccttcatggcaagcgatcccttcgccgtgtcaaatcaagtagctcccccaccgtcagttcaaatggcagccatggctccacagccccagcatttgcccatgatgattgaagcaaatcccttcggaccaccacagcagcatcacgcgggcatggctcctgcagcaaaccccttcctcgatgctgggttcggtgcgttcccggcaggaaatggaatgcatccacagaccaaccccttcggaggcgccgcacaacttctctaggcatatactttgcattacatagaagatgtgcaatctgtagatatccatgcaagacaagcaattggcgtgtctggaaccgcttttcaccgtcagaccgttaccaatcctatgttgcaccatcttcatctcgcccttccttattaggccttggccgcttggcctttcttgtgtagctttccgttttgctgtggctggtttccatcttctgactgggccattgcaccctctcattgtaaagaaatttgtttcgggctttcggctgatgtaaaactacgtgcaataagcagcagagcagcagtcctggacccaactaactcattctttgtcaaccgtcagcgtttgtatttagccttgattagtttgtgaaaagaaaagtttttagctactgtagcatatttgtgactagcaattagtgtctaattatagactaattagactcaaaagattcattcataaaatacatacaaactatacaattaattatttttttatctatatttaatgctccatgtgtctaagcatttgatgagatagggtgaaaagtttttaggtaagaactaaacaagacctttgtctaacttctagcgggggatatttgtcttcggtcgtgcgaatatttccgcaattggtcccaaacggacaagaaaactttcaatccaatttgctctacctctcggttccctcttagtgtctattcctcggtaaacagcccatgggaattgtacaattgcacacaggactttctgtcatgattttccggtcgagcgaacaggtgggacttctcctatacctacacctattgaaatatttatcgacttc

SEQ ID NO: 4327 - DNA, 5902 bp, Sorghum bicolor
aatatggtctttctgtgttccaaaaaaagaatgtggtttcggtattaccaacgattctatttcagatcttattgtgaggtatataacatggagtctttttctatttgtagggtggtggatttgacaagctcacattggacagcctatacgatgatggaacctacaggcagatgcagcaacaacagctatacggctcagcccctcccaatcccttcatggcaagcgatcccttcgccgtgtcaaatcaagtagctcccccaccgtcagttcaaatggcagccatggctccacagccccagcatttgcccatgatgattgaagcaaatcccttcggaccaccacagcagcatcacgcgggcatggctcctgcagcaaaccccttcctcgatgctgggttcggtgcgttcccggcaggaaatggaatgcatccacagaccaaccccttcggaggcgccgcacaacttctctaggcatatactttgcattacatagaagatgtgcaatctgtagatatccatgcaagacaagcaattggcgtgtctggaaccgcttttcaccgtcagaccgttaccaatcctatgttgcaccatcttcatctcgcccttccttattaggccttggccgcttggcctttcttgtgtagctttccgttttgctgtggctggtttccatcttctgactgggccattgcaccctctcattgtaaagaaatttgtttcgggctttcggctgatgtaaaactacgtgcaataagcagcagagcagcagtcctggacccaactaactcattctttgtcaaccgtcagcgtttgtatttagccttgattagtttgtgaaaagaaaagtttttagctactgtagcatatttgtgactagcaattagtgtctaattatagactaattagactcaaaagattcattcataaaatacatacaaactatacaattaattatttttttatctatatttaatgctccatgtgtctaagcatttgatgagatagggtgaaaagtttttaggtaagaactaaacaagacctttgtctaacttctagcgggggatatttgtcttcggtcgtgcgaatatttccgcaattggtcccaaacggacaagaaaactttcaatccaatttgctctacctctcggttccctcttagtgtctattcctcggtaaacagcccatgggaattgtacaattgcacacaggactttctgtcatgattttccggtcgagcgaacaggtgggacttctcctatacctacacctattgaaatatttatcgacttcttttcatccatcttactatgtatagcaaaatagatatattataaaaatcaaccaacttataatttaaaacagaaagaataatcaacaattatcaattctaaattataagactttttagttttttttaaaaaatttacacatagcttttgctatgcacttaaatacagagtatacactaaagtctagatatatagtaaaactaatatatagagaaaaactaaaatgtcttataatttgaaatggatcggagcatgaagtagggtcaagttgaagacttgaagaccacgattcattttattcgaagtaaataatctatggcacacatttacagccaaatagataatgtatcctatgaacagtgacgttgtatataccaacaaaagagatagggtatctatacctactatataatttatttataaacgccatgcgaatggggtggcggttaaaaaagctttgccacggaatccggcgaggtccggcaataattgcaattattatggaaatggaaaaggacgccggcgcagtgcagcatccactcacagcgggagaggggaccggtcctcctcacggttgatcgcgccatcgcggtcggctccattccactggccctcgcgtcccacagtcccactcgccgtcgccacggttctcgccgcctcgcattctaaataccacccctcgccatgattcggcggttctgaatgcagcagcgcgggctctcctgtaaccgccgcgcccggagcttctcccgagcccgcgtcgccgtcgagggctgttaacctcgcaacacccctccccaagcaatcaacaaacgaacgcgcgggcacgctgtgatggccgccgccgccgccgccgctgtgaatggtaagcgatcggcccgttgcgcgctcatttcgcgtttgaattggtttgagataactgtcgagcacatggcgtgcaggtttcgtatgaggattgaggcctggcgttgactgtggggactggggactgatggattctggctgtgtgtgttgttgcagggagcctagacgtgcatgagaggaaggcgcagaggagctactgggaggagcactctggggagctcaccctcgaggccatgatgcttgactcccgagccgccgaactcgacaaggaggagcgccccgaggtgatttatcccgcgacgatattcttcactcggtttttttaaaattttggttcgtatgtttgtgatgcatctacttgaacctgaggatatgataatgctccttttgtgatgcatctgtttgtgattgtagccttgtaggattaaaactttgatatattagtgcttctttttttttgtaggttctgtctttacttccttcttatgaaggaaaatctgtactggaactgggagccggaataggtcgctttactggtgaactggctaagacatctgggcatgtttttgcagtggatttcattgaaagtgccattaaaaaggtaatgagatttacactttcccctgatgtaaatattttcaggcttggtagctgaaatttgatcgttttgtagaatgaaagtacaaatggtcactacgacaacacatcatttatgtgtgctgatgttacatccccgaacctgatgattgaagcaaactccattgatctgatattttcaaactggttgctgatgtatctttcagatgaggaggtaatgatcaaaccatacattagaatcataaactgattcaaggtctattgctaaagaaaaaactcaaatcaacttctcgtgtggataaggttacatttatcatttgacctgaattgggatatgtttgtccttccaatttttctgactgtctctcttactgtagattgacaagttggtagaaagaatggtaaaatggctgaaggtcggtggctatatcttctttagggaatcttgcttccatcaatctggagatttagaaaggaaagttaacccgacacactatcgagaaccaaggttttataccaaagtgagaatgcaaacttgcctagtgtcgtccccttttgcttttatgatttcagtcaattcaaagtttttttgttcttgcccactccactctttagttttcttagttgagtaccagctttctttgaaatagctgataatatcttttcccatctaggtatttaaagagtgccaaacctttaatcaggatggcacttccttcaaactttctctggttactttcaaatgcattggagcttatgtaaacatcaagaaagatcaaaaccaggtacttctctgtcctcgcacatgcacatagacatgtgtttccattcctgtgaaattagtgatgaacacgactccattgcttccagatatgttggttatggcaaaaagtaaattcattagaagatgggggatttcaaagttttttagacaatgtgcagtacaaagccactggaatattgcgctatgaacgtatctttggagatggttacgtgagcactggtggagttggtgagaggacacatccctttttgtcattttttgtgatatcatatttgcagtgccattaaatgttattatgtatcactatccaccagagactacaaaagaatttgtggataaactggatcttaagcctggacagaaggtgcttgatgttggttgtggaattgggggaggtgatttttacatggctgagaagtatggtacccatgttgttggtattgacctttccattaacatgatattgtttgcccttgagcgttccattgggcgtaagtgctcagttgagtttgaagtcgctgattgcaccactaagacgtacccagaccacatgtttgatgtcatctacagccgtgacactatccttcatatacaagtacgatttacacttaatgcatgcagtctttttattccgagatgttagagctacattttgatcatggaaagtatcttcatttggagatgtacttagaaactctgtcttttttttggcttaaaacatcacatgttcatggcatacctatagttgactctttgacactttttttgcttttgactctgcaggataaaccctccttgttcaaaagtttcttcaaatggctaaaacctgggggaaaggtcctaatcagtgactactgcaagagtcctgggaaaccatcagaagagtttgcagcatacattaagcagaggggttatgatctccatgatgtagaggcttatggacaggtggttcttaggtcttaccttatcttatttttgtttgcatggttaatgcttaacacaattgctttgatctaaaagtataattccgtttgatgagtaataaacctctgtcaaattatccagatgctcaagaatgctggtttcagtcatgtcattgctgaagaccgaactgaccaggtctgcccatctaaacatgcgcaatctgcatgttcatattcttgtgatcttgtctactaagatgcttggataaacagttttaatgacacactatgtgttgtgtttcagttcctcagtgttttacagaaggagctagataaatttgagaagaacaaagatgatttcctgtccgagtttgcccaggtgattcgacaaagcccctaagaagttcaacgatgaaaactcgtagcaaaaatgaaaatatgaaaagttcagcaatgaactggccggctctctttagaagcctgcattctttctctgttgctctaaatcatatctaaatctttgtttcatttgttatcagggggattacgatgatatcgtgaatggatggaaagcaaaactgcagaggacctctgctcgtgagcagaggtgggggctgttcgtcgccaccaagtgaacggtgatgcccatgtggccttacaaataaaatggctttcgcagttcaccgatgggattgacttcatagcgtgattttgcattattgaactctgagagcctatcctatttctttgtgctttgggactggtttaactttacggtcctgtgatcgcactgaaacatagagcgtgctgtactgatgccacctttctgtggaagtgtaataagctccacgcatggctcggcatgcggctacatggatgatatatgcacatgaaatttggtatttccaaaaggattttaaaaatgattttgcatcttgaccaaagtgcatatatagaagcattgaagatgtgcatcattttaaattttttcaaacttatgactacgtgtttcaatagaattattatcacgattttaccgaaacaagagattcacgctgaatatttacccaccatatatatgtttgtgccatagttcttttcttcatttcaagataatgcttcctctgtttcaaattataagtcactttgaatttttggatctatgtttagatatatagcaaagtgaatatatcaaaaaagttaaagcgatttataatttagaactagtttcttgccaaattagctgtaagcgaattccagtgcttcaaaataagggcaaattgtttgctaagtctgtccaaattcagctaaattttggtaggaaaatgaaagcccccccgcagatcccgaggtggatccaaagcatccggccaaaggacttccttttgtcctccacgcttctatgtacacgtatacaagcatacggctcagtttcaaaaaaaaaaa

SEQ ID NO: 4328 - DNA, 13737 bp, Sorghum bicolor
actgagggagggagggagggagagagagagagagagaggaggaggaggaggaggaagacgagagagaaaagaaagaggaggaaaacaatagaaagaagacgtgtgcaccgctatatctctactcgggcacgcgtcaagaatgagggtcacatcttaactgtcacaaccagtcatcgccgctgcgtgtacgacctctccgccggatcctttgccgaccatagatgcatgcatatccatgtaccaacaaccgccggatccatggagaagattatttgatcagtgacacatgcatgtcccattacattacctactgcctagcttagcttttacacacaaaaagtacataccttagcaattcttttagaagctgtttggattcacagacttaatatctgttacatcaaatatttgaatgttaattagaaaagataaatacaatgtaattataaaactttttttctcaaatacgtaaaaaggtttacgcatctttatattgagatcaaaaaagtttaaatgttacaacaacatgctgcatcccatatgcactagaggacatgatgtgttacaatgttcccgttcctccctagcggaccaaatcgaaggctattatactcacgcactaaacaaccaaggtgccgggagcttaggcagggctcttgccgcgccgtctcgaccaccctccattgccaggttctggaaagatttctctcatggcttcgacatgtgatggacggaactcgtctatgaagatgctgtcatgatccttctgagccaaagaggatggtcgaggttggctgtctaggaaaccgaggcacttcataactagcagctcgcctgtttgaatgtcggaaacctagagagtgcctatgtggttatgtgtctgctcctaatcggcgagcttgtttggacttttctttgcataaatggtataccagcgtttacatgacttttaaatggtctaaatggccatttaggcgaacagtgcttgtatccgaacgatctcagcctctattgtggctgctagctaatcgcttgttttgcctagtgtctacggcacttggtaaacaataaaaaatacattgtaaaccgtttgtcgagtgctagctacaaaaagcgtacctccgtgtaggttagcatgtgtgttttctgccaaaaacaaagctaagcttctgtttcacatgaatcgttatataagcaaaatgcgatgccatcatgagcgagcacatcgagcacccactcccgaagtctccgagccatggcctaccagctgaccaaccaccgatcgcgcgtgttgcccatgctggacaaacatcggaatcatcagagtaggactcgacatgaccaccgtacaaggtgtcaggtgtgtatgatcgacatccatcgtgacggcggccaaacgaggccttgtttagttccgaaaagtgaaaagatttcggtactgtaacattttcgtttgtttatgacaaatattatccaatcatagactaactaggatcaaaagattcgtctcgtgatctacagctaaactgtgtaattagtttttattttcgtctatatttaatgtttcatgcatgtgccataagattcgatgtaaaagagaaatttgaaaactttttggttttcagggtgaactaaaccaggcccgagtgaacgcgagtgaaaggactccatctatcggcttcaacgttattctagtacccatcaaaagggaaaaccggtctgctggctaatgctccaccttatataggtacaaagggctgccacagggcagcaagcagggcaccagtagtgccaacaaagagagctattcggccagagagagagagagagagggcctgaggggccgggggggctaaataaggttgttcatggctgtgggagcgagagacggtggcgaggatgacggcggcggcggcggcagcggcagcgaccacgcagccggagccggcggggccacgacgacgaattcgaacaacaagcaggtggtggcgttccttggcatgttcaggtacgccgaccgcaccgacgccgcgctcatggcggtcggcacggtggcggcggtggccaacggcatgacggagccgctcatgaccgtcgtcttcgccgccgtcatcgagtgcttcggcgccggcgacgacgccaccatcctccaccgggtcagcaaggtacgttaattactgcgtacgtacgtgcctatatacacgtacgtgtttttttttgcgagcatatatacgtacgtgtttaatcagtttgtgcttagtatatggtatatatacgtatttatgttcgttccattccatatgcatgcacgcggcgcaccagctagctagtagttactttacctagtgacggtggatcggccagcagggcgctcatatctcatggccggcgtgcgcggtgttgctgacagattcggcagatctcaagccaaacaggctgggtgacggccggggaaaccgacccggcgctgagccgccgaccctcgccgttctcttctgctcgtatttaggtcttgttttagatgcactcaaaaacccaaaatttgacaaaattttccatcacatcgaaacttgcggcacatgcatagagtattgaatatagataaaaataaaaactaattacatagtttgtctgtaaatcacaagacgaatcttttaagcctagttattccataattaaacaatgtttgtcaaataaaaacgaaagtgctacagtgttaaaatccaaaaaaaattagatctaaacaagcccttattatattgccccggccgcctaggtacaagatccagcagtacgtattgccgtataggatatatgcacgcgccatgcaagcagcgtatgttaatttgcgtgtggcagatcgaggtggagccagaaaaaaattataggttaggcgagttctaaccaaaaaaataaaccacagggctgaccactgaccagatcacaccactagagagtatagaaatagttaataaattggtaactgagatgctcatgaacaatgccatttttattttgctcgtcttgcatatatttcgtgtatcgaacgaaccactgaaagctataagaaggattatcttagtatcaaaaagcagaaggattatctttatcataagtaaccaacaaggatggcaaaagctttatcgtagtttttattagactatgaaaaagaaaaaaaaaaaggagagatgagtatttacaaagcgcatgccgcgccctgcaccagcaacttcaaacaactttgctcgctgctccttggcatgtcgcgagcggacgctgcgtactcggcaaccggaggtaaggaaggactgaaggagattgggggtctggggatgtggagcgacaccaccggtagctgggccacccgccccatggcacccctagggtggctcccccggccatgtgcgtacagtacgccggccatatatattaaggtcttgtttagtttcgaaaaaatttcaaatttcgttactgtaacattttcgtttttatttaacaaatattgtccaatcataaactaactaagatcaaaagattcgtctcgcgatttacagacaaactgcgtaattaatttttattttcgtctatatttaatgcttcatgcatgtgccgcaagattcgatgtgacggagaatcttgaaaactttttagatttcgaggtgaaataaacaagacctaactttgtaattctgagtttttttatctaagattacaaaatgctcaaataaatgaattacatactcagacttaaaggtattcttgacttttcacattcatagtttgacactgttaggcctctcaatacatagtttcatggcacagttaccaaaactataaactagataaccgagccacatgagttttatagggatgaaactcctctctcatcttatgaaactcattcatttaatgaccctgccaagtcagcaattttgcttatgtggcatcctatttaatgtgcatgacactctcatgaaacatgcattgagattggccttagagttaatttgatgaaaatgacataaatggcaaaaaagtttagagcagtaataactatgagaacttaacttttttatggcttgtgagtaaccatcaacttttataatggcacgtaagtaaaagcctcttcctaattaataggcatgataaaaaaagtgcacatgcatccaagtattatatagattcaataagagagctattgtcttctctctctctctctcaaaaatctctccaccatatttcaaaccaaacttatatatattactaatctcaatcgagtcgttttcaaaaaagcaggcttagtgggccacatatatattattcttccacgcaccatacatatggtctggaaatccctcgtcatattcttttcacatgttgatatatcgtccctttcctttggtaggtcatattaaaacgatcagacgttagttgatctaacgtaatcaaaccgtctctgcagttaatacgtacgtccaacactagtacagtactacgtacaacacaagaggtttcaacgtgcgatagctcacggcgttttctgttgtcagctcactggacaaataaatctatgggtgaaatcttttttttttgaactctgtgaacaacgcctttttgtatttatatacacacaatccagacatgttaataatgcttttcgctgaagtaagctttacgttgacggcccatttctgtttgtgtcccctaaatcggaatgcttttctaccatctttgaacagacatcatcgatagtgctccttccacaatggtgacagcattcgtggttgtctgccggtaatgataatgtccacaacacaaactactaaataaacttaaccgtgattttttcaaaaccccctcagaggtggatatgattttgaaccgtctcagttaatacctcggattaattgagatggtcattttttattaaccgaggcgggtaatgtagatattcagaagatgaaagcagtgggcgagtaataaataccccatatattctaaattataaggcattttagttttctagtaatataataatatatattatattatattatattatattatattatattatattatattatattatattatattatattatattatattatattatattatattatattatattatattatattatattatattatattatattatattatattacattacattacattacattacattacgtatcaaaaaaagctaaaacgtattatacttttgtttgaaagattcggttcgcaacatatattaataagcaaggaatagagttgcagcttacaaacgcgagagacactatcttatatggcagaccgccacatgatattgaacttcactcaactaattaatcatagcatttggaggaattctaaggtaaataagaacccttccaccctgatatccaattagcacacttgtcctgatcctcgctgacacaactattcaatggccctgtttggatccatgggttagagttagatttagctatttggggctcaaataccctaaagtatccaaacatgaggggtagattaggattatttgcatctaacccattccaaaaaactatccccaaagaagtgtttatttggactatttgaggctatttgaggcggggcccaaaggaaaagggatcggctgtgtgtcgcacgggatccccactcgcgatgcctcccagccacgacccctctcggttaccagcactgccgcctcccagctcgcctcgccgccgcctctcaaccacgccgccacctccaagccgcgtcgccgtctcccaaccgtgtcgtcgcctcccaacaatggcaaaacagtctgcaaggaagtatagctagtgagtcgtcccctagctatcatcgccatgaaccactcttccagatcataagatcgtaccagttggacacggttccaggttagcacaaattgctccatgatgtcatcaggttccaaacttttctcgtgtagggacattctgtgaataggtgggcagcaatctccaaattctttatacatagcacgcagaagttctcctagcccctttgttgcagaggtatagtaacaaaaagaattcgtctttccatttctaggccacaatctcgtataggtcatggcgtgatgtgattttgaatcgatgcaattctaaagatgcagacgggaagaaacaacggggtgtgtgtggatagcaaggtcatccaagattatttcaaattagtttaaaatatactccctctatattggtaaccgaaatcatttttgacagcgacaagatctccgaagcataactttaacttcttatttttatagaaaattttattagaaagtggttcaagataaatctattcatcacatggtttccgcatttctgaactcaacaacttaaaagttatttatgacttatattctcaatatttgaccaaaatcttatctaaaatgacttggattatcaatatggagggattactaactctgtctcaaaatagaagtcattatatgatatgtgtggtgcaggtcgaactttttcaactttgactaggtttgtataaaatacgtgcaatattaaatttattatgaaagtattttaacgatctatctaatgatactaattatctactataaatattaatatctctttaaataaatttggtcaaagttaaaagtgcttaacttcttggaaagtgagaatggcatttatgttttgagatgggggagtattgtttagttcgcaaaatttttcaagattcaccgtcacatcgaatctttggtcgcatgcatggagcattaaatatagacgaaaataaaaactaactgcacagtttacctgtaatttgtgagataaatcttttgagcctagttgctctatgattggacaatgtttgtcaaataaaaacaaaatgctacagtacccaaaaacaaaaaattttgcgaactaaacaaggcctaggttggtttactctaacgtacatggaaaccaaacgagcttagcaaagaaaggggtgaaacgccaaaccataataaaattcttagcaacctatttccaaatcggataaccctgttttcgcatatttctacttgagaaggtttgggaaaaaggacaacatccattcaaactatctctaaaaattgtaaaatttgaaccaaaacttcatcacaagaagatgaatcgacccctgaaatatttctccaaaaatcacaagttgaaaaaaaaaagaccccctagtccctgtttctccagaaaataagcaatttgctcgaagaaaccaagtatttaaaatcacctccaaatattatgaaacttggtctagaccttaactaacccatggttaaggtaatccacgggatctttccaaaaggtccatactatttgattgttttttcccccgaagcttcactatttgaatgtaatacataacaatgtgtttttctccaggttatcatgtactacatctacctgggaatcggaacagcagtttcttcctttctccgtgagtatataaataaatatatactatacagattggacttggactacctgtgcacgtaactataataaacaatgatgtccaatagctagagaataggaattgaaacagttggcgttcttggcgagtcatatatatggtagtaaaaataaaaacaaagaaaatggaaagtttcgttatggtagcccattcacaaacatcccacgagtacaaaatggtcactgccaagtgccaccaatggaatcttggctattcccactatcacaacttgaagtagtatttgctaaggttccgatatttttcagttattcgcattagtatcaaaacatacacactaaaatctcgatggtttcaagcatgcaaagatggcaaggagtttgctacaatcagaaacaaaatgtggctaattcaacttacaacttcaaccaggaagagaatgaacttgtagcagctaaaaatgagaactctgtttagttggattatcagaattccaaacgattggctgaaacatttacttgctccagaggtgtcatgctggacggtggctggagaaaggcagtcaacacggctgcgatcattataccttgaagctgttctgaggcaagacattgcattctttgacgtggagatgacaactgcagaagcagcttcaagaatgtctgcggacactgtacttatccaagacgccctcggtgagaaggtaacaattcattattgctttggcaaaagaaacaaaaatatatgtctaacaaatttccagtaaagggtctttcatttctagaacataaggaaaaaggccttatgtacaacactaaaaaactgacttttcatgttaaggtagggaagtacatacagcttttgacgactttcatcggtggctttatcattggattcattagaggctggatgctggcccttgttgtgcttgcgtgcatacctccaagcattttatcctttgcaacagtctcccgactgcgagctcaaatatctcaaaagaggcaagaatcatatgaagatgcagggaatattgtcgagcaaaccattggagcaataagaacagtgggtgattctaatatttttaaatacaaattaatgctgataataggtgtttgcaactattcaatatcaataacatctcaaaaaacaggttgtatctttcaatggtgagaagaaagcaattgcaatgtacaataatcacataaaaaaggcatacaaggctactctcatggaagggattgtcactggtcttggagtaggttgcatattttttgttgtcttctgcaattactctctagctttctggtatggcgccaagctaatcatcggcaaaggatatactggagggcaggtcctcaatatcgtatttgcaattttaactggctcagtgtgagttttctaactgtgaactacatatgtaataaatgatagtaaaaaaggtactgttagactctttgattgaaattgaattgatatttgaaaaattaacataaccatttttagattttgacattgaggtttgattatttgggaacagggctataggtaatgcatcaccatctatttctgcaattgcagaagggcagtctgcagcacaaagattgtttgaaattatcaacagaaaaccagatattgacattaccgacacttctggaatagtattagaagatattgagggagatgttgagctcaaggatgtgttctttaggtaccctgcaaggcctgagcatttgatacttgatggcctgtgcctgcacgtacctaatggcaccacaatggctatagtcggggagagcggaagtggtaaatcaacaataattagtctggtggagagattttatgatccacaggctggtgaagtgttggtagatggtgtgaacatcaaaagcctgcagctccaatggttaagaggaaagataagtcttgtcagccaagaaccattgctttttatgacctccatcaaggataacataacctatggtaaagcggatgctacaatcgaagagatcaagagagcagctgagcttgcaaatgcagcaaccttcattgaaaagctgcctgatgtactttgagaaacactacttatttatgtatcttactcaagttactggcaattaacatcttgtcttccacctcatacaggcatacgagacaatggttggtcaacgtggttctcagctttctggggggcaaaagcaaaggattgccatcgcaagagcaatcctcaaaaatccaaaaatccttcttttggacgaagctacaagtgctttagatgtagagtctgaaagggtagttcaagaagcactaaataggatcatggtagggagaactacactcattgttgcccaccgcctgagcaccatcaggagtgcagactgcatagcagtagttcatcaagggaaagtagttgaacgaggtaagtgactcttcgacaccaattactttgtttttttttaatctttagaagcaatcaatcagtgtgaaaaagtagaggcagttcaattcagttttttggaaatcgttaaccaattgacatgtcatacaggtgtccatgacaagctgattaaggatcctgatggagcttatcctcagcttattaggttacaacaggcacatgctaaagaaaggcatgaggttccaaatactgatatgtcaggttcaatatataaaagtagaagtttatctttggagcaatcaatagacagagattctcccaggaacaaaggacatcactgctccacaaaatccactgggctgtctgaagaattgaacaaacaagtttttatagacagacaggaacaccaggaatctagtgatagtaaggctcctaagaaagcaccaattggacgactattcaaacttaataagccagaagcaccagttctcctatttgctgctatagctgcctttgtgcatggtcttatgttcccatcgttcagtataatgatgtctggtggtataagaagtttctactatccaccacaccaacttcgaaaagattctcggttttgggcattgatgtgccttctgttcgcagtcattgccctgatttcaatccaactggaatactttctatttgggatcgctggtgggaaacttatacaacgtgtccgctctttgtctttccagagtatagtgcatcaagaggttgcttggtttgatgacccttcaaattctaggtttggcttcttaaacattttttttttcaaatttcctaaatttttctacaactgtttggacatcaattttactgtttcattttatagtggggcacttggcgcgagactccatattgatgctttgaacatccgacgcctcgtcggagataacttggccatactagtgcagtgtatagtaacactaatagctggcttttccatagcatttgcttctgactggaagctcacgctgatcgtcatatgtgtgattcctgtaatgggctcacaaaattatattcaagtgaaattcttgaaagggttcagtgaagatgctaaggtgaaaatattgaatttcatggcagttaatcatctttatgttttaaaaagcaaagcatacctgatacttttcaaaatagatgaatatgtgcaatatttttagacagcatacagtttttcatataatattaataattctagatatattttgaagtttaaattaacaagaattaagtaagatttaatgtcctatcaaaagtttcacctaacaactaattggaacaggtgatgtatgaagatgcaagtcaagtcgtaactgaggcaattagtagcattcgaactgtagcatctttctgtgcagagaagagggtaattacatcatacattgaaaaatgccaagcttcaatgaaacagggcattagaagtggaatggttggaggccttggtttcagtttctcaaacttaatgatgtatctcacatatgctctttgtttctatgttggtgcactgttcgtacatgaaggaaaatcaacttttaaagacgtttttagggtaagggatacacatctgggatcatttaaatagcgacattttgttcagtgactgactgacttaatctggtaactggcaggtctattttgctttgattttcacagcttttggaatttctcaaacaagtgcaatggcaacagactcaacaaaagcccaggaatccacaacttccatactagctattatagacaggaggtctaaaatcaactcaactagtgatgaaggcgtaattctagaaaaagttgatggaaacatagatttcagccatgtaagctttaaatacccatcacggccagacgtccaagtgctcagtgacttcactttggccattccagccagaaaggtattgtttgcttgatgtttgtcatagttaattcataagttgtttgactggagggagtagttagctattcattgatcattgaaagaaatatggggatgggaactggggtcattgatcttgctaggttatcagccgaatctgccagccattcagcagtgtttttctctcacaaaaaattagccaacagtactttctgccatggcttatcagccaaacgatagtaccaagttagaccatgcgagatacttcacaaaagcgtcatggcaattctttgagcagcttaatttcaacaacagtataaatgtataataggaaaatatcagatttggctacaaatacaataactgtttgctactttgctcagataatgagtgttcaattcatcttaatccttaacataagtttcacaaaagtcatgtacaggtggtacaaaattcatttagcactctgcaaaatttcaagttcaaactccaatttcacaaggagtacaaaggcagacagtatgagatgaaagtaacaaaaacatttactatgaattaaggtttttttccatgctcctctctctctttagaatgcttgatggcccgcaatacctgcttcttactctttgaatttattttattgatgtacatgtcattcaatgggacaagaacaactggattgctggattctgatcaataaaaatgagcctaaaaacgaatggaaattaattctagttttcacatttttcctctatgatttgtactgatgaatttaaaaccaaatatcaaatgcagactgttgcacttgttggagagagtggtagtggtaagtcaacaataattgctttgctcgagcgattctatgacccagattctggcacagtctcactagatggaacagaacttaaaaaactaaagctgagttggttaagagaccaaatggggttagtgagccaagaacctgtacttttcaacgacacaattcacgccaacatagcatatggaaaacaaggagaagtaagagaggacgagattgttgctgcagccaaggcagccaatgctcatgagttcatatctagcttgcctcagggatatagcactattgtcggcgaaagaggaacacagctctctggagggcaaaaacaacgggttgctattgcaagggccatcttgaaggacccaaaaatacttctactcgacgaggcaacaagtgccctggatgctgaagctgagcgtactgttcaagatgcgttagaccaagtgatggtcagcaggaccaccattgttgtggcgcaccgactgtccacaatcaaaggggcagatatgattgtagtcatcaaagatggtaaagttgccgagaagggaaagcatgaatacctcgtgggcaagggtggagtttatgcatcgctggtagaactgcactcgaagtcagcataaggatatatggggacttacaagggggtcatttgcagtagtaggtagtcatacaacggaaacaaatccatgtaaaacttatcaattcgtacttctggtttgttataggtcagtcctaaactccatacaaagatagcaatggcatcaagtatttcatatggtgtagtgcactggactatcaataaattaatggtgaaaaggatacaaaatgacctaatcactgaactattaatatttagtcgacgagcagaagcatttctgctattccagagcccccaaattcatgcgaggcccccaaatgcactacagctttgcacgcatatgagtatatgacgcattgtttggaaagaataagttcggatcaaatgaagctacccgtcagcgaatttgttcaaaccaaaaattcaggtccagaacttaaaccggcgtacctttcgtgcaccaaggaccctttagtcgtcattatgatccaaccgacgctatcctagatgggacggccgtac

SEQ ID NO: 4329 - DNA, 4046 bp, Sorghum bicolor
ctggtggccctcctcgacggaagtgacgaagaggtggtggactggggcgacgacagccctgaccacacctttgccaagatgcaaggcggagaggatgcagagcacccgaggaggggtgccagcccgccgacccccactgccccactaccagagcttgcggccgtcgaagcccctggcggatccgtcgccacaaatggagattccggcgaatctgctgccggtgcgtcagaagagccttcaagccgcaagctgctacgcgtgctcctggagcagcgccgcccaagctgaagtccatgctcgtccagctggctccggcgcctgtgccaccacggcgagctcagaggaaggtctagaagcggatcgaccttaatgctctgttttccgtggagggatctggcaaggaacctgtgcccggttccaggactctggcctcccaatctgggctggactactctgattcaaggtgggagatgggcgactcggccgacgttaatgctcggctggcggagcccggcgttaatgcacggcaggaggagccaaaggaaccactttcaccaatgtgggagaaggccaagtccggacggcggaagcgcccgacgaccgtacctcttctggacaagggcgcggccatgccggcgtccgggaatgcacctagcgcgtccctggccacctttaaaagccgcttcgccggaagatgcttccgatgcctggcttccgaccaccaagttgcaagctgccgtgatcccgttcggtgcatcacctgcaaccgagtagggcacttctctcgcgcctgtccatcccgccgccctcgaatcatctccgacaagctgcgcgcccgcctcatcttcccccccgacaacatccacagccgcatacgcttccccccactaacgtcacgcacccacgccatccgccgcacccgaatcatctccgacaagctgcgcgcccgcctcaccttccccctgagaacatccacagccgcatacacttccccctactaccgtcgcgcgcccacgccgtcggcaataaggccgcgatggaccacctccccggccgtgcccaccagcgccctgcgcgccgctgcatcaacatcatgtgcgacgcggccatggacagggacgcaaaccggctacgtgcgctcgccgtcatcattgcgccgccaccagaagatgtgcgcgccaacgcgcatcaggtgaaggaggcgctcgtcagccaactgcatctgcctagacacaccatccgcgtcaccaaatacaacgacttggagcttcttgcagagttcggttcgccgccggacaagtcgagggctctgggcatgggatgcctggaccttggcggcttccttttccccatccgcccttggctctctgctggcggtggggaagaggtcaactggtggttccatgtgaaggtggtgatggagaacgtccccttggaggcctggaacgaagagggggtcaggctgatccttggcgactcctgcgtgttcgacaggttcgacagcaagacggcggccagggagaactcccaattcctgggatgctgggtctgggtgcacgacacctacataccgtcgggcaacagatgtggaccaggcttggttggatcggggtcgtctggactcccgctcactgcgaacactggtgtgcgggcgggatgaactccgacacgcatctgaagggtgggaacgtcgtcgctcacgctctccagtaccacgccatcggtcggtaagccgtgaccccctgcttgattcagtcaggtactccagccatggtgggccggtgcgtgcccacatgctctctgctgctgatgacccaatggtgcatgagcatgggtgttcgcagtttggtgtgccgctctgcttctcccccgactgcaacgacagtgttacctgtgcgtcgccggagtacaagccggtcagcaccaccttccgcccagcctgcccagaccctcacgccaacgacaacttcagccagtaccccaagcctcttgcgcagccttcagaggttgtgttcgggcctggggcacagcttgatggaccggaaccgagcgcggctgcgatggacgacatcttggaccgcgtcaccaacatggacattgatgagacagcccgtgacagcactgctcagggcactggaggtcctgcgaacgacggcaaggtagcccaagtcgagaaggacatgtatgaggtgttgtctgtaccaggggagccaaatgatgcagtgctgcctgttccaggggagtcgaatgatgcacatcaggccgcgacagatgcgtatgcctccttcgccgctggcatgttcagggcgaccccgacaccgctactccagcggccggacctgtcggcaccgatcaactcccgcaccaagaagaagctcgtggccccgacccgctcaagtgcgcgtcaggcagcccgcccatctgcggtcccagttgctgagcgcgccaagctgaagctcatgcgcgagctggaattcgtcagcgacaatagggcgccggcaccagatgcagctgtcacggcgtacgctcagctgtatggccatggcctccctgatgcagcagtcaaggtcctccgtgcggcaacgaagatggggaacaaggaactgaccaaggtgttggaagccattgccgcagaggtagggacagcagagctcgaggcagcctagtgtacttgtccagtgcatcagtttcagtagtctgcaatgtcatccatgtatcttaggttagcgccagcaccagccggtctccaaccggtcaagttaggattaatgtttgatgtttgtttcaagggcggaagggctgtgtttgtatggtgtgagcccagaatgttatcctggggcagtgtggtctgtggctgcttggcaggtgttttgtgctacttttcacaattaaatttcaatggtttgctggtcaactcctctgcctatgtctgtaattttgattgttgccatttctggttcaaaaatgagtgacatcaagatactgaactggaatgttcgtggcctcaattgtggcgcacggagagaaggggtcaaaactctgatccagcaggctgccccaaccatcatttgcctacaggagacgaagctggacagtgttgacagattcctagcactagaatttctgggtcagcaatgtatgcaatttgagtacttacctgctgagcatacaagggggggagtcctggtagcatggaactgggatctgatatgtgccggggtgacctcaaagaagagattcagtttgtcagtgaacttgacaatgagaatgacaaatgcttctttcttgcttacatcagtatatggaccgaatgaggacaatctgaaacttcagttcttggatgagctgattgactgtcagccagttcataggatgccatgggtgtgcatgggtctattccgccgaagaacgatgggtctattccgccgaagaacgatgggtctattccgccgggccctagacgcaagcgagttatttgagctcagattgcaaaatagaaggtatacatggagtcggtcgagtattgccaaccctcgtccatcttgatcgcattttctgcaacagcgattgggatgcgattttcccaggtgtctcactacaggcaatgtccagctccctctcagaccactcaccgctcctcctgtgcaaataccaacaagtaccaaggccggcaattttcagatttgagcaattctggaccagagcgttgggttttcagaaagttgtggcctcagcatggagcatccctgccagcgggacgtcaccaatgatgatcttacataatcgtttatcttgcacagcaacatcattacggcaatggagcaggtcactttttagtgaagcccgagataatccttagactggacattgcgcaggagtcaagaactctaacccagcaggaacaagagctacataagggaccgaaatcaagggtgttgggttgggccgtcgtcgaacgatctcgccggagacaatgttcacaccttatacagctaaaagagggtgatgcctgtacgaagttctttcatcagaaagccaccggtcga

SEQ ID NO: 4330 - DNA, 4436 bp, Sorghum bicolor
  misc_feature (1008)..(1752): n is a, c, g, or t
ctgctatgatctatatatcatttatgttcatatatgctactagtgcaagtaataatgtcacacacgtgtacatatatgttgtcactaatttgctatgaattttctagattaaattgaacataaaaatacctaaattcctaacaagaggaagaatacttgtgggagaaagaggcttcgggcggctattgttcacaatgtgttgaaccaggcggcaggccccgttggtcaagacaagggcaaaagcatcctctcgctgttgtttttctctctagaaatgctgaaatagttattttattgactgtggtgtctgcatactcaatttttaagctgatggtgtgcaatggcgccactacgggagaattgaaattttccgagtgtcacaggcttcctcgtgtgctaaaaatcgagcactcggagtgatggtgtgttgcggcactcggggaagagtgcttgggctgcggcgctcggggaagaggatttcttccccgagtgtctgagttgcggcgctcggggaagagggtccgatagcttttttaggatatagttagtccccacagaccaacacttcgtcttttctgcacactttgtcctcactcgcacgcacccgggaatcttttctgcacacactttgtcctcactcacgcgcacccggggaagagatttcttccccgagtgtctgagttgcggcgctcggggaagagggtccgacagcttttttaggatatatttaggatatagtcagtccccacagaccaacacttcgtcttttctgcacactttgtcctcactcgcgcgcacccgggaatcttttctgcacacattttgtcctcactcgcgcgcacccgggaagtacttcccggtcggtcacccatccctaaattgctctaggccaagcacgcttaactttagagttctttcgagatgggcttccgaaaaagaagtggcaacttgttggtatgagtctcctattaatcctattaagccctgggccgggtgttacaggtttcnnnnnnnnnnnnnnnnnnnnnnnnnnnnnnnnnnnnnnnnnnnnnnnnnnnnnnnnnnnnnnnnnnnnnnnnnnnnnnnnnnnnnnnnnnnnnnnnnnnnnnnnnnnnnnnnnnnnnnnnnnnnnnnnnnnnnnnnnnnnnnnnnnnnnnnnnnnnnnnnnnnnnnnnnnnnnnnnnnnnnnnnnnnnnnnnnnnnnnnnnnnnnnnnnnnnnnnnnnnnnnnnnnnnnnnnnnnnnnnnnnnnnnnnnnnnnnnnnnnnnnnnnnnnnnnnnnnnnnnnnnnnnnnnnnnnnnnnnnnnnnnnnnnnnnnnnnnnnnnnnnnnnnnnnnnnnnnnnnnnnnnnnnnnnnnnnnnnnnnnnnnnnnnnnnnnnnnnnnnnnnnnnnnnnnnnnnnnnnnnnnnnnnnnnnnnnnnnnnnnnnnnnnnnnnnnnnnnnnnnnnnnnnnnnnnnnnnnnnnnnnnnnnnnnnnnnnnnnnnnnnnnnnnnnnnnnnnnnnnnnnnnnnnnnnnnnnnnnnnnnnnnnnnnnnnnnnnnnnnnnnnnnnnnnnnnnnnnnnnnnnnnnnnnnnnnnnnnnnnnnnnnnnnnnnnnnnnnnnnnnnnnnnnnnnnnnnnnnnnnnnnnnnnnnnnnnnnnnnnnnnnnnnnnnnnnnnnnnnnnnnnnnnnnnnnnnnnnnnnnnnnnnnnnnnnnnnnnnnnnnnnnnnnnnnnnnnnnnnnnnnnnnnnnnnnnnnnnnnnnnnnnnattttgtgtgcactaagtgtacacctgttcccgctctattattatatgaagtccccacttacagtatatacaatgggcacatccatcgtcgtcatggacgacgcaagtctgtggcatatagtaactgatctgcctatatagattttctttctgtcatctctttatagttttccaaagaattaactacaactcttatatgactatatataaatctaggtcaaagcaagggcgtgtatgatcggaaaacgatggagatgggcacggttctgggtgccatggaggagtacaccttcaccttcctggccatggccgtggggttcctagtgcttgtgtatctgtacgagccgtactggaaggtgcgccacgtgcccgggcccgtgccgctgccgctcatcggccacctccacctgctggcgaagcacggcccagacgtcttccctgtgctcgccaagaagcacgggcctatcttcaggtgatcctcctcctcctctgcttgaacgtcgtcgctcgctgcattttagaagttcagggaatttgcggttaaaagtcaaacttatcttccctcgagatgataattttgaagattcgaccaattacatcaaaagcaaatagttttgattcgatcgatctgcctgcagatttcacgtgggaaggcagccattgatcatcgtggccgacgcagagctctgcaaggaggtgggcatcaagaagttcaagagcatgcctaaccggagcttgccttcgcccatcgccaattctcccatacatcggaaaggcctcttcgctacaaggtagttgcaaccttgtattgccaaaaaatcaattcaaaggaaaacacatctccgaggatctttcatccactgaagactgatttcacttgaaactagtagaaagtttagtcaaacacatgcgcgtgtctgcagggattcgaggtggtcggcgatgcgaaacgttatcgtctcgatctaccagccgtcgcacctcgccgggctgatgccgaccatggagtcgtgcatcgagcgcgctgcgacgacgaacctcggcgatggcgaggaggtcgtcttctccaagctggcgctgagcctcgccaccgacatcatcgggcaagcggcgttcggcacagactttggcctctcgggaaagccggtggtgcctgacgatgacatgaagggtgtcgacgtcgtcgtcggagatgcagcgaaggcgaaggcgtcatcatcggaattcataaacatgcacatccactcgaccacgtcgctcaagatggacctgtcggggtcgctctccaccatcgttggcgcgctcgtgcccttcctgcagaatccgctgcggcaggtgctcttgagggtccccggctccgccgaccgggagatcaaccgtgtgaacggcgagctccgtaggatggtggacggcatcgtcgccgcccgcgcagcggagagggagcgtgcgccggcggcgacagcagcacagcagcacaaggacttcctctccgtggtgctggcggcgagggagagcgacgcgtccacgcgggagctgctctcgccggactacttgagcgcgttgacctacgagcacctcatcgctgggccggcgaccgcggcgttcacgctgtcctccgtggtctacctcgtcgccaagcacccggaagtggaggagaagctgcttagggagatggacgcgttcggccctcgcggcagtgtgcccacggcggatgatcttcagaccaagttcccctacctcgatcaggtggtgaaggagtcgatgaggctgttcatggtgtcgccattggtggcgcgagagacctccgagcgagtggagatcggtggctatgtgcttccaaagggcgcatgggtgtggatggcaccaggggtcctcgccaaggacgcccacaacttcccggacccggagctgttccgaccagagcggttcgacccagccggcgacgagcaaaagaagcgtcacccatacgcgttcatcccttttggaatcggccccagggtttgcatcggccagaagttcgccatccaggagatcaagctcgcgataatccacctctatcagcactatgtgttccggcattctcccagcatggagtcccctctagagtttcagtttgggattgtggtcaacttcaagcatggtgtcaagcttcacgtcatcaagaggcatgtggaaaataattaattactttggatggactgcttttattaagaggaagatgattaatcattttcttctctctcgcaaaaggcttgtgtgtgtgtgtgtttgtattaaggtagagaaaaaaatataacacaccttaacaacgtcttaggaggtaataaatttttgtacataaacgctcagaatattcttagtgttttgtaaactatactgttatattgaacaatgatcaatctaaattgtggcgtcggctaggaggtctatgcccgggcagctaatcggcggcgacgctgcttacgcccccccccccccgaccattcgttagggactgttttaattaagacgcccatatagttttctaaaagaggagtattagcatggccggaggcttcttaatgtccaacaatagaggcagccagtgcactagttcgttcccccttaatatacaaagagtaaaatacaccggcgggcctttaacttggcgtcctgtgccactttgggccctgaacctgcaaacg

SEQ ID NO: 4331 - DNA, 5949 bp, Sorghum bicolor
aacataaacaccttcaaaaaactgagttggaccgacaaatctagagattaacaaagttaagtaaaaaagagattaacaaagttaggcgcggcactgtgaaaaaacccgctaaattcttctagaataaatccaaaaaatatggcactaaatcgaagacttgaatcttggtgcataggttccaccacaagaaattcaatcatcggagctatgattagttcgcaactcacgtctttttggcttgtgaaataatttatttttaaactttttaaattatgaattagtttgtttttcgacaagagcgtatatcaacagaggaaaataaaagctcccaaactagtcatcaaaactaggatgggttctgaatatgactcttctagaaaaaataataatgaggtagaaaagtgacaataagatctaaatgctggattttaaaataaaatcaagaatctaactgtccattaaaggtcttcactgtacaaacattatgagaataaagttcaaacactccttattttcttttccaaaatctagattttttattcactatctaaaatatgtgttctttactataataaagaacgaataagatcaaattggactgtaattttgattttaagattagatggtagatactaattccatccccaaataaattaatttatagaatccgtgcaaaccaaatcaaattattataagtttaaagtttaactaattttatagaaaaagagtaacgatttatatgatataaattgaatatagtatactctaaaattcgtaacacttttttttagaaatttatctaaagttttgaaagtttgatttaataagacaactcttaaaatttatttatatttattagagacagacgatccattaaaaaccgttgaaaccgtcaaaggcgccgacttgccgcctccgaatcccgggttacacgttcgcatcatcacagatcaaattcacaacacttcacaagaaaaaacggaggtcgctacgtgcacggcctcatgagcccacaccgctctacgctagctatgccttcacgttcacgatcccgtgcgaatctgttgactgttggtggtgcggcagggcacgggacgatggacccagagccctcatcatcagacacgtggcaggttcacgtgccggtaacggccacctcctcgcgcttcggagcccatggacctggtccagccgggaaccgtgtaaccccggcctctcccctctccccaccgatgaagggaaagcagaagcttctttccccctccctcccaaaaaggcatcaaaattctccgcttggaaaaatcttgaaaattctccgcttagaaaattcaactagattcggagcaatccaccatttgtttactcgtcgatcgagagcccccccattcgttaggggttagggtcgtagcgaggagggctctggaattggatcccaacagaggaatcacactcgggttggggggggcttgcagagaagggaatgtcggcaaccatcgaccggctcgcgacgccgagtgagtgccaaaatgcgtttgcttcaactacatgttctattgtgattccattaccccttgtgctttcttgttccttcgatgtttgggttggagagtggggggcgtcttgctactttggttcatccggttcagttgtaactccgcttttagtggatataaagatttccttctgttgggttcaatattggcagttgactgctgataacctgataattgattgacgaactcaaaataacaaacgtgtccttcaaaattcggtactttgattcaaaaagatgagaatatttctgcgaaattgattcacgccggagggggcattgagtttcaacccttacagtagagtctggtgcgtatgaatgacttgtagttgtcgtaccaaattttgttctttgtgaagcatggcaatttgctaatttgcctactgattgttacgactgctatactgatttcgatttggttcagacacggaatgctgaaatagttttaggtgcaggtcatgagggtcatgcacacagtgacggaaagagagagtgcaattctgatgaagagaactcggaaggagaaagaaagcccaaaaagggctctctcaagaagagagcagctactgcagggtataagtttaggcattccttaaggagaaagagtaaaaccaaggatgataaccatgtagcctcaatagaagacatcagagatgttcaagagctggagactgttgaaaggttccgccagtgtttacttgacgagggcctgttgccagaacatcacgatgattatcacacgatgttgaggtattgctgcatcgcatttgctcatcttaagttccttggttcttctcttctgtcagttttttttacttcctgcacgatatttttatatgaaaaaaatctcatgaatagaatttcgcctccttatttggtttaatttttttctatgcctcttacgtgtaggttcctgaaagcaaggaaatttaatattgacaaagcaaagcatatgtggtcagagatgcttagatggaggaaggaatttggtgctgacaatatagaggtaaagctagttatctaatataccaatacatataccccatgatatatgtagtgtaatgatttcttttagtttaatttaaaaagtctaatctggtcctttaggaatttgactacaccgaattagatgaagttgtgaagtactatccgcagttttatcatggtgtggacaaagagggaaggcctgtttacatagaactaattgggaaagttgataccaacaaactagtgcaaatcacaactattgaccgctatgtaaaatatcatgtcaaggagtttgagagatgtctccagatgaggtttccagcttgttctattgctgcgaaaaggcacatagactcatctactacgatattggatgtgaaaggcgtggtatgtgatttttatttacaacatttccctcaacaaactttatttttgggggttagagtagcaattaacttgtttttgtaagtcaagggcctaaagaacttctcgaaagatgcaagagagctaattatgcggttgcagaagatcaacaatgacaactatccagaagtatgttattcccaacttcagcactagttttttcactattccgtcacttccctggttatctcttctatctaatgtacatggttccttttcaattatccctgctcatgaattcaccatttttgtttgggcctatacagggaagtaattttctaatgcattctgaatgatcttgcagaccttataccgactttacatcataaatgctggccaaggcttcaagatgttatggggtacaataaaatcatttcttgatccagaaactgcttcaaaaattcatgtatggttgctactgtttattgctacggtcttatcttactattcatgtgtagtttttggtttatatatactgattctcaccaatcttttccacatcaaggtcctcggaaacaagtaccaaactaaattacttgaaataattgatggcaggttaggatctcaaatcctgttaactggttttctgtttgggttccatcctaatgtttttcaattccatgttttcagtgaactcccagaatttcttggtggcaagtgcaggtgtgaagaatatggaggttgtccgaaatcagataaaggcccttggaaggaccctgaaattgtcaaggtattttcctagtgctgtccccatcattctgagtagttgtcctgttttacaacactaaaataaaaggcttcaattcccagagagttatcaatggtgaggcaaactatggtcggcatgttcttgctgtatcaagcataaatcagaaggaagttggttgtactgaacactcaactgtaagcctgctttacatggacgttacttggaacatcttttttgagatttccattatttaccctgtaaacctttcccccttaggagcaggaaaaaggcaatgatgcctctgccgaatctatttctgaggtggaagatgtttcttctccaacagctttagtggatcctataagccctaatttgacccatgtggatgaggcaagtatccttttactctttgagcatctgcagatttatgacttcaaatgattcagttgcatatataaatgtcctttttgggttactgcttcttaatggttgaactctttataatctttttaattgatcaatgtgatgatcgatagatgttttgctgtttacagtcaaaatttccaggacgtgcttcctcatctgatgcccctcccattacaggggatagcatccctgctgttgacaaggtcgtggatgcatgctccaatccaagaaacagctcgacgccttccagctcaggtcttcatgtaatcatgtcattcatagactaggctcctattgagaagttcctgtgatttggaccaactgcattgagactaactagatacaatactacacgtactgaacagtctaaatctcaaatagtggtgcatattgggcaatttcgacttgtttttaagattattattaggatgagcttctaagttaggttgggagttacattgactgattctttatgcatgcttcatcaggttctttctccttgagaaatataccggcaacattgggaggacttaaaactcgaattgtcgcatggtcaacaatcttagtcctgagcttgttggcattcctccgttctgtcctgagcatagtgaccaaaaggctctcaaaccaggccatcacatgtgaccactatagtgctgacttccgtcaaggatatacgggaaatggcacccttacatctgtattgacacggcttggtgaattggaggagaagatacagacacttgaagcaaagccaccccaagtgccatttgaaaaggaggaattgttacgtacttctgtttaccgcgtggatgtgttggaagctgaactaatttctatgaagaaggtactcttatttccttaaagaaaaaaaaaactagctgtaagctgatttaccaggttaccctagtttggtatcttaaattttaagtatgtgctgtagttttattgtgaggtaataatatttttctcagccatgttagttacatccaagaatttggctgttcgctaaatttcttgatatttttgttgtaccagagccagaagtgaaatcctagattgatacatggagttcatgaagcaattaatagaaaatgctacttttcctgtactgacatttgtttctcttgtgagcaggtcttgtatgagacattgattcggcaggatgagctgcttgcatatattgaccaacaacagacagcaaaattttgtgtaagtaactcccgttcgtatagtttgccttttcctttcaagagcataccattttaatacttccctcttcagtcaatggtaccaagtacgcaatctcatatttgtccatccatcatttgcagcggcggaagttctgcttctaagggcctgtttggaagagctccggcagctagcactgtattgtggcggagccgtcggagcctcaaaacgctgggtcctccggctcctgcactttgcagttgtattttgccaaagccagagccggccagctccgcgttacagtgcagcacagtactgtaaagtgcacctgcgcagggagccagagccggcgagagcgggtgccaaacagcctcgaagtactggagtacctgccacctattttcttctctttggagatggcatgctgctgttgtggatgcagtatacttgtaaatacctttgtatttttttcttgaattatcttcgtattttgttgcagtgtaaagcatcacaattttttagaaatagataggattgacgagcagggtaggttctcttgagatcttgtttcagtgaaaaaaagagaaaagtttgatatcttctacctggtcgacgggccagcccagcacagcagcagacgcctgggctttccctcttctca

SEQ ID NO: 4332 - DNA, 2782 bp, Sorghum bicolor
gcaatgcgaaggttcagttcagcaaggagcccaacaatctctacaatgttcactcctacaagcactctggttagtgtttgtttaccagcctgttcatttgacatttttatgccatcggtggcactgattggttacttttcaggccttgccaacaagaagaccgtgacagtgcagccagccagtggcaaggaggctgcggtggtcctctcgacaaccaaaacaaagaagcaaaacaagcctgccagcctccaccacaagtctgtcatgcgcaaggagttccgcaagatggccaaggctgtcaagaaccaggtatagagcaaccccatcccatgttcaatcttttatgtaatttgtgtcccctccaatgtggttctcgttgaaaacgatctggttagaactttgtacccctcaaatgtagatgattttattttataaatatctgtaggtaactagttataaaattgctgtgatgagccttaatcttaagatacattggcctgtctgcacttagcttctgaatgtgaatagagtttgtttttttattataacatagtcttcttgacatggtcatcatacctttaatttattgttcttgtttcacatttctagctgtattaacggtattttataaaaactgtggatggttagtagcactagcacgtgagaagaatctctgtttagggctggcaatccacgtaaaatgacctatatgctggttcttgggccagatgacttactgtgtgcttgcccttgtgattcccatttacagttgctgtgatgaaccttaacatataagaagattcaccattcaatataaggtttcatcttcaatatgatgtacttgttacgcttggcttccgagctcgctggaagcatttatttgcacccttaagttgaagttctgtgaaaaaattttgctgcttgcttttagcacttgtaacccttttcaaacgagaggcatgctgtctgacctgaaatgtggttcttatttgagcaagtcggcatcatcagtttaaccgttgtggttttacttgtttgtacaggtcggtgacaactactacaggcctgatcttaccaagccagctcttgcaaggctgagtgcagtgtaccggagcctccaggttgccaagtctggagtcaagaagaagaacaggcaggcaaactaagacaacaatggtcaatgactcattttgtgctatcaaaaacattgtggatgggtggcgtttatacagctttcaagatttggagtatgaggaaatgtgcttataacctgctatggattttcatagttgactccacctttgtataattgtaccggtgacatattattgagcctatgaaaatattttattagttcgtatggcctttggttatttgtgttgctgccctctgaggttctcttggaaacattattgtttacatcctcttgtgctgagttttgaaaaatgttctgccttgtaattggtctaaaaagacatcaaagcaacaagctgtacaagtactgcttaatcatgtcacttggaaaattcgaggtctgttgcttcaatttgtcccctatttatacaagtactgcttaatcatgtgatttggtgacagctttggccgtcttcacaccttagcaaatctctcttaaattgaattagaagctgatgatgttattgttttttactttattatattcttttcctgcaaactatcgagccatgccaagcaggttaaggaggctcagttgtcctgctagagactgatcgatcaagataacaataaattaatttcagactagcgaactgttcatattgcgtgcacaggaatttgcgaaatcttttcatttgctgaaaaatcgatggcttggaagcgacaccttgcagcatcttggaaggaacaaaaaccatggaccgaaacgcactcttaccagacgtgcgggacactaacatctcgcttgggctcgtacaaaaccgagctccaactcacgatgcaccgagaaaccggtggcagcacacatgccggtcggcgagaagacggccgaggcaacggccaaggacggcggcagccagccgaagccaccgtcccgcggtagcgcccgcttcgagcgcctcctttccgggctgggcgctggtccgctcgtggacgtcgagcccgacaaggtcaaggacgacatccggcgatgggctaagaaggtggcggcgctggtgcgccagctcagcttcggcgcctggccggagaagagcgacggctcgtcggagcaccgcggcgcaggcgatgatggatccgccgccaactgagcatctagagccttgactgcagattaactttcgcaggcagtaaagccagtaatcacaactccgatgatatggcggcagcgccgggataaagcaagagcaaaattcatttatctccattcgttcattcgtttcgaagagcgatttataggctgataatgcatgtgtactacagtagatcttacctcagttcggtcaaaagcaataaaatttagcaaaggtcatggatgtaatgattgtaataaagagcaatgcagattctcctccagtaaataacatctgggctagggtactcatcgaaatcacccacaggccacagcacattacatggtgcaccatgtctgagtttccgttcaactcaacagattattaatgaaagtgggaaaaaaacactcagtcttacacttgagggcattctcctctaccaatttactggtaagataggtggcaataagctaatatctacacttcagttagatgaatcaagatattacaccccctag

SEQ ID NO: 4333 - DNA, 4707 bp, Sorghum bicolor
atatatactatctctatctctattcataaaagaatgtaattttaggtgcatccttagttatcgtgtttaaagtttggacaaatatatatataaaaactattaacatttatgacatgaaaaattatagtataaaaatatatcttatagctagcgaatctaatgatacttatttgatattacaattattgatttttatttatagttagtccaagcttaagatgcttttggtttggtgttatactagaattccattcttttattaacgggtagagtataaaaaaagtactactccatccattccaaattcttaaatatgttagctttttttagattcatagcttttgctatgcacttagatatatactatatctagatacataacaaaagcacgtatatagaaaagtcacaatgtcttataatttggaatggtgagagtaccatctatgatgcaaaataaaaaacttgttaatgttattctctgctataaacttggtcaagttaagctattttgatttgcataaatcatagagttgcattcttatatggacagggagagtatgtcggtccttgtttagaccttctaacaaaaatgacaatggaacagaaaaatgcaaatgaaatccaaacatttaaattctagaatgaaaacctagaatccaactatctacctcaaatctactatttgaagatttttatgcaaatacaatagttgttataagaatcagatccaaacatctcttgtttcttttaactcagagtccatattctatacattcactatatagaatccaaaatttcactataagagaattagatccaaatatgtctttaatagggaaaacattgaaaattatcatccaaggaactggtcttaacgaggcagcgactattaaatatgctccaacgttgcaacatagaaattctaattatattaataatcttcaaattttaataatttttaaaacaaaaacaatataaatagtatctttttggtttcaaattaattaaagataaatttaagatagttgctttttgcttcatttgcgaagcttcttatataaatgtacttttactactatacaaaatagggccctactcaaatgagccaagatgcacataccgacatactttctctattaaaaagaataaaaagttcgtttatcgaggagtcaaataatcccaaattttaactaaatatttataataaagactctccccatctaaaacaatgtgcatttcgtttttcaagtagtcaactcttttaagttcttcaaaatatataaaaaataatatcaaataagtttattatttaaatttatgtcatgatgacttctcagaaaatgaaaggtgcacttattttaaagggaggagtactaatatttatgagacataataaatattactatattaatcctaaaatatattttaaactttttgcaataaatctattaaaagatagagatatggtagtgttttagataaatctaattaaatttgagattatttgggtttttttagtggaatttgagattatttggtgcctcaaacaagccggtgcagtcagcaggctcatcggcccgtgccacgaaaaagacgggcaatcaatagcgcgtctttctcgaagcccatcgagcgaaaaaaggtcagcgcgtgagctgcaaaactcgccttttctactgcgcccgcctgcaccgttgctcccctccccccaaagtctgacagggtggggacccggagctcgctcggccgtggctttccctttttcccggcttggtgctcgtcccggtttcaaaatttgaaccgcgaccgaacggctcccccgggactcgtaaccgaagcacgcacgcacaacggccaaggcacgccgcccaccacctccccatttgcccatttggccgtttcgcctcgtcgtcgtgggagcagtgcacgctcttcgcagtaaggagagatagggagagagggaggagaaatttgtggttttttctcgcgttgcggcgtggatgggggcgtcgggcaagtggatccggacgctggtggggctccggccggcagcagagagggagaggcccggcgccgccgggaaggggcggaagtggagccggctgtggcggagctcgtcctcgcagcgggggagcagcgcgccgccgtcggaggcgccgtccgaggcgtcgtccactgtcgacgcgctcagcagctctgtcgtcgcggccgtcgtgcgcgcgcagcccagggatttccgcgtcatcaggcaggagtgggctgccgtccgcatccagtccgccttccgcgcattcctggtaggcttacccgccgccgccgcctccgttcgtgtcgctcggtttcctggtaaaagtgcacgtctttttttttttgttccctcactgtttcttgtcgctggatgtgtgaaggctcggagggcgttgagggcactgcgaggcatcgtgcggctgcaggcgctggtgcgtggccgccgcgtgcgcaagcagctcgccgtcacgctcaagtgcatgaacgcgctcgtcagggtccaggagcgcgcgcgggaccgccgcttccggatctctacggacggccgccactcagaggacatcctcgacgaccgaagcggccatgctgaccctgtcaaggaagcagaggtagcccttcaaaacttgttggttttgaacgtttgttttgtgcggagttcagccattgcagttatgttgccttctttccttgtgcttagttcgtactatttactacgcttgtgcaacatgttcatatgtactcttcatgcatcagtcaaataagtatttgtcacctagtctaatcggttgcttttgctggagatttgcaacagtaaaatacatctctatgatgcatgaatgattttaacattgagctctctttaagtaatgacactgatttcacatatactccctccgttccaaattataagttgctttgacttttttggatcattcattctgttatttatctagatgcatagcaaaatggatgtacaaaaaagtcaaagcgacttataatttggatgtaccaaaatgtcaaagcgacttataatttggaacggagggagtatattgctttgtattgacagtgtatgtttgaattagtcttggtagtgtcattgataggtaagcctgcgtctgatgatgccaccaataatgcaaccctgtgatgttgtttgtgtcaagtttgatgttcaaacaaatttttagttagctgcagagtgctctgtaggacaattgatctgcacaactgtctagttttaaacatctatgatgaccatgtgtggacgtttggatgacatgcttcaaactgcagacaggatggtgtgatagtcaaggtactgtggatgacttaagatcaaagatacaaatgaggcatgagggtgcggtaaagagagaaagagcaattgcttatgctctttcccaccaggtataagtataaattcatcttgcagcaatgatccgggaacagaaaaaacttattgtttttcttcatacatatatactaactgttgttttcacagcgaagttcaagccacagtggaagacctagctctcctgctgtttctctcaggaatcatgggactagcagaagcaatcataattggagctatttggatgggtcgatggcaccgaaaccttgggagagccgccttatggagcaaacccacactgaatactccaacaattcacggtgttcagaaagcattgatgagatgaatgcagtcagctcaaaactttcagatgcaagctcagtcaaaatcagaagaaacaatataacaacaagggtggcagctaggcctccttccacaatctcagcttcttcatcagattttgtgtgtgatgccagctctccttcaacttcctctgtcactccagtgtctggcaccagtttcctaacatcagagagaagatctgattatggtcatggaggtgggccgaactacatgaactggactaaatcagcaaaagcaaggttgaacggttctagcacacataagttcccgcttcaaaggcaacgatcttctgacctgcaccacattagcaggacggcgttatcttcggtagatgttcaaagcactgctggatcggaggtttcagttacttctaagaggttgaacggtttgactctaaaaggtcgaggcgctagaagaagtttggacaagaagaatgatgaccggcctgttgccatgttttaaaacctagtcctgtttatttccataatactatacgttaggcatattcatgttgacttgtatgtatgctctgatttcaatgcctcgttgctcattttggtaccatccagatttgtgctgtaccaatgccgaactgctcctacctgttagagtaacgcgggatggtgatgattggtattcactgtacctctgtgctggtctgctggatcagcacagtgaaattgacaatgtatcacaagtgatgcaaacctccttgcttgtctgctgtttgaaaaaaataaatcatgcgaggacttgcagattcaaagttttttttagggaaaaatatgtacattttgaaaaatgtgggctatacattccttgtccaaacttattcaaccatattctgattaaagttacatatattgtgagcaattacagggtgtttggtttgaggaatgagctagtctatcatttattctttgtttttttgttggtttgtgggctgaaataggttgatgcat

SEQ ID NO: 4334 - DNA, 6077 bp, Sorghum bicolor
catctccaggagtatccagaggggcctgagccacaaggtaaagaggagacctttaattatgcacattcaagtcttagaaatgtcatagcaagggctttcggagtactgaaaatgaagtggcggatgttacgagaaataccttcgtatgcacctgataaacaaagccaaatcatagtagcttgttgtgctctacataattttattaggacaaatggcatacaggatagtcattttgctaggtgtgaccgtgatgaaaactatgtgccccaagaagcatatgaggatcaacctgaacccgaggtagtggatgatgacttgcagctcatgaatgcatttcgtgaatcagttgcgtctgctttggtaaaccgtgcttgacagtttgagatgacagcttttaggatggcaggtttttggccaaaaatctgagatgagagctttttggggaaaacccaaaatttttcggaaactaaacaaagcgttctggactgatcccttccttttgtaaaacagttcccttgtaaactctaaacgattgatcttttggacaaatttctttcattcactgttggcactatcagtttctgatgctttacttaataaaacaattccataattcaccatgcatttgtaaatgatttaaattttaatgagattcaccaggcatttgtaaatgatttaaattttaatgagatgacgtgttgaaatgtcaataaatcctgtagaaaatgatatacctagttcgactaactgtacagctgaaacgtgacacatgtgccatatacatacaatgagaactaatccttgcagtggctgactggccgatttgaaaataattttactctaatttacaccttcagttctccaaacccctatttgaaaccctaaccctacagtcttgtcaaacaacaaaaatactcctagtcttgtgttacatacttcctccgtccacaaataaatacacatcccgctttagaggagtcaaacttttttaggtttaactaaaaatatatcaaataatatcgatacttgtatctgcattttatgcttaatctaatttaatgatacatattttaacttcgtactcgtaaaaaccgatgttctgtcctgacgtccttcactcgtagccgctcgcatggacgggactaccccagcgcttgcgctcacgcttgttcaactggccgcgagcgcaactggccgctaaaattactccctgcatgcagcgttggttgccgcgctctcttgggtcttggctctcgcgttggcccttgcatgcacgtcagttaaatagggggtagatggacatacgccccaaaaaaaaaaaaaaatgagcgtgcacggtgctgggcaaaggggaaaaaaagcaccatgtagtccactccaaacacgccggcgtgctaggtgaaaacaccgccaaatcggccacaaacgtgccatgcagaaatcctatgaaaaaaaggcgcctgcatggattcaaactgccgaccttaggccaagacccccatgcactagccgtctgagctacaagacttactcaaaacgaatgtaaccgcagacctatttaataatggcaaaggagaaaaaacataccccttaatcactacttggttaccacaatcatgtcctaaacgtaaaaaatttcgaatacggagagagtataataaatattagtatattttagtatatatttgatcaaacttaaaaatgtttgacttctcgagaaacgagacgtgtatttatttatgtatggaggaagtagctgctattgctttggttgaaagaaatttaaaaactgatttgaaattcacctcatgaactgacttggctgacgtaccccgtcactgcaatcgtggacccacatgacagcgaaataggacccgatatgtgcgacgtagcaacgaacccaatcccaatcgagatatatatatctgcgttcctgcgacgcgcatggcgccacgactccccgagggccgtggccttggccggcgctcggacatgagtacatggcactcggtggcctcgcgtcgcgctactccctcaccgacccaccgggcaccggcaccggcaccggcaccgcgccacggccgcgttcgtctcgacaggagccgatggccaccatcgcgccacggtcgcatctcctcctcctcggcctgacaaggccgcagcagccgacagcgcttcgtgcctgcgccgccttctcccgctcgcgcggcgcgccagtcccaccgcgggccgcgcagccgcggcgcgtcttcctcggcctcggcgccaccttcatcgaccaggtcacccgcatggcctccggcggcacctcgtcccgctctttcgttgccggagcgcggccgaggcagggggtttccccagtcgagcaggtttttaggcgctactttttttcgaaaatattgctacaaagctgtactattttttttttgttttcggtcctggttaatggagaaatattatagattctgaagaatgtggagtggcccgacgagttccctttcaagcctgaggacttcagccgtttcgacgagtaagtagcttctttactcttcagcagaccttgcagctgccacaagtagtagtagtctatatgtctgactgaccttgtaacctgtgcaataattcagcactgcagattgattttaccgtgattaacaacaatcttgaaaaaaattgggcagacggggtttgttgatcgatacattttgattacttggcagatcatcagatactctgttctactcagttccacgttttgtcactcacattgatgaccaagcaatccgagctctcacagagtactactctgaagttcttcctccaattaatactcctggggcgaccattctcgacatgtgcagcagctgggtaggatttctgctagtcaccactttcgttcttatgtgccactactatgaagtttcttatgtacagttatgcaggtgagccattatcctcccggttacaaacaggagaagatcgtggggatgggtatgaatgaagatgaactgaaaaagaactcggtattatgtactgactaaattagtgcactttttgtaaacatgatgcatgcaaagcttcctattatggaagtactcaccaacattctgaatagctcaagtggctgtttggtatcatgctcgatttattcacttaaattttccggtgatagcagccacataatttatggagagtaagaagagatgttagattggcaattgattatttgattatttcagcaagttatgactccatttggcacagctatagctccgagatccatggtgaacctgcagtttgtagactaaactaaagtagtttaaatatctatatttaatctaaattataaatgaaatgagccatacaaatgcgctcgacgtgcctacagctccagatccaagattttgtagagctacccaggtcgaagaaatccacaaatctcctgtatgccaaacagggacttaatccttagttgctctgataagaacaaagagctgctgacagattagtcttcctatgactacatgtgagaatacaactattaacaagtagaatttgcatggttacttttcctttgatttttgttttgtcttacaatcaattaaatgttaacctgagctctaggatttatttttcattttacaaactgcaaaaacgtatcttatatgcagcaatattggagtttagtctgtaactttacacatagaccagtttaaatgattacagataagtgatgcgccttttgtaactaatatgagtcaccaagtggtacttcctttgagctgctttgctaaacctatatttgacatagcttttttgttgttcttttatgacaataggtattaactgagtatgttgtgcaagacctcaatgtgaacccaaagcttcctttcgaagataacactttcgatgttatcaccaatgtggtactgtgtcctctatatcgtattcttgttaaaagaagagattatatgttgtacacttcattagcattgtgaattggagcgcaaagattgtttacaatatctgatagtagcacttctttgctagtaggttagtgtagattacctgacaaaaccaatagatgtttttaaggagatgcgacgaatactcaagccaagcggccttgctataatgaggtaacatcctgttcagaatgacacatgccattgacgagaactacttctggatatcgtagcatgcattaccatattttggtggtaaggatcttaaattctagttctaactttggatgtagcttttcaaatcggtgcttttggacaaaagctatatctatatggacatcaactggtgatgtcgatcatgcctggatagttggcgcttacttccattatgctggaggttttgaacctcctcaggtatgtactgttcaatagttggtgcattgcctaaaaaggataaagaagaacaagggcttccaagatttttaatcgcaagctaataaggtctcctttagaagctataaaaaagctactagggatatagcgataattttttttagcagttttaacaaaaaaaaaatgaaattttctattaggtatgcacaaaaacaaggaaaggaaaattcatgaacgcaaatactcaaacacattcagggctctaagaaaacacgtctcctggtccattacttaagaatcattcaatcaatcaacatactcacggctataatcagtattcacattcttcaacattaaacaatctaacaattcaacagtcatacattcgtccattaaattattaatgaaagcaaaatttaatggtcaagtttagcgagggtaaaaaagtcacaactaagcaaatatcagtgttcagtaattgacaatatcatatataactttaggcatcctaaaaggctatagctttgctattgctgtgctatttacaaccttggtggattccaaaatgatacttttgtttattttctcctttgtttgcatgaacgcgtttctacctatcaagttaatagccttatagatatttgcagtgcgttggaatcaaaatccagctacccctgtatacatttatagtgttctttaattaatgtgctcaaatcaatcccatgatcaaatgttttttctttaatttctgcaggcagttgatatatctcctaatccaggacgaactgacccaatgtatgctgtatgctcaagaaagaaaatagggtaaattaaatagtgtattttgcaaggtttgtccctccttcctctctgttgatcctagtgtttgatgagattttattcaacagtttttctagtgtgcatgtatatttgtagtgctatcaagaaacaaataaaggggaaaacaagaagaagcaagttgcttggcccagatcgcctggacttgatgattggtgagctgaggcaggcagcgcacgtgcatgtttccgtgagcaatgcaaccataggaaaaggaagcaacactgctgcacagactatttatagaggcggtcagattcatgttttttttttggataaacagattcatgtaggttgtagcgaccgtctttactaaagctctctagaattgatatttttttaaaaaaaataatagtattttataaaataattgtagatatggatgctagtttcacgaaattgcgaatctaacacaaaattgcaaatctagcgtctagttgacagttcagctgaaggctttactgatactctggctctggtagcaactctccagctactaccagccaatacccaaggaactcaggaatgagcaagggtgaaataaatatgtgcttcggtctcacatactagtatactactacaatgatgagtacagactgtgacatttcacgagagtgcgtatctttgttgttacgagacgccatgcaattgcagaaacaagattgtgaggccaatcaagacaaaagtattaacatgccatgaactaaattacctcaagaccgtctccatacgtcaaaataaattgatgaacttgcacaggtttctgaatcactgaggctgaggacaccacttatttaattgaatctagcacgacgattacatccataatttgtagactgcaatgcactaatttgtagaatg

SEQ ID NO: 4335 - DNA, 4500 bp, Sorghum bicolor
tttgatcacttttcaatgtataagtctttaggaccatgtctaagtaacagataaagttgccactcaaagtacttttacggcaccactcttttaagaaccttaataagctctctggttggataaaggtttcgttacaaccgaaggggccagtctctttcaaatagcattgatgattttggtcatggtcagcatgacatctttattcgaccagaggtagtaataatacattgataaaaattctgtagtaaaagatgttggaaaaacatgctctgtatgactttatttgcggacactgacaatattaggaaaataagtaagcttgcattgactggctagctgcattatctgcatggattgactatccattttgcttgctgaaacataaaaatatcaaaattataggaatggaggaaagaggctttgcttggtatccttaaattacaaatctggattgtatactatagtgactttctttaagctttacgtgcttctaataatattccttatttgtctcttcttttgttgagacgtgtgtgtgaacatattttaaatttgttatttgcagggtttatgaccaaatgcctgagcctagatgggttatttcaatgggcagctgtgccaacggtggtggatactaccattactcctactctgttgtacgtggatgtgaccgtatagtccctgtggacatctacgtccctgggtgcccaccaactgctgaggcactactgtacggtgttcttcagctccaaaagaagatcaacaggcgtaaggatttccttcactggtggaccaagtgaagcatgcttctgctgttgctcgctccctatatttctttgcatttgacctacttatctcatctgaaataaggacagactttgctcagatttgcaaatttgttgtgcctggaaggatgtatgtccaggttgtttgatgagcatagagctctgtacttgaagtcagttcgcctgtaatggacaccatacctgccgtgaatctgtttttaagcttccattgtaatacagcaatacaccagatgcctgttaatgggtatcttctccctaccattgggtttatatacaggcttacatgtcttgtcttttatcatcagatgcctaactaatgaatggtactgcatatttttcttccgatctgcaagtcctgtattgagaaattgtattgttttcggaagcactgcagaaacttaaaggtgtataattgaacttgaaatgacatgtggtgccagggctacatgtacaggcagataacgtgtcaagtgcacttttttcgagctatttttgaaattgacataatctcattatcatagttttcttgaactatttgagacttaatttcaaaaactaaagctcaatgtgtcgaactgaaatcaaaactaattcatctttgttctaaaaggaaaaccaaaagttaatcaaaattaattcatctttatattctaaaagaaaaactgagttcaatcagaacattttctcaaaaaaataaaaaaaaaaggttcattcaaaacataatttaaataaacaagacatatatgtcattgggatgttacttctcaagacaaactcaatgaggtcgctaatctgtatgggaaccgtgctattacaggggtttgatttgatttaccaatgaaaagtcgtaagcctaatggagtccacctggacaaagcaggtcctaacctcccctccaagacaagtacggcgctaataagcctgctataaaacagccctgtcccttaccgtcccctcgcagccgtctttcccaagttccaactcgtgtcctcacctcggatctctccatcccttcggtccaaaccgccgatcacaatcacaaggtaaactcaaagaatccatcacatcatcctggaatccgcgcttcccgaccgccggaattttctctttacctttataatttcttcttctaacccgcattgccgcgttccgaaccgtgagctagcaccagcaccagcggcggcggcacattccatggcggcgctggggtcgaagctggcgcagctgcagtccaaggcgtgcgaggcgacgaggatggtggccaagcacggaggctcgtaccacaagacgctcatggagaagaacaagcactacgtcgtcgaccctcccaccatcgagaagtgccgggagctctccaagcagctcttctacacccgactcgccaggtcagtgctccttcacgtccccgtgccaccaactctgagaggaaagaggaggaggatgtaaatgccagaatctcagtatatcaaattttcagcttttagatgggagatttggccgttgtgatgaatctgaagttgttcctttagaatatggtagcttgtcgttgtcgattgcctcctgaggtgtgaggggccgagggggcatgtatgggttgggtctgaccgtttgagttccaatgcaaaagcaccatgatcgtttggtgacattatataattgtgcagtgctgggtagacaatcaggaattccacaatccgcctaacccttgggatgtgctgatttagttgcactgtagcatccaaaactttatgattcaggtggttattctgtgatgtcacaatttgcatattgctatcacagtaagcatagaggaaggatttggatatctgtgtttggatgaatcatgcctcttccaactccctctcttttgctgcaacactgggcatctactaggttgttcataatgcttgagtcaatgcatgtgctacaagaaatctgtctgaatttctgaaattcttatcaagtaaccaatcatattgaattgttggagcttggaggaaacgcctttgcagggtggtgtgcattgttaatttgttagcttgtagatcggatgggaggtttagtgatgaaattggaattcaacattgttaatatggacttatgggaagcctctttagggttgcagcaaacctatatggatccaccaagtattgtttaggtttttgtattgataagagcccaaagtgcttattagatgccttgaagtattcttatctgatgaaattatatgattaggccatgttaggttagagttagacgcagttgattggctccatcacacaaatagacattaagaatttcagaggctatctaatcatcgtgacgtgataatttagtggcacaaaaaaagtttaggatttcttgtcttttaactaatgtgatgtgaattcttgtttctgtggcacacagtctgcatttggctattacaaaacaaatgctaatcatggcgcctgccacattgagattgatcaatcatgtttattgcctcttgtttgaattacatctgctgaactaatagaagatttggtgtgcttgcttgtttatttagggtaacaattgcctgtctgttaaactttttatgacaacagaaatatcttgtattactcctgtcaaattatttattgttgtctgctaactagttggtaaacccatgctgagttatatatgaaccatatgttttgatataaatgttggatgactagaatatctttaaaatatattaaaaggctcacttgctagttaaattctaagaattggaccaagatggtggacgccacgacagtcggtggaattcacatacacgtattggggaacctggcaatattgatttctggatgtatatatcctgaatttatgttaatggctattcgtaaacaaaagtaaacaataaatgaagcttattgctgcattttagacaattttcacaacacacgatttgataaatatgcattttatatattgtgctctcgtcagaaattttaacacttgatttatgtgtttcttgcagccttcctggtcgttatgagtcattctggaaagagcttgatggtgcgaagctcctgtggaagaacagaagcaatctgaaggttgaggatgctggtgttgctgcgatgtttggcatcgagttgtatgcgtggttctgcctaggtgagatcgccggtagaggatttactgtcacgggctaccatgtctgaaacctgaatgcctgccttacctctagggctctagcattagcaatccacatttgccgacgaatattatggaatcggtgtaggtgatgcaacattttggtattcggaactatagtactattgaatcttgatgctgtggaactatattaatctcggtggacgagaaatgatgagctaataatttactgtatatcctgccctttctggaatatttcccgggcgttctctggcatgccttgcgcccgtgttccgtcagtcgtccaagcgggattgcattgcatgcgccaggtccccgcgccccccgatgcggtcgtgtatttgtgtcctactagagtactctactggcacttgcaactttggtgaacaaatcgtgagctcggaaatgcctccgcgttgagagatactaaacaccaccgacgcttgctttgctgaccggactgcaattgctgagatgccagaacagagaagcaccatcttcggactaaattctgtcgtctgcagtt

SEQ ID NO: 4336 - DNA, 4478 bp, Sorghum bicolor
tcggacgagaagtcgacgtgcccgggcgagtcgacgaggttgatgaggtacgacgaggtgccgccgccgaaacgcgccgcgcccatctcgtagtagagggagatgcccgtggacttgatggtgatgccgcgctcggcctcgtccgcgcgcgtgtccgtcatccgcacgccgccggccgcgtcctgcgcgatgatgcccgccgccgccaccagcgagtcggtgagcgtcgactttcctgcggtcacagtccacaaatcacaatcctcacataatcgtcttattcgtttagatttatcaaacgaatctgtagtcattctcataataaatcatcgaacggtaacgatactttctgacatgacttatcatttatcagctaaacgaacaagacggcatgcatatgcgagccaatgcggcgcgccattggttaaggagttacaaacagggagagcaaaggagagctgaccgtgatcgacgtgggcgatgacggagatgttcctgatgttgtgcttcttgttcatgctcgcgcggagctggccggcggtgaccttaaccatcgtgaaatgaaggccggcgcccaaaaggtggtgacgccaagagcaaggcgaaggatggatctctgatctctcctctcctgcaagagcagagcatgtaaggctaagcgatactcctgtagtacctcgcagaaaggggtgtggttcatcttcctcagcaccgatagcacgtgcacagactatataggtgaatggaaatgcgagaaatcgggcacgcagaacacagagaacatcacagggacgaataacagacgaaacagtcaaaacagacatgggattcagagaagaagggggacaaacctgctgctgctgtctgctgaggagcaggggaaatgacgagacgagcggtgaagacgtgaagtggtctgcgttctgaacgcctacttgtaattgtaatgccaacacagcggagtagcagccaagtttagctagttgttaagtagcggctacgaaaccgccgagatcggtccgatggtgtatggacggctctggtcgctccagctcaggtccgagataacatatctaatggaaatggtggtcatatgttgcgcgttttcaggatgcttcgcaaagcactggcacgaccatgaaaaaacgagctttgtggtggtacttctaaataactgtgagcagataatttaaatagatcggatgattaaaaatcatctattactttctagaaggtaataaatgaaatatatatttatttagttttaaatttttttggaaagaaaatgataattaagaaaactttaagatataaagatgcatgtttaaatctattggatgtggtaatttcttttttattttaacaaatttagatatgacatgacatattttaattagaaaaaaactatcttttttatgcacatcaacgtgctgcacgtatattagtgctcaaggcgcatgcccatacatccggggctattgattcaatcacttatgatttatcggttctctttctttaccttttacttttgttttttttttcttgccaggctatcgtcgtcgacgtttgtattgcacttccttcttcttaaggccgcttaccgaagctacaattttttttagataagtcttttgcaacccgtgtgacttattcggctaggttattccatcagcataacatttcacagtgctgctgacttctttgcatctgtctgatctgtatcgttaccaaaggtgacagttgctgctcaccccgttctttgttgttctagactgtaaacttgcaaaactgttggttcggtttcaaatgaactgtttgatcctacccttctctcctttctaatacagtatgtttggacggcaactgctgttatatattccattgtcatcctttggtgatgtgaagcgaatgtattagccgcgaaggatggaataaaggcactcgccgcaaaggagaatgagaaagcatggcctagcttgttgcaatggaattattcgaattttccagtccgatataggatacctacatatacatgtttctggcagaccttcatagtcgaaaataacacttgttgtcatcagtcatcctgatctcagctatctgaatcactcgtcggctcgtggagttcagcgttcagtagcatgggctgctgtggcgccatgtccgccaggccgcggggcatccacgaggagacgctgctgcgcgtcccgggcgcgtccgtgcacctcatggcgggctccgacggccccgtcgagctcgcgcgcggggacctcgccgtcgtcaggctcaccaaggacgacgtggccgtggccaccgcggtgcgcgtcggcaaggacctgggctggccgctcgcgcgggacgagcccgtcgtcaagctcgaccgcctgcactacctcttcacgctgcccgacaaggacgggacgttcctcaactacggcgtctccttcaacgccgacgccgccgacgactccgcgctggcgtcgctcgacggcttgctccgctccagcgcatgcttctccgcaccttcgtacccggtggttccgtccaagagctccaggcggccgccgccgccgccgcagcagcagcagcagccggttgcgtcggacgggtactggaacgagttcgcgccgaggatggaaggctacaacggcgtgcttgccaaggccatcgccgcgggcaccggccagctcgtcaagggcatcttcatgtgcagcgaggcctacgccagccaggtgctctgtacgctgccccctcccgtgcgttctggcaagtccagacgtccagtggagaattgttgcgcgtcatggctaacgtcccggaccattgttgcttgcaggttcagagaggagccgatctgtttcgtcctcaggctggcggcagcgcgcggagccgattcggcgacgctggtggcgccgacaggagcagccaggcgagcaccaagcgtggagcagtcaacaagagtctcaagaggtaactcaagtagcttagctatgcatgctgccctgcaattgtgcaccagttgatgctaccataccatgctcatgttaatagcaaagctgtgctgatgcgttggttcttcagggtcaggaagctgtcggagatgaccgagaagatgagccagtcgctgctcgatacggtcatctcggtgaccggctccatggcggcaccgctgatccgctccaagcaagggagagcattcctcgccagcgtacccggcgaggtcgtcctggcatctcttgatgccatcagtgagtgccctgctgctgccaacctctttagaaagctcttgtcaaaaaaaaaaacctctttagaaagcataatgctcaggctcagtatatggaggaagaatatagaagatgcccaaaactttgtggatcatacttgcctttccgtgacagacaaagtaatggatgcggtagaggctgctgagaagaagtcgcttgctgcaacttcaaatgtcgtcgccggcgcagtttcaaggaggtaagaacgctcgaatgtcagtaaaaaaaaaaacggaatttgggtaaaagatagtttcatgacggagacacggccgattcaggtacggcgagagcgcaggggaggcaaccgaagacgcgttcgcgacggccggccacgccgtgggaacggcgtggaacctcttcaagatccgcaaggccgtcacaccgtcgtcctccatgcccgggaacatggtcaagagcgccattaggaacaggaactgacgtcgacactagacagttgttcattgtgctgctctggatgtacatgtacccacaatgactagaaagttgttcgacgtgctcctggatgatcatgaaccgacaatgactgacagttgttcattgtgcttctctggatgatgatcatgtacccacaatgacatgtaactatcatgttcacaccatcgacatgggctgtgacaaatacttgttccaaatgataacgccatgccgcaggtagcaaatgtaatgcaaataaagaaccaccttgaaaacaaatgtcgaaaaacaaccaccaaactgcaccccaactagagcaggggccaggcaattatgttacggagttaaattctgaccatgtgttcctgaaatatgaggaatcgccagtgtaaaggcaacacaatcaaagctgataggcatcagaaaggtgaggaaatcacacaagtgcgtgacaaaataggttggcttgcaagttaataaccttctcatctcataacatgctacagccaatctcggtaggttcacaaccaggaattacaaaacttcacttcagtgctgagggtggaacaaaatctaacacgaccacaattatgacattgcaactagaccacccagagtccagaacagtattacagatgtaaatgaatgtttacttcttcttggcatcaccagccttggtctgcaaaagagagaacacatatattacattagtttatgtcagcactagtgacaaagtaagtcagtaatataaactac

SEQ ID NO: 4337 - DNA, 8140 bp, Sorghum bicolor
gtacgtcgggcttcccgggacgggatctcgccgctctcgctgcatacgaaatactccaaccactggtccaccggtcacaccttacgttacgccgccgtaaactagaaatgcacagtgcagagtgtcgcatccgttccttttcttgtccgttgaacaatttgacttgtgcggctcgtggcaccgtcaccccgtgtggttgttcggtgaccacatgggtcgtgggagtccggcccggtctgtcccgaacaagaggccgccccacgctcacgccccggcgtgcgagtgggagtgcaccgaaactcgtgccgcccagtccagctgggaacggatcaaaaagggaaacaaaacgtgctcccgctaaacaaatgtagccccccccccccccccccccctcggggctccgccccggatcgcgattaaattaaactagtctaaccccgaaccccttgggcggtccggggctgcgcgaagccggtgccgcggcgacgtggcccaggctggggcgcctcgagtccagtcccaaacgcaccacgggcatgcggccatcgtcgcgccacgtccgccgctcacgcggccgcacctggccctcgcccaacgcccaggtgcgcctgccctctgacggttgggtccccgcggccgaatatatatgaggcggacccctccccggacagcgacgggccacctattgggtcaaactgctcgagttgcaggtcggccggcccatgcgatgatgctccggttgcaggccgacgggtgggcctggtacggctacgtggcgcttttaattatcaaaaccaggtgcgcgcttttggaaaacaagcgcccttttgatccacttcgtggcaggcggtttgtcacgcgagcctcgccaggcggcagtcaccggtcgctgggccacgcagtgttcaccggcccggctgtcatgagacagcaacagcacaggccgcgtggattgacggctggacgtcttttgcgtggtccccgcggtttccattattagtagcgccacgtcacaagcggctgcttttgggggatttttaagtgaatgatgatactgcctccgttcaaaaaagtgtcgttttaggttttcgtaccacaagtttaatttgatatgtagaaaatacgtgtaatatctatatctctaaataaatttgttaaaaactagatttaaagatctttctaatgatattaattatgtattataaatattaatatttttactatatatttaattaaagttatttttcggaaaacgaaaacgacacttattttggaacggaggaagtactagtttctgatcttgatctcgtgctcgaggcaaatctctttgggaatcgcctgggaaggagtatcaggccttgtttagttcaccctgaaaaccaaaaagttttcaagattccccgtcacatcgaatcttgtggcacatgcatgaaacatcaaatatagacgaaaacaaaaactaattacacagtttagctggaaatcacgagacgaatattttgatcctaattagtccataattggataatatttgtcacaaacaaacgaaagtgctacagttccgaaaagttttcacttttcggaactaaacaaggcctcagtacgaccgggggagagctcgaggagtagggttggttggagaggcgtaggggcgcgtgcgaagggcgctcgagttgttgttcttcctgggcttcgccggctccgttttcttccacctttgtgtgggcgtcaagtcaagacagcagcgtcgtcgccgtttcatctccgcggtcaggtttggtggcactggtcctgtagcagttcaggggcgagagggagatggacatggacttggctggtcgctgtgccgctcggaactggggcgagggcgaggtgttcgtgggtaagggtcgcgggcgttgtgcggctgggaggcggctaccgaggcgacggaattaaagcggtagtagacgagagcgccccgatttataaagcggctttgtgtggctcgctgctcgcctctgctccactcctctcacctggtcactgctcctccgacctcgcgttccttcggcggggctcaggcggtggctgctcgctcgctgctggttcagatccttatccccttcgctgcatcgaggccgttcggagcttggagtttggagctgtcctttctgctttacaatacaaccacaagatggggctggcggagcagcgcgtggaggtgcggggcgcggcgaatcgcaggtgatcccggtcatggggtagagtggaggcggtggtgtgtgtgtggggtatggagccgtcccgtggcgctgctggcggcgggcggcggtggggggacgcggaggcggaggcggagggcgatgcggcggatgaagggagacgaggggaggacgggggcgaggtgagcctgcgggagtggctggaccggccgggccgcgcggtggaggcggcggagtgcgtgcacgtgttcaggcaggtggcggaggctgtggccgtcgcgcacgcgcagggggtggccgtgggcagcgcgcggccgtcgtgcttcgtcgtgtcgccgcccttcgcgcgcgtcgccttcatcgagtccgcctccggctccgacgcctccggttcgtgctcgggctctgacgcctccgaggacgccgaccgggacgcctcgcctccgcggcgacgcgacggcgcaggccgcggtgaggagcgcgccgggaagtcgttcccgctcaagagcgtgctggccatggagctcaactggtacaccagccccgaggaggcggacgacagcgccgctaccttcgcctctgacgtttacagactgggtgtgctcttgttcgaggtgcgtttgcttcacatcaatatatacttttgttttgcggcacgtcttgacattgcttgtgtttgcttcgcggactgcagctgttctgtacattcgaaaccatggaagacaagatgcgggcaatggcgaatctgcggcaccgggtgttgccaccacagttgctgctcaaatggcccaaggaagcatccttctgccagttgctaatgcaccctgtgccagaaaccagaccgaagatgaggtgcgtcgcgtgtcgtgtactatgcttgagtgtgttaacccaggagaaaggttgcatggccggtgtcttgtttcacgttaggtagcatgaagtcctttatgcatatattagtaatgcttctcctcgaagctgggaactgcatttgtttgttaattagtatatgtgctgtggttgtacactttataagacaaaaaacgtgggtatgataaacatgagcatggagttgtttgaagatcaagcttgcctggaaaattgactaaatcttgcaacaagagaggagaaccaatattcatgaggcagtagcagacactagaattattatcagctatttgaaacaatagaaattattaacaattaacaatgctccgcatattcttgatttgacacccttgttctagccttaattttatgtggaaaaagtgctgcaaacaatcaaaaggttataactaaccatcataccatgcacttgcaggacaattctgccactttgtgaaagtcagacatgtcatttatcctatactgtttcggttttgatactgtccatagttcatgtttatttcaaatcttcaatagaaaaatgtggctgtattgcaactgatggaagtgccagcacactttttgttttaggagttcctcagtggatctttatctttggctagagacttctgtttggacaatagaccattgctggattttggttgaggttaacattttttttcttcattgccttcttgctacctcaattgctagttggtcatatgcttgcccttaacgtaattattttagaaaattaaataaagatatgtatcttcatattatctttgtgttatccaatgaggttgtgccacattgaccttctcctcattcttcttttttgtttctttttgtttgacagtgaggtgttgcagagtgagttccttaatcagtcaaggaatagcctggaagagcgtgaagcagcacttaggttacgcgaagagattgaagaacaagaattattgctggattttcttcagcagttgcagaaaagaaagcaggatatagcagacagtttgcaggacactgttgctttcctttcttctgacatcaatgaggtactccaccagcaatctgcacttggccactgtgtgaacttctcaactgatttggacaaagaggtgtgctctggaactgttgaagatcagagtgattgcggatccaggaagcgattcagacctgagctgcaaggtgttgacatggaggaaaataatcgtactgtggaagaatgttcaagaacagttccatcctctgagttaatccaggaaagtgttctgtcaaaaagctccaggttgatgaagaacttcaaaaaacttgaaacagcttattttctaacaaggtccaagttggcgaagcaagctggcaaccaaataagtaatcatcaaattgttaagagggctactggttcagctattgggactgagggaagttcaatagatgatttttctttggaaaggcaatatggtagaaggcaaagaggctgggtgaactcttttcttgaggggttgtgcaagtacttgtcattcagtaagttgaaagttcgggcagaactgaagcattgtgatttgctgaactcatcaaacttagtatgctccgtagggtttgaccgggatagagagttttttgcaactgctggtgtaaataagaagataaaagtgtttgattataatatgattgtaaatgaacaccgtgatattcactatcccgtggtagagatgtctaatagatcaaaactgagctgtatttgttggaacagttatatgaagagccatatagcatctagtgattttgagggtatagtacaggtaatctccgtggcatgcttttttataattaaatttgtatttgatgcaattatcataatatccctgtatttcaggtttgggatgttactaggagtcaggtttttgttgagatgagggagcatgagcgacgtgtgtggtcggtggacttctcaattgtggacccaacaaaattggtcagtgggagtgatgatggatctgtgaagctgtgggatatgaatcaggcaattttattcttgcacctactgtatgtcagcttttgaactaacgatagcatggttatcgaacttgtctgtgaatgtagaattgcttctctccattgttataacacatttttatgaactgtgcaggctgggagtattggtactattaggacaagggcaaacgtgtgttctgtgcaatttcaacctgatacttctcgctccattgccatcggctctgcagaccacaaaatttactgctatgatcttcgtaacatacgagctccttattgtacactagttgggcacacaaagactgtaagctatgttaagtatttggatgcatcaacaatagtatctgcgtctactgacaactcattgaagctttgggacctgtcgatgagtcgaggaaggataattgacagtccaattcaaacatttacggggcacacaaacacaaaggtttgataaaactttcacacatactttttctcttttcataatattgctctacaagtgatagtgtctagttttatctggtggacgtacttatgtttggagtatcctactgtgacaattatctgtgctatcctatatacaactataatgccttttacagctgtatctgattgatctgtgatgttatacagtcatgaacattggtgatccagatgttcttttccttttctctggatcaatgagagaacttgtaagatttttctcttttgatggatcagtgcgcaaaggaagtgctttaaattccattggaccagttgtttatttagatatttagattgttttacaaccttaaattgtttcacttagtgtgtttcctgcacatttaattaccagcttatccctgtagcatattaacatagtggcttgtagttttagcagttgattgatctcatgaaatattttagtgtctcagttgagttcataattaactctctcatgtatacagaggttacccttcagctattccaacataccctttgtatgctgagttggtttctgtgctgaaagaatgacattttcattgagtgaccgatttacttatttgttaaaccttttgaccagaactttgttggcctttccatatctgatggttacatcgctactggctctgaaacaaatgaggtatgcattccatagctaaccttccagaaacttctctggacatctgactgctagttagattgaccagtactttacctacctttatgcaaattcatagtgtacgcgagtaaacattgcatttgttgcaaggaagctgatgtttattattgatggatatagtgtagttcaggatgctcatgttctagtcttcatttgctatgccatgtgtaaatgccatacagcgagacaagtagctttcatacttttctaagttctcgctttatatagaaggaaggaaatgaaattatgatagaatgcaggtgcaaacgaatatcctgttgtaggtgaagcagcatttgctgtgtcaaactgtcaatagaggaatgtcatgcaggaacttagaaacctttaattttttatggattggtatatgtctccaatgcctattcatatcctgttttatgagaaattgcatcaaataaaatgtttaactcactttttccttcctactgtaccacaggtttttgtctaccacaaagaatttcccatgccagtgttggcatataagttcagcgtgacagaccctatctcaggccaggagattgatgatcagtcacagttcatttcctgcgtatgctggagagggcagtcttcaacgcttctttctgcaaactccagcggcaacattaagattttagaaatggactgaggattggagtttgcatctgctgagtctcggctataaatggactgacttcttaccaaggttgtgcacgtgtgtggcttcaaagattgtggcaactaaattcagagttgccaacggtgcgaggtgcagcttaatccgagttgcagagttgggagaggtaggagtagctgggataacagatttagtgtggtttgataggattacagattagcgtggtagcaaaagtagcataaataggaaacagaattgaggcgtgggatagtcccacaaggaaaggttttgtacatcattggttcgaggtatacttgtacaggcaatcaatccagtttttacctagcagcatcaggcttttgctcttgcggcagtggtacttgaaaggcaaaaagtatgaagcggtctacatctgttgaatcaaagatcagcatttggctcaagctctctctctcttttattcccaatataatattgataaatgtgttggccttccaggcatgcggtgccaggcttcgatcaggtagtatggttttctacgcatcctaggacttctcggcgttcgtctgcagacgtgagggaggagctgtgcaagaggatacaataattgtcatgagcttgcgatatactttctttctcgaacgagaacttgtgatataccctgatatatccctccgtgctgaattgtaagatgatttaactttttttagatatatacaaatttgttatggcctatagttaggtgagtgtgcgtgtatattgtgggtataattttcaaaaaaaaatcatgtactttctctataccaataaagaaagccgtcgtattagtcgttgtttatgataacgacatggtctctaaaacctaactttgactctccaaacttttcaccatatctcattaaaatactcataggccttggccgtggtgctgtccaggggcgaaggtgtgttataactagggtgtgcaaatgcacccctcaaattttgtaaaaacagtagatttaatcaaaattttaccatatatgcaccacatataattcatgtatatgcacccacaagctaactgcacccccctctgatttgctctagcttcaccactggtgctgccaatcctactccaatctcaagttaattgaccaaaaccgagtcaatttatgattatagggtggatgaaaatataagttggattgaaattttacctctttattattaggtatagataaaaaaattatc

SEQ ID NO: 4338 - DNA, 4823 bp, Sorghum bicolor
gaattcaaaatttcattttagaaccttttttttaagtaactggaggggcagcagagcccctacaggaattttagaacttttgacttatctttgatgtcgatatggtatacacggaagttttcattctcattacgatctacatagtgtagtttgcagtttttcatttgagattgcttagagctctacatatatatttagatcttatgaaattgaaaatttccaaacaacctctcgaccacgttctaaacatgcctgcaccacttccattctggttggatccaaggcagacgaccgctgaagagaggcattttgatctgatcgactgtgccatgctcacacagctggctccaagtacctactgcacgtctgtagtctgtacctaggcctcgtttagtttcgaaaattgaaaagtttttggtactgtggtacctagacaccacttttgttttttctgcaaatattatccaatgatggactaactagaatcaaaagattcgtctcgtgatttacagctaaactgtgtaattagtttttgtttttgtttatatttaatgtttcatgcatgtgccacaagattccatgtgatgaagaatcttaaaaactttttgattttcagtgtgaactaaacgaggcccaactacttgaagggctgtgaagtaatcgagtttcctttggatggttgaagtccatgcccatgcacaaagagttcgagaaacaacctctggcgcgcgccattgatttctccctctgaagccagtcgaagctcgatatatcattgacaagtgccatgtccgtgtcggccctattcagattgatgatgaaaattttttagctgtcacatcggatatgtccgaaggatgtcggaaagggtttttagaaactaataaaaaaataaattacatagctcgttaggaaactgcaagacaaatctattaagtataattaatatatcattagcacatgtgggttactgtagcacttaaggctaatcatggagtaactaggcttaaaaaaatcgtctcgcgattttcaaccaaactgtgtaattagtttatttttttatttatatttaatgttctatgtacgtgtctaaagatttgatgggatggatgaaaaattttcactcttccacgccgacgcgcacgcgtcacagatggctagctctgcatctcttgccgccctgatgccacgccgatctgcactgcacccacgcatggagagccacagcgatggtagctgagaagtagtaaattcttgaactatcgcagtagctagcctgcattcaaggaggagactgcaaactgaccgggcaggcgggcacccggccattaacgccacacctgcgcgcgttgcacttgcagggcgagagcgaggcacgcatgcatgtacgtactacgccccatcaccgtgccctcctgctgaagtgctgaccgagaaccctcgtcgcgccgcgtgcacgcgctcgggcgccgcgacgacgacacgacggcatcacctgcacatggccgtccacggtcgaccatggtgcatacagtactggcgtaactggtgcctggtggtgcatcatgcgttcgttcgtggcgtgtcggtgcgagcaactctgaactgggtcgcgatagtgaaaggatgctacggtgctgcaggcccatcaaggcgtggcattacggcccggtgttcaccagctacctcggccggactcttttcccctctcggagtgtcggtctttctttcaatgcatttaggccttgtttagttcgcaaaaatttcaaagattttccgtcacatcaaatctttggtcacatgtttggagcattaaatatgaatgaaaataaaactaattgcacacatgtaatttgtgagatgaatcttttgagcctaattactctgtgattggacaatgtttatcaaataaaaacgaaattgttacggtagccaaaaactgaaatttttgccaactaaacaaggccttatttgctgcaacaggtgcaccatcctttgccgtgtgcacaatgcacaatgcgaacgagaaggcgcgagctgttatatagaccagtagcgagtcaggactcccgactcacagcaagcttcagcagctaagaaagctagtgtggagagatggctaggccggctcttgtcgtttgctgctgcctgctgctggcgtacggcgcggcagcgcgcgttctcggcgagggcgagccttttggcggcggcctgaagaatgctgcgcgtcatctcagcgatggcgatcctttcggcagccggaaaaaccccgccgacccgcaccattctccaggttcgaggccaacgacttccagtttcttcagtttacgggattctcatctccacgacgtaaaacctgttctgttgtctgtgttctgctctttccttgcaggctcacacgggactccgccctgctcgccgtccatcggcacctcgccgaccacacccggtggtggtggcggcggctactacccgccttcgcccgacatcggcacttccccgaccacaccgacaactccaggcggttgcggcgggtacaatgctccaccctcaccgtccagtgacacctccccaaccacgcctggtggtggtggtggtggctactatggccctccctcgccgtcctctgatacctccccgacgacgcctggaggcggcagcggcggatgcagtgctcccccttcgccgtccagtgacacctccccatcgacgcctggaggaggaggtgggtactacgggcccccttcaccttccagtggcacctctccatcgacgcctggaggtggtggtggctactacggccccccctcgccgtcctctggcacctccccgacgacgcctggtggtagcggcggcggatgcagtgctcctccttcgccgtccagtgacacctccccatcgacgcctggaggaggtgctgggtactgcgggcccccttcaccgtccagtggcacctctccatcgacgcctggaggtggtggcggctactacggccccccctcgccgtcctctgacaccacgcctggcggtggtggtggcgggtacagtgctcccccttcaccgtccagtgacacctctccatcgacgcctggaggtggcggcgggtactatgggcccccttcgccgtcttctggcacctctccgaccacgccatcggcgcctagtggcggctactacggccctccatcgccgtccagtgacacttcaccgacaactcccggaggcggtggcggctactacggccctccctcgccgtccagtgacacttcgccgaccactccaggcagcggtggcggctactacggccctccctcgccgtcctctgacacctccccggccactccagacgtgccattaccgcctatcagcacatcgccgccgttctctccgctgacgccaacaccgactaccccgacgccctacgaccccaacacgccgccctttacgggcccgtgcacgtacgtaacccctaaaaccctcgcacatcagagtacagctgccggcttacataactgaccaacgtatgcgtcgctcatgtcttctggctttgcaggtactggatcatgcacccgggcgtggtgtggggcctgttcggcttctggtgcccgctggtgcggctgttcgggccgagcgcggcggtgccgttcgggcacgacctgaccgtgccggaggcgctggcgaacacgcgccaggacggcgtgggcgcgctcttccgcgagggcacggcgtcgctgctcaactccatggtgaacagcgggttccccttcacgacgcaggaggtgaaggacgcgttcggcgccgcgcttagctctggcgatgacggcgccgccgcggcacaggcgcagctcttcaagaaagcaaacgagggacacgtcaagcgcaactaggcggccgccggccgccgccgtatgttatgcactgtgtgtccgttaggcgtgcaaactgcagtgcagctatatatgtgcgtggcgactagcgagcatggaggggttggttaggatctgcacgtacgtgtttgctgctgctgctgatgatggggttgaagttatcagtacctctttggctttatcttgtattaggtgtgcatgtggtctaaagttgatgggagtaggatctgttgctaagttgccatctttccatttgtttgcagaatgagagtatgcaggcttctttgagtcttccagttccatggttccacctgtcccttaattttctgatgtaccccctaaaccagtactgcagacataatcaagtggaaactgtaaccgaggttgattcagtgaactagacttcgttttggcacaatgaacaccttttttttttgaaacatcagcaagctttattgatcgatcagaatagggcacaatgaacacctttgcaacgagccaggactaattaaaattttcgtgatccgatattatttctctgactcagagcagccctccaattaagccagcccaaggaattagcagcggaattggaaaccatgatagcagtggcagctatttgggccgcgttcccccaacgctaccaggccgtgagtctttacagaccttcggaaccttgtgtctagttaggcctaatggtcattgctttctggaatttatccataaagtctgttagcccaagctcatatttccaggttgggtgtggattccactatatgcagtccgttgggcctcactccacttcaccgtgcgtctactgagtatttgtctcattccatttcctcctgctctttttcgcgagcatctctagaggttactcaaaacatgagtttagtgagagtactgagtcctactggagtctatgatcaacgctat

SEQ ID NO: 4339 - DNA, 3940 bp, Sorghum bicolor
aggtttaggatgagccacaagcacattgtactgaacaatcaacaatgtgcaagaaatctggtcatgtagacatcgaagctgtatgcaatgtactgaacaatgcccagatagtggcatagtgcaacgcagcgggctgaaaaattgtgaatttcctgctgtaggattttgttcttgatcaattaatgctagtggaggagtgtaccgtctttaaacactgagcttattaacatcaaagttgtatgcaatgtactgaacgatgcccagatagtggcacagtgcaacgcagtgggttgaaaatttgtgaatttcctgctgtaggattttgttctttatcgatgaatgctagtggaggagtcttaccatctttaaacactgagcctattaatgaataatgattccctcccccctctgctgaggacagttgtacaatctaccaaatcttgttcaacaactctgatgagatgtaagccataattcagtttatctgaactaaactactctccaccagctaggcatttcctgaaagaaattttgttctcattcttttgtgctagagatagtgtaacaaagtgtattggagatgcatgcacgacagtattcttgcgaactgtttttgaacaatctacaactaaaatgcatagatattcattttccttctatgtattttcagctcatagtaagtaatacatgttcattaacaggagagaactgctaagcctcagtcaacatttcgtttacatgaacagaagttgcatatggcaatgctgagaaagcataaaagttctactgtccatacaagtacagtacttgaaccaaggaagaaactggaagaggcatgtgatcgcatgccaactcatgaaaacagcgtgaaaaagcgacacagagagagaacggacccttctagtgaaatgaatagtgacctctacgggataaaggaagtgacctcctctgtaaataagcaagtcatagaagtcaatggttcaactaataagcctacaaacactggccacgaaatggtgaaaacttccacagggcccaaagatgatatctttggagatctccctctccttgaattagagagctccaaggttatgtttcggactggtgttcatgaacttccaactgttatagaagaatcatttataacaaatcaaaccgaagcagattctataccagaagttgtacccttggagctgatagatgcatctgacatcactgctcagacgccatctcctcttgaagacttggtgaaaagtgaagacagtgagccagcatgcatctcccacaatgatgtggcagggagtcacccttccactgttgggattgatggtctgccgaatcataagaacatcaatatggtgaaaccaggtcttggtgatatgcagttgaaatttactgacgtgtctgctttaggttctcattctgttctgaggtcaaaatctggttctggttaccctctgcagggttgttttgatgtgaacaagaactgctctcaggaaataaaaaaacatggtactaattctactagcagtccacctgccatgagaacaagagctgaagaaactaaatataaagatgcaccagttaagggcaagaagagtactgatatcactagtgcagcggttgcactacccgtgcctgccaaccaactttcatatcaagctagcgcgttgccctctgcagtatcacattcagttttcagcacaagagttgattcaaatgacatgtcttcattcagaagtatgcctgccaaggaatgcatcccaactaccagacctggtaacttaagaactaatgtgtgccatggaagtaggaaacatgtggatccatgtgtggcactatctacagataaccagggtagctcgcactcaaaacttcatccaatttgcagtcctgctaacattggaatgacttttatgaagctaccgggcctcgaacggatggagatctcaaactgcaatgtaaagataggcgaaaacaggtttagtaatgcagagtcaatgaacgcagtaagatatcagaaacaaccgtggttgagtggcatgacctatgtaatgcaaggtcagaaacagataggtctaagcagctctcaagttgggaaaccagctcttgatggttatgggggcgaaggtgatcatcatctgcagcaacccacagttcgtttgatgggtaagaccgtctcagtttgctcacatagcaaggatcataatgtatcgaccatggatcaagtgagtcctgacaatgttgccattgaagcaagccgcctatccacaatctcatgtcagttaccccaaaagagatcattcccttgtcaggattctgtgacaccaagagtgcatctaaacaactcttcagattttttggcaaggattcccaacaatagcatgcaagggcaaaatactgctttcagtggcctccataaccaaaggccacaaccaataaatagtgctccaaccgtgaaagattgcacttggaattttggtaatcagtttgttcgtcaagctgaactcaataaggcagctatagtcagcaccaactctcagactaggcatctagagctacatcaaccacctcaattgataagcattcctcagaatcaacagtctcatttgtggactccggcagcacagatgagtaggaaagatcagtgttttgtgggtccagcagtgaaccaatcttccctggttccaaaatcattgctaactgcaagtatgaaggaaaagtatcagaaatccactttgttgtcttacgatgatcctagttctatgtctatttgccaaccctaccagatacctggtgcaaactcatcttctgcatctgtcacatccttttttgagtatggtgcggataattcgttgtccagaagctcttctcctggactgagtctttctcttgcaactggtttggctaatgagtctgtttccacaggtagagtagcttgtgcaggcagtcttacaaatgcagatggtaggaaggctgctagctttgccgaaccaataagcaatagttcagcttatgcagataatgtttcacagcaacctgcaaagccaataagcaacagaacagcttatgcaacagataatgtttcacaacaacctgcaaagagacaacttgttacagatacacaggatttaatgtctatgggcccaaacattgtgaaccattcacctggctggtcacttagtgatgcagttggtcctcaggtacttgattttagtaaaagaatagcaagggatgctgttcaaacgtcaagaaatgaaagcaacaatccaagggccagttccggtccagttccgcctattgaaacatggtctaggcctgggttggttgcaggggctaataccatgttgaagccaggtcaaaacctgaatgatcattccaaactgctatactccaccaagttttcggttgataggggtatcaattcggttgtattatagtggaaagcaataaaaaaataataaggcgtccttgttgaagatagctctggagtttttcagtattcaaacagtcaggcacaggaaacttgtaagagctctacatttctgaacattttagtttagcaattgatggattgctttattcttgtaattttcctggtcaaatgtgcaaggttatttgattgtttgattacatgtcatgccatatctgacaaaagcttgaggacagttcaattgtacagattgtaactacttgagtgttttgtgggcattcaatttctaagactaagcagtatttgctatgaacccacttgatgggcagcagttcaatttcacagacggtgtactgtattatttaagctcgaaagtaaagcataaaatttactttcagtcagcttctggaaaccatcatgcaaactttcggatgctgcacctcattgatttgcaattattagtcactgctgttacaaagctgcatgtttcaccttttttggctttct

SEQ ID NO: 4340 - DNA, 2818 bp, Sorghum bicolor
attatttttcaatcataaattaattagacttaaaagattcgtcactaaaattacagataattgtgtaattaattattttttatatatatttaatgtgttatgcatgtgtcgcaagattcgatatgacgaataatcttaaaattcttttaggtcaatgggtgaactaaacaaggccttagatggcgcactgtgcatgcatctcccaaaccaaaggccttgtttagttctgaaaactgaaaagttttcggaactgcagcactttcgtttttatttgacaaacattatccaatcatggagtaactaggcttaaaagatccatctagtgatttacaggcaaactgtgtaattagtttttattttcatctatatttaatacgccacgtaatatttgatgtgatggagaattttgaaaatattttggtttttagggtgaactaaacaaggcccaaactagaaaaacgtgccatgagtcgaaaaatgccagctggccgagcttcaatgcatatcttagaacaactataatatatatggactagttagtgtatatatatagcttttgcatcagtggattatagttattgttattgtcacaatgtatatagactgggtagtccatatgagagaggcaagaaagaaaatgagagagaataattatttgtttatatcttatgggcagctcataggactataagtatctttacttatggactcatctataaaccacttctataatattttagctagctggtaaacaatgttctaatacttatggactacttttgtgtaatattgcggttgcttttaaggttcgacccaaaagctgggggaaatggaaatttactgcagtgcagtagcaagtgctgttgggctgttggcggaagaagtccactttaggtccctcaactttcgcaaaagtctgtttttcatccctgaactttaaaactgggtaaaatacatccctcaatttttgaaaccatgcatattacgtccctgacatggttatgagcggttttgaaggcagttttgtctttttcatttgtatttattttggctgaatatttgtaaaattatagtaaatcacataaaattcataaaatagtaaatctgattttgttggactccagataagtagatctacatagtgaacatataatatagtatgctttagtacaaaatttttattgtagctttagaactgttttttctataattaattagaataattcatagctatagtttgtatggtccaattgtggtgaatttttttatgttagactaattattatatgtttaaactatggtaaaaaaatcatactcattagatcatgtataacttagttatagatttattataatttaacaaacataaacctaaataaatctataactaagtaatacataattcaatgagtataaaatttttactataactcaaacattgaataattagctcaccatataaatttcatcacaattagaccatagaaaatgtagctataattagtttaattaatttcagaaaaacatagatctaaagatgcatcaaaaaaaatttgtactagaacatactatattatatatttaacgtgtagatctactgatctgaagtccaacaaaattgagttttctattttatgatttttatgtgatttactatgatttttcaaaaaaaaatcagccaaaataaataaaaagaaaaaggtaaaaccgctttcaaaaccaggtcaaggatgtaatgtgcacgttttaaaagttgagggatgtattttgtccagttttagagtttagggataaaaatcagactttcgcgaaagttgagagacttaaagtagactttttccgctgttggctgatgtaaaactgcaacggacgagcattgctcctatgggccggcccacaaggccagctttcgtcaatcccaccactggaacagaatacagaaaagaggcaccggattattcgggactcccttccgacccctgtgacaactgcatccgaagatggccagaagaaacagatccgcggcctcagccgtgctggtcctcctgctctgcgctgcggcggtctcggcggccgctgccgctgccgtggcgggcaagggcaagggcagggtcggatcggctcgcgcggggccgccgccttgccaggatcttgcgacgcagggcgattgcgcggcgagagctgggtgccggtggtgccgcagcgaggcgctcgacgatatgtgcttcggggccaccgaggcgtggcgcctcccacgccaggtcttctcctgcgatccgccctccggcgccggcgccggcgccgcgcacgcccgctagaagtgatgcggtgatgccgccgctgcgcccgccttgttcttcgggattgttccccatcttctgaccttaatttgctttcgccaggcctccgttgtttctcctcttgtctttgccggatctgagactttattaggatagcgtggcccgttttgctatgtgattctttcgtgggattgtgtactgtaaaatctggtcaaaatccaatcggagcgcggcaaatattgtcgttctctttttttaatctgataaatcattgtcgttcttgaagtgcaatgacctgtcatttggaattttggatcagttctttcgtactgacaattttctgtgtggttgcaacttagcagtaggtacggccagcacggggtcaaaagcgagcggtccagattggccgccaagcaccacagcataccggcgcgaaatcacttttaactaaattactgtcatgcattgtcgtagcaatcactttgatgcgttcattaaggcattttcagtgtttcatt

SEQ ID NO: 4341 - DNA, 7128 bp, Sorghum bicolor
aatgcatctattattcccccaaaagtattttctgcagtcgcaattgatattgtttgattgcccagctagtataaccgcataaggttgatttccttgcccactttgatcctcagattatttttctctttagagcatgctctatcattgttgtgcaagtccatcttgtttctcagtttaaatatgaaatagttcatgatatgagtgatatcagccagaatttgaaattaacacccccccccccacccacccacccacacacacacacacaaagcatctcagacattccatgccagcagttcagcatcaagaaacaaccatatcctcatatatagcattatcctggagtcttaaaacaaacattgcgctggagtgatggagaacattgtaacactttgagcatctggcccaagtattacaccaaatgtgtcccacctagcttgtgaattcatagtataacttttgtgtagtaatgttcaatccacaaaagttgttcaatcatgttgattacgatgggttaagggggatgtcactcttagttttcatccagcttttcacaaactcacaactctgtattagtggaggggtgatggggtattccttatccctgtttgctccccttggaaagaggactggactattataagccttttattgccttattgtgtttttttgtcttagtttacttttgttaaattgcacaacaatatgacatgttgcttcaaaacaaaacagcaccaacatcgttaatttgtagctgaaaacaatctacagcacagttgccaataagcaacaattgcacattctcatattcacttcaggtgttgcttatgaacatgctatctctctctgttattgtaatcttgcataacatggaaaatgtactttgtttgtatgcgcttgtatttacctcaatccacatttttcactccaatccacttcaacacacatagattgatttcaattcgagtgcatccaaataagtccttaaggtgaagtatcgttgtgctggatttacatttttacatgcatcattacaacactgatttgtcatagatgcaaatgcttgaaagatgttttacttgatataacattagttaaagataaccggctgaaattaggctaaactctatttgatttttacttttgaaagtttatgtgttgcagcacatgcaagatgaggatgcaggaagaccaccgaggaagttcttgtaacctgcaggttcatactcgtttgtttcaagaaataagcaatactgccagatgtggtaatgtcaacctgacaaacataatgctactcggttctttgtaagcactttaagttgctatgtatgctatgttccagatgttcgttcctttgaggaatctatgtaacgtcttttatatgaataactataactatgttttattgacatccgatatatattttgtataaaccgagagaacacactacattgtactggtggtagttcagtaagctggtgtacctgtggtttgcttgccgaaaagttacgacagaaagtattgttcgctgatttgttatgagagaaaaatattgctgaatctaatttagctgataagctcagtagattccatataaacatatgctatcaatatataatgtgcaagcttgtaccgttacctatcatggtggtcaactttgtacaacttgaactttcagcacatattctatgaaatatattttagaatacattagctttttgcaataaaaaaagaaaatcggagttggcatctaatgtgaagtggagtagcttgagttcatctactgtcagccactcagcagtgtttttttttattacaaattacaataataaattagtgaacatggtttatcagcgaacgaatgaggtcagatccaattgtctagtgtttttcaatcggacggctcacgtccagcaatctccgttctggtcccacccaatctacttcgcaggtccttcactccactgtccactctcctccaaagtccaaaccccgccgcacacttctcctcgcctcaaaaaacacaaaacccccgaccgccgccggcggccatgctcctccaccaccgcctcctccctcgcctactcgttccttccacccacacatccacactcctccgcccctcccgtttgccgctccgtctctctctctcgccgcgcttctccgcgctgtcccacctcgcggcaccgcagaccgtcgaccagtccgacgacgaaggggcgccccaggggaaggtgcaggtccagctcccgctcgaccgcctcttcgtgccgcccggggcaaccgtggatgcgggggaccaggacgccgtgagcgcacgggtccttaagggctccaacatcgtgctgggcccatacgcgcgcggtgacgcacaggtggtcaacgcagattttgtgaagagcagcgtgcgtcccgatgactgccctcgggacggcctaccggagttcgcactcgttggccggtcgaacgtcggcaaatcgtcgctgctcaactcgcttgtccgccgcaagcgccttgcactcacctccaagaagcctggtaggttttgctttgcctaggtcattgccttgttcggttctctctgcagagtcatcgagtttaggatttagtgattattagtggttataacagaggtcctacttgttgaggaagtgaatctgaagctgatagtgcgtcggtttcgttaactctgtagctactgtcagagttggtgaaatcgtgaaaggtcaggagaatctgcacattcgcgcagttgtgtttgaaggaaccgctgttttgtgaaattgagatagcacgttgctcctgcagttggaattgaggtgtttggtttgaggaatcagcccatcctagatgagatggtgcatcatgagtccatccctcagatttggtgaaatgactctattcatcatgcttatactaagtattagcttgtgagggatgagctagtcatggatcaactcattccattcgacaaaccaaacaaaaaagtgaagtgagaaaatggagtaatcgttctctaaattcaatatatggcagttctatcatgacttttgcacacaaggaaaattatggtaagccattggagtatagagaacggaacttatagagtccgttggagacacgagatatacatagagaatattcatgggatgactctccaaatagagatatagagattcaattttagagaggctcttggagttgctcttaagctgaactccctttggttcaccatggtcatatgtgttgtcctggatttatctgaaatataaataccattttttggtgtaatgcttatcttttggaagctcttgggtactctgttcacacatttagtttttttatttaagagctaccatcacatggagctagcatttgaaattacttctccccagcttcttacttctaagagctattgtcacatgtgagaatataaaactgtctggttagggattataactaattatctgtaaaatccattaaattgtgctctggcatcaattttatctctagaaaatatctctggaaattcacaatctagtcttcttcagttcttctgatccgctttgatcatttgtgcacctttagttttacactttggagatatactgcatctgtagagcaggaagttaatataggtaacagtagtaactgtacagagaagcttgtttcatttcgttaattttgttggttattttcattattgcagggaagacccaatgtatcaatcatttcaaagtaaatgacagctggtatcttgtcgacttgcctggttatgggtaaactactgaccagcagacttttagttttactagtagttttccaaaaaaaaaaatcatgtagatgaacatttttatattttcttgttgaaaatattcttcacaaataaatggatgaggtgccttataatgttacatgtttaatcctctaaaacaagtcacaatcaattggcaagcggttaacaattacagaaattgcttaaacaatcctaatcaaaccctttttgactttttttatcttattatttatttatttcacaaaaaaaaaatctcccttccatctcttggagaaatagagggggagggcagagccttgctactgcaaatattactggaatagatctggcaataaaggccaatgcatggtctgtccaagaaactagtaagaatgtaagaaagagtttttcatttgataagcttatgaagcatcttgcatcggtagtatatgcattaatgagatacagtttgatagttcaatctaaatgtgaaaaacaccatgtcatgaaattggtgtatgtgagttcaaacgtttgttttaaacactcaatattgactgggaatgtctgtgcctaatatttttatgtattctacttcgatctatatctggaaaactcttcgtagctacatgatcttcgatttttcttttggcaaatcaatcagactacctgttatttgtcatatgtatagcagtgagacatgaattcacaaatatagaaaataaatttgcatcccattagttggaggatatactcgaaatattatccattttcttgcattaacaagagcttttattgaacagatatgcttctgcaccacaggaagctcgtaccaattgggatgaatttactagaaattactttctcagtagggagaatttggtatctgtttttctccttatagatgcaagtatacctgccaagaagattgatcttgactatgctagttggcttggtcaaaacaaggtaagcatacttctgaaacgactgaactcccatttatgcagtaattaaccatcattctttcatccatatgccatatgtgttaggagtgctctttgatattgttagtagataatctagttgatctcagcaatagaaaataatgctgctgaaagtctaaaggctgaaatatgccagttcgctaagttgaaaatcttgtgcgcacatgattctagcaataagctgaaccagatttgtttacaatcattttagctttgacacacaatgtgtatggatgctatctgttctttttagtgaaaataaactatggttgactgatttatttacccatcacaatgaaagatgtatacttgtctgatagaacaaatatggcactgtattagaatttaagcagcagcaatcttcctagaggttcgagttagaacttggaaggcatattgccgacctgggacaaagcaaaccaagaatttgttactgagttatttgctcacacaaatatccttctctgtttctgcattttgccgttgggtttatgatgtagcctgctgtttgtattttgtgctatccttttcaaaacccaacgaagtctaccgcgtgcagcttaattctggagtctggaccccctacctcaattttaaaatttctcaggctatcccagataaaaaacaaaagatctggtaacagtccgacatacactagtacactgtactaaaaagttctgaaaaggtgttagcttcatgcctctttttaccttttcctgtcctgggcatagatccagttccattcttcgcgtaaatactgcagtgccccagtgcccacagccacccccaccctttgcaaccaggcctgaactctcaaaccctggaccggttgtcctacccagtcaatatcaattagcggccccaccttcttatgcagttatgctcttctgtccttgcttccttcaccacgaaccattattgcgcctactctcatttctgttttgctgcaatctagtgcaaaataatcctctttggacgacctatgttggcatgagccatggtcctggggacaccaacatacagtaatggatggacttctgtacagtcagatatagtaactagtaaatgtgcttgccatcacaacagcatcaaacatgcattattgtttacccatgtgatgattatttataggttgttgagcaataaatctggcaccgtttagttttaatgttttatccacattctgttcaggttcccatgacccttgtgttcacaaaatgtgacaaacgcaagaagaagaagaatggcggcaggagacccgaagaaaacgtggaaactttccagagcctaatccgtgaatacttcgaggctgcgcctccttggatcatgacaagcagcgtgaccaaccagggccgcgatgagatactcctgcacatgtctcagcttaggaattattggctcaagcattgagatgcaatgataactaaactggatcgaagcaaccgaaacaacatacagagcactgtctctcattgatgcatgagtagtcggcacctccgcaatcaggcctttgcaccaactaatccgccttttgagctgtttgctgtccaatatgacccctatacatgattatccaatcaacactctgggaatacagacaaggtgctaaaatcagctgatcctggttttttctattgtgtacacgtacaatcccaatgttttccccttgttcccttctgattataggtttgtgcatgctctggggttaaatgattaataaaccctggtgtcagctaatcatcagcgggaatctgacttttttttgtttgttacttatgtgctcccttggaccctgcagcatacaaatggcaggaggtgcatgaacttgacctgttaagaaatggctttgttgtgtacagaatgtattgagagcgccacattattgggatccccttctatcattatcatacagcgtcttgtgtaaaatatacctgagaaaatagccagtagaccggtacaggtttgccagaatgctgatcatatataatatttacaggcaaacatggctgtaattttgttgatcctggtgaaaccataggctttcagtagtacatctgtcctacacctatagtttaaagttctgacacccatgtcttcctcttaaaaaaaacacaagcttgtccgtattacggccacgtcttaaaaagccgtgcgccgtctacgcgatagatgcttgtataatccaaagagaacagctcacctgccaaaccaaaccacagctggagcacgcattcgccgctaaacaatgcaatcagcgcgtactgatgatgccttggagaaacagcacgctaacaaggtgttgttttatgcttggtgtgtgcagtgcaggcaaggactcgttcaacgcct

SEQ ID NO: 4342 - DNA, 14338 bp, Sorghum bicolor
tgacactgaacacggcaaatgaatgaaacataagaaatgcatacaagctgatccatagctgctcaccaacttcgacataaatgatgatgggaaaaaggattttattgggtaccattcccattttttttgtatcgaacagtaaattaactgcatgtactcagactaacatttccaggggcggtggtttttgcgcccaattcccactaaaaaaactgggccatcatcttttttttttgttcttataataaaaattatggtaaagcttttgccgtccttttaaaaaaacatttccagaggcaaaattttatttctaccacagaatgggcagcctctttggctggttatagcgcggtagcgccaagtaatgcgatagaaaatgaagtttagataatcaaagacaagtcttataatgtttggtactaatccactatcatgtcataagagacaaagccgcagtcaactacttctcagtgtgcactgatcaacatgtatgtgaactagctgccaaaattctatatgaggctaaccaaatactgacacttctttcacctaattatactattgtcaccactgttgctggcaataaacaagtggtcgggagccaaactgtttcactgcataactgtgtgattgattgctaacaatgttagcttacctcaatgtagccaagtccttcaggatcaagctcctccatgatcagggcggcatactcttcagcttgctccttaagcctggacagcttgttggcagatgcacttaacatgataatctggaacagtacaaagataaacgagttagtacagtgttggagcgcaaactcagcgtgatttcatattttaccaaaccactagaaagtaacccataacagcatatggctgattcagttcctaacagtaacatcgtcgaaaggcacccacatgcctttcaaaagctacttaacgctcaccaagtcacctttcaacgcattggatgcaaggaaaaaaaaaagattagctggcctgtcggaaatgccccttacctactgccgctagactgcagactgccgtccactgaaaatttactggaatgccctcacacgttctagaaagaagggtgcccctctcctgaaggctaagagagaaaaaacgagtgtcctaaaacaagcaggtagggagtgggtaacggcgtgatgctttccacgccggtttcgctcaccgactacgattagacgcaaatacttttcgcgtacaccctgcgaggatttcctccaagaccctcctcttgtcggattatcacaggttaactaagatttctccaccactgaccactcaaaaataattaagaaacaatagtaatccgcaaggtctgcgatatggatgcgctacctattcgcagaacaaaaacagatattgctgtggcagtgccgagaaattagacagctcaatggacaatataaaactcttgccgtcaaaggacagctaaacgatccgattttgatatccccaaatagcaaatcagaaaaagaaaggacgaaagaaaagggaaagaaactgcttgtagtgcagcaccaccaactccaagcacagccatgggcatgggtgtttgttgcttacctctttcacctcctcctccccaatccggccgtccgcgttcttatccaccctaattaaaaaatgacaaaatcaatacggttattgaaaacaatagacgagtctcatagtagctagctaagagtggcgtaatggtgagcatggtggcggggtggtctacatgtcgaagaagatctggaggcgagaatcgaagctgttgtccgtgatctgctgccagatctcgcgcagctcctccttgttgattttgtcgacctgcatctgacggcggcggctcaatgtgtcaaacagctcgagcgcgaactctttcgattccgtcatccctgcacgtgcacgtgcagctcccaatgtttcaacgacgaagcgaaatggggggagaaagtcgaggggaggcagcgcggggtggtggtaccaatgcattccgcgaagtcggagcgggagaggaagccgtcgcaggcgaggcggtcgaagttggcctgcacctccatccaggcgttgttggccttgttgctgctgatgaagcggagaccgcggagcgccttgtgcgcgccggagcgcgtgcggtcgagctgcgcgcgctgccgccgcgcggcgcgggcagcgagggccgactcgatgcctgacgacggctgctgctgctgctgcccctgcccttccgcgcggctctgggtgcggccgaagcgcttggtgaggtcctgcgagaactggcgcgcgatggacatggcctccgccttgagctcctgcgagaactgcagcagccggtgcgacgaggtccgcctgatcgacggcgaccgtgaccgcgacgacgacgacgcgccgcccgcatggtccccgcgcgcgcccagcggcagcccgttggcggcccccgccgcggccggctcgacgctccgcagaatgatggtgtcgtcctcctgcaggtcgagcgtaacctcgaccagctcctccccgtcgtcggagctgcgctcggagccccgcggcgaggagcccgtgctgagcgaccgcggcgttgtccccgccgagccgctccatcgctggtggcccggggcggcgccgcccctcatcgccgacccaatcggaagccgctttccagcgcggctcccggaacagtccaatgctcgcagaggagacgcgatcgactgctgggagtgctggctggatggattttgggggtggctttggaatctctggggaaaggcgcccgcaacgcgtccgagcgggagccgagctgacgaaagaggaagcgcaacgggagagcaatatatgaggatgagaaggaggcgagcacggtgggccggcccacgcaaatgcacagctgattatcaacgggtagtactggactcattgtagtacgaccagcctaaattctactagcacgtgtactacctctgtcttcaaaagaatacaactataatatgcaccttagttaaaatgcttcacatttgattaagttttagaaaataatattcatatttatagcttcacatcaatttgttatataaatatattttgtaattaatttaatagtatttatttgatattataaatatttataccttttatttataattggtcaaactttgtatactgaaacacgacaagatttcagaattagaattttttttagggagggagtactacacttctgccaattagcccagcacaaattcatgcggtaaaagagcaatttattggtgtgcttgagaaagtgacgtgggcgttgttttgatatagctctgccccccccccccagcgaatatatagagcccaattaaatggttagaatgtaattagattttaatgaagacctctaacaagaatcacttctctatgtgtaatgatttctttttgtccgcacatcctgtctctctcatgggctttccctcttctccaaatctgacagccttagaaagggaaatcaggggaggctggctagccaggcagtgcagacagtgggagagtgttgttcgggttctaacaatggcggaagcagctaggctaggtgggacgtaggcacccatggtcggagcaccacagaatgaaggggaggggaaggaggaggccgccacggtcgagctagggttttgtcagagctctatggccgcgaagctccgacgaaaccctagagtggctgcgacaaggcagtgggcagtgatggacaaggaggaagaagaatagtgaaggggaaaaacagagtgttgaggcccctgaaacactcagtcaaaaaatactaagaataaagaagtgtgttcacttgctcctcactttgtttttcagtggagctccagaataaagatgtgtgtaggtctaccaaacttgccttaaaatatattaaccatgatttgtttcttatcttcagttagatgtgtttagaatggtggaaattcatcaaaaccttaaattatggtaggaaacgaagaatcacttgttgcaaaatgaggtcatacgattacttaggattttttatgctggaactagttgaccatctgagcatgattgtactagccaactttttaatattgttgacatgccatctagagctagcattaattatcactcataaaataacgacttcggatattctgactaggaaaaagtcatatacaaaataaatttgaccattaatttatcttacaatatgttgttaattgataaaaaataacaactaaaagacactttaaatacaaatcggttagtgcaagttattgtgtcctttgcataaaatttgactatttgttggttaaaatttgtacaattttgagcatatgcctttgcctttgccataattgatgaagaaagaagtgtccacaccaacggaatcgacattagtggaggtgatgtgtgaggtgtagcgtttgatgtccatcagttataaggactcccctgctttcactaaaggcagccacacccatgcgcaccttcataccttgttagaagaatctggtgctatggcctgagaaccctaagagtgggcagtggcactagagcttgaccagccaatgtcatggggcagatcctcgatgtttgtcgactcagccccaatgtttgggtatgtctaagggttagtggggatcctcagctctccactagcagagatggaacgtaaaacccaacccatgaggctccatctcgggttaatagtggacattagactacccatgatgctgagttttagtgatgctgaattaggagagagaaggatcaggcatagggtcataccattgtagagtgcaatgccaagttgaaaaaatcatgcaccaaagcatgtaaattcactgatgcttgctgaatatagaaataatttcatagccagccactagaacagatagagacacttctcataaactagccccacattcgcatggacatcaatgctgacgctctaggcttttaagtgttcccaccatcggtgaaggtggcataggaatcttttgtttgagcatcgatcacgttgtgggaggtcttaggagggagtcaaaatccacaagaacgaagaaagtgtggaatcttttggctagctctaggctatcccactccctggtgctgccatctatacctaggttcctataacctcctccttaggtaagttgttctaggtttagagagttggtgaagatgagagatttcaagtcataggactcattattcctaatgagaaaaccagattatatcgatgtcgtcgaccaacatcaatttctcgatggctatttggagatagaaagggcaaaagaaagtcaacatgacagtgctcaagaagacgatggccgagggtggatgatgatatgggtctggcaactagagccgaggccgaggtagccacctccacactgcactcgagcaatgaaaagacatactctaaccagggaaaagttgtacaaaataaatttgacccttagtttatcttacaacatatcattaaccgataaaaaatcaacacctcaaaagacactttgaatccaaatctattagtgcaagatttttttgttcctttgcataaaatttcactatttgttagttaaattttgtaaaatttaactttctcctagtcaatatacgtgttatatttcagaatataaagagtaggattatctctttttgttgtctctttcctccatgtaggcaaaatcatgtgaattttatagaaatttagcatgacctatatacaattttcatatatttttttgctgaaacgcctagtagacgtgtcccttcgtaatctaaaaaagcagacgtgtccattcgcactgtagcatagaagtatagaaccttttttaagacatcaaaagtttttttttttgaaactagacatcaaaagttttaagtatgaagaagaaaatctatatacctctactctaatcagggttagtgctgtagttggtagttttgttctctgtactttctcggcggcagcagctgctgcctgctgcaactattgaactacatgatgctgtacaacaatatgcccatgcagggccgcagtgtcgtcgtagccaatcgagtcaatcgaaagcggcaggtacccactgcataccaatgtctctgcaagtctgtacagtaagtcagtaagtactctctccatttcaaattgtaagtcattctaagaattttatagagtcaaagcatttttacgtttgaccaaaattatagagaaaaatactaagatttataacataaaatgagtatactataaaaatataattaaaaaagaatctaatgatacttagttagtaccataattattattattttataatataaattcggttaaacttagaaaagtttaactctccaagatttttggaatgacttacaatttgaaatgaagggagtacctcgcaagatagtttagcagacagacgaatcagctaaagcctaaaggtgctggaaacaggaaacatagatcagatattcagatgactagtattatacttatatgccaattttttttaattgaatgtctttctcgtaaggttgtagcgtattcttgacgcgctatacctactgcttggtgagtagcagtaggtggccatgcatatttgcctacgcacagaaaaataaggagaggtgcacgcgtatggttagcatgtattccttcgtgttcatgccttggattgttaaaagcaatattgtcgccgagacgaagccgatcgtgtctcgggagtttattggctccaaagccaagaaacaaggcgcgtgttttaactttatatacacactccatacaagcaggctgcagcatcacccttctagagatctgggagaggccttaatttgattgatgacacgtcgtttctccattcaagaaagaatacaattttaccatagtagtattttgattttgatcaattatagataaaaatatataaataaatatcattagtattattttttataataaattgatttgaagctaacatattgttcgttacaaccttggtcaaacatggatcatttttactgacacgtaatccgtagttacctttattttctgaagaaaagttttactgacacgtaatcagtagttacctttattttctgaagaaaaggagtatatatggagcaggagtagtacgtacaactatgggtgtgatttgaaggaggcatcccggatggtgacgaggttgaggtccatgatgttcagtacacaagtatacatgcagatttgtttggtttgtaaatagactggatcgtgatgaagtgagttgttgattggttgggtgtatgaagattttttttatgtggctgcaagtggacccgaacattttacctgtatcacgagggaagctcgatttctgcgtacgcattgcctgcatcaagtcagcctaatgtgtatggtctcgtgcatcgttttcattcagcagaggaaaccaaacacaacgctcgaacgagaccacccagataaaacatgctaggatagggtcttgtctacttccaaaaatttttgcaaaatagaaataatagtattttcgtttgtatttgacaaatattatccaataatggattaactagactcaaaagattcgtctcgtcaatttcgaccaaactgtgcaattagtttttattttcatctatatttaatactccatgcatacgtctaaagattcgatgtgacaggaaatctgaaaacttttacaaaatttttgggaactaaacaaggcctagaatgatccagcctaccaatcagcctatactatactagtacatgacatgaatgccccgtcccatcataccatcggatcatgtttatatataccgtcatttcaacccatacccatgtcatgaaagcgatggaagtggagcagtataatatactgcacgaatacggcactgttggtttagactatctccaacaatcgtcacctaaaatataagatctatttgtcctttggtagcgctacaggtaaaaggttccctacttatttttagtcttctccaacaacaagacctaaaagacaacactctctgcaaatgggtctcgaggagagaggatacccaaatttgggttatgcctctcctgatacccaaaatgggtcttctatatggatactctattggaggctataggtattatgttggagatccattttgaatttgggttcccaaataggtttcctcttagagatagcctaaggcacatgcatgcatgcgccgcgcgacatgttgattaatggtacgagtagtaataagtgttagctagtatttgcagtgcatcacagcgtgtggtacatcatcatgtaatatgacgcgtacagttgacatgatttttgacatatatattattggagttggagtaatagataatgctgcataaactaaggccctgtttagttccccacccaaattttttttatccatcccatcgaatctttggacacatgcatggaacattaaatgtagataaaaaaataaactaattacatagtttagttgaaaattgcgagacgaatcttttaagtctagttacttcatgattagccttaagtgctacagtaacccacatgtgctaacgacaaattaattatgcttaatagatttgtcttgcagtttcctgacgagctatgtaatttgtttttttattagtttctaaaaacccctcccgacatccttccgacacatccgatgtgacatccacaaaatttttatctacaatctaaacagggcctaattaattaatagccccctgtcatgttatctgttatccggtgtagtacaagcagctgcgccggttagatttttttgctcagttcgtaaggtagcatagcaagcagcagcacctgttagattgcccagaagccataactgatgtgcacgatggaccgtttgcagttgcagcgatcgcattgggaaatttcgcaggtttcttccggctagttcgtcggagcagggaagaccggtctgcgcgtacgtttgcgctcgcagcaaggcacccctgcctggtcgtagccgcacaagtgcatgcgcgccggcgcgcgcgcgcttccaagttgtgttttgcatgatgcgtacgtcaacaagtagtgtagagtattgaccgcatgcacgtgtcgacgtgtcaatagaataagaacaccactaaaacgacaagctgcgcgatttaagacgtatatagtactgtgtatattacgatatgaaatgtaacaacgtgacgctgctttcacgttccgttcagaagtagccatctctacgcttgcaggctgtccaagatggaattacaaggtgagacgaaacgattttaaattcagagcaactccaacctacctcctaaacaagtccctattctaaatctagggacttgataaaaaaaaatcaacttcaacccaccttctatttggactcccatttttcatgccctcccaaattatagtttcagcccctcacatctagaaccccctatcctacttgtttaggaggtgggttggagttgagtcttaatttaagctcctactttttttatcatagcatgtaaataaaaatttaagagcttaatttaaggacttgtgctggagttgctcttagagcaactttagtccaagtccctaaattaagcccttaaacttttatttacaggctatgataaaaaaaaagtaggggctcaaattaaaatccaattttaatggaaaaaacagaccaagtccttatctgacatgggacccatctgtcattgacaaatcctacatcaactccaccatttgtaattcttgtcttgatttatggatggggagaggaaagtgggtgggacccactgaataggggagttctagatgttgagaggctgaaactataattgagagggcatggaaaatgagagtccaactaagaggtgggttggagttgatttttttagatcaagtccctagatttaaaataggaacttgtttaggaggtgggctggagttgctcttacagagacatactattatcttatagttagttatatagttagttattggtttgtctcatccactaaatacattatcatgtccatggaggggagcgaattaaattgagaagcagcagggaataaaaacttgcgttgtcaacttgtcgtcgtcacaaagatttagttttgcaaagtgtcttggtcttgggttgtctttacatagttaaaccaggtttgtacaattatgtttcattattcatatttgttgcatgtagttatttccatgttgtaatatgttcttatagaggtcgcatatttcatcaatggagccattgtttcttgttttggctacatgagccactctattggggagctaaatttattcttagaaaaaaaggtttggtaacaactactatttgtagatagaaatgacgaaatacccatagtgctcttatttccatctatttctttcccacggttgacgccttccttgatgccctctcatgctccactagtagagttttaattttggtcccatttttccaaaccgggattgcggggactaaaacttatcctctaaactaaaaaataatttaaattaattcgaatctagagcctcttgcctcggcgtagctttctttcttaccaactcaactatataccacatgcgacaatgtcttgggtgctcttcttttgatttcacccatgggaacctttggtcctgggtaggagacgtttaccaaccgagactaaagggtggttttagtcccaaattaatgttatcaaccgggatgaaaaggtccttgttgcatgtaaaatttagacctgggactaaaagagcctttagtcctgaaccccaacacaatcgagactaaaaggtgcgaaccgaaactcctttctctaacagtgctccgagccctcgtgctcctgtgccctagcgacacagtggttccgcctatctctgcactgtcgcgccatcaccctcctcgtgtcggcctctctgcactagccatatccgtgctaatgcaccataggggcaaatcagactatggtcatgttggaacccactagagcgaaaggtagttggaagaagttggttagctccatagtccatatgtcgctcacctcttgtgagactaggttttcatggctccatttcataagttgttcctttttcaaccatttggcaaaaaaaacagtgtcaaacagctcaaaagctgctagagaagttgtatcaaatgtagccttaggtcctatttggatataaagtatttttggagttttagaaaaatatcatggttttgtgaaatactttagtttcaaagtaccatgaagtgtttggatgcaacaaactttatggtttcgaataccatggtattgttgaaactgtagtctttttggagttaaaatactccactctagaccttttttttccttctaaatcattgttttgcacatcaataattctaaaactacagtttctttatactatatatggttttttaatacttttttttttgcgaaactaaatgtccaaacaaggccttagtatgtccgttgacttacatgactaaatttcacgtactagcatgtaaaagagtttctgtttctgcagcctgcaggcaaccaaatacagtcaactatactgatcaaatctagatataataatacacaaacaaccaatcagatatacttatatcgctattaggcatctcgatacaggcacttgggttaagctgatgcataagcgtgcactccagaattcgccagcatcagatccaaccgccaatcagcatcctagagaattttgtattaacaaaagagtgaatatggatggataaaataacgaaaagctaactcaaattagcgggtggaaaaccgtcggccccccggattcaactcccatataggtcctctggctacttgctgcttcaaatccagctgatctgaggaatgttgacccgaccgtaatctgggacaatcctaaccggcaaagaggggaaaaataaggaaagaatcgaattaacctaatccaaacctgaaaaccagctccaaacgtgacgacagccttggacacgaagataatccgaagagagaccaggcttccacggcgaactcctttttgcgagtccgggacgcaaagctgagaaaacccgtttgtgtgtttttttaagcaaagtgatcttgcaatataatatatgcgtgcataaatctttttcagtataatttttctcatggttatccatagaacagagcaaaaaataaaacaaaacaaaataaaataaaataaaatagaacgtccttgaaattgcagaatggatagaccttatcttatatttttaagtaatatgtatatatattttttagtaagatcttcctgtttttctcaagagtcaaaacataatagatgtttgtgttttgctattggttcagaggcgcaagacttttttccaaggacagaagcgtgcgtaccaaacaaacgacacgaacactgatcgagactaaggccttgtttagttggcgaaaaattttgaattttgcaactatagtattttcgtttttatttagtaattattgtccaatcatagattaactaggttcaaaagattcgtctcgcaaattatagataaattgtacaattaattatttttttatccatatttaatggttcatgtatgtaccgcaagattcaatatgacagaaaatcttaaaaaattttggaaactaaacaaggcctaagacaattcctagtcctcggagcgactcctcatgcctgtttaattgatctaaaaactcaaaactttttaagattctatatcacatcaaatcttaaggtaaatacataaaacattaaatatagatgacaaactaattatatagtttttctataaattgtgaaacaaattttttaaagctagttactttataattgaataatatttatcaaataaaaataaaaatattatagtattaaaatccaaaacctttttggatctaaacaaagcactacatggctacatgaactggaactggaagtctggaattgaccgtgaccgatacccacttggcatggagcgccaatgaatccagctgcgtcctgagggtaaatgacttgaaatgtgtgtttctcgggtggagaggcttccgcaatgcagcagccccagtggtggtgtgctgccctatatcctcatcggcaacttgttggtttgagtcgaatctgatttgataactatttactgatatctttttataataaatccgccaattcaaatattttctggtgggatcccggtagccgtccgtccgatagacacaggctcagcataagatgcacagatagaggcggaggcggaaagccgccggtcgatcgcgtggacttggccttgttcatttcgcgaaaatttttagattttgctattgtagtatttttatttttatttaataattattgttcaatcatagactaactagactttaaaaattcgtctcgtaaattataaataaaccgcataattagttattttttatttatatttcatgcttcattcatgtgctgtaaaattcgatgtgacgaaaaatcttgaaaaattttgagaagtaaacgagtccttagcttagcttatccgtcaacaacctcgcgacccggactgtgtggcgttgcgtggcgtcgcgtacttggcattcgcagccgcgcgcaccttgtgtgatcaccgagtcgggagcgcgacaccgagactgacaccgggagcgcggagcgggaggcacgcagcaacccagcagaacacaaccgcggggcggccgcgcatgcgctgggaagggccggcaaaggcagaacacctgtttaccactcggcaaccttattccggcgggcctgaccacggggcacgacgcaaaataaaaagcgaggcggcgtcgccctcgcccgagctcttgtcgcgcaaagcgacatgatttcgatgccacagcaacagcaagcatgctgcgctgcatatgggagacgacagcgtagggccggcgccctctgggtctgaagtaggaatgaaaacggatcggatacgaacggatatcactgatattatatttgttttcatatttttggtcggattcgaattcgaatacggataatatcaacaatgtcggataagatacgattggatgtcgacatcataaatatacgatttaaatattcggatacggatacggtatcggatattaaacattcgaactcggatacggacagatctcaacccctctaaacgaattcggtcccgaatacggtcggaaaatatccgtaccattttcttccctagtctgaagggaggaagaggaatgattgagcgggatctagagtttttttttttttgacaaagcggga

SEQ ID NO: 4343 - DNA, 3629 bp, Sorghum bicolor
gttttctaactttattagcttattgtagtttaccagagtcttgtattggtcaacttattcccttataatgcatatgaaacaatgaaaattttgatgatagttgcaacgattgtttcagtgtagcatattgattcgcatgagaatatattattgtgtgttccttcaataagctctattataaatgtatgttcctttttctgaccaatttaataagcttctttgctttttttatttctggcttgcaggttacgacacttgtgtctatttggctgcagggtacgaaatactctctcactcctttgtattttaagaaacagttccagtgacactccactaacatttttttccttctaacttgaagcaataagatgagcacaatgaattcgacatctcttccagctcagagcaactctggtccagttccatgcgccaaatacttcaccactttcctccccatgctggcccccgtgatggctgcagttatgctgtgatctatggaaatgctccagctagcctctgcagatgtggagatgaaaggtgaattgcgtaatgctggtaaccagccgatgttctgttttgctatgagcagtagactagtagtagtctagtagagaggcatattatgctgctgtaggaattctctggtcagttgagatgtacatcgtcgcgcagacaatatatatcagctggccttaagaactcgataaccttttctgctgtctttcggttctcttctcttcatcgctgcattttgcattttgcatttttgcattaatctcttttgtatggttctttttctgaactaccatggtaggccttgtttagttcaccccgaaaaccaaaaagttttcaagattcccgtcacatcgaatcttgtagcaaatgcatgaaacattaaatatagacgaaaacaaaaactaattatacagtttagctgtaaatcacgagacgaatcttttgatcctagttagtccatgattggataatatttgtcacaaacaaacaaaagtgctacagtaccgaaaacttttcacttttcggaactaaacaaggcctaggtagcatgtgagaatatatcgctgctagcaagtcttttccgtacattggaccatcaatggattattggatgcgtggatgaaaatgttaaggtgggaagttctttgccaaatccctgtgcagcagctggaccatcatttgattgcagaaaagctccgaagtcagttgtcagagaggtcctggagttcattattatgctctatatgcgtgctctgaattctgatgtctccttttaagctgtattgatgcttcaatgcttctttgctgccaatgatctttgtgaaatcaggcaagctgtagtagagctgtgcacggtaatatcacgagcagcgatgtctcaatgatataagcttcaaggagtattgttgaattgggatcatgagattgttgaatgttggcacttggcggtagtttctaagaaaaaggaagctcatttccccccactcttaatgcatcagaaatcaggtagtagtgagaaaacatgcaaggaggagattaacttttttttgttttttgagcaaaggtgggggattaacaagaagataaacatgggaatatgagaattgggggcgggggggcaggaagcccagcccagcccagcccaggccagcaggagcagcagcttggcgggtgctttcggccagggtggggggcatcgtgcagagaggctggaaagtgaagattctgatggcccgccagccactcgggcagtacgagttgagcgaggtgcagggcccggcgtccagcggagcggtatctcgcacgtcgtccgtccctgtggcgctggcggtggcgcaccaaaggagggggcgaggttgaagggcgagctagcgatgcaacgggtggttgtggttgggcgcggacgccaagccaaagtggtggcgatgcagtcctccgccacgccgcgcgggctctatttataccgcggccgtgccccgggacacctgcgtacgtgagcgctcgctctcctcccccaccagagacaccgagcttccaccgccggtcgtcgccctcctcttgcaggtcgtcgcagcaacaaggccgccggacaggatgtcgtggcagacgtacgtcgacgagcacctcatgtgcgagatcgagggccaccacctcacctccgccgccatcatcggccacgacggcaccgtctgggcccagagcaccgcgttcccgcaggtgagcgcgcccctctctccttgttcgatctcgctcgctcttgcgtcggcccaccgccgatcgatcggatcggtcgcgtacggcggttgacacgcggtttcgtccttctgcgcgcgcatgatgatgatgatgatgatgatgatggctcgccgccgtgatcctccagttcaagcctgaggagatgaccaacatcatgaaggacttcgacgagcccgggttcctggccccgaccggcctcttcctcggccccaccaagtacatggtcatccaaggcgagcccggcgccgtcatccgcgggaagaaggtaccgttccgtccgtccgtcgccggacaccaccgccctctcgatcatatctccgtcgatcgatctcgctcctgatcacaggtatcttccccttttcttgtttggttttccagggatctggaggcataaccgtgaagaagaccggacaggcgctggtgatcggcatctacgacgagcccatgacccccgggcagtgcaacatggtggtcgagaggctcggcgactacctcgtagagcaaggcctgtaaatggatgattgcttcaaccccctgcctgcctgtccatgtttcgagcatccagcagcaacgatacgaccgccagcatttagtagtctctatacgcacgcattttttttagtccccacgctctgggattgtgcgtggctccgttaattacctccgatcctccgcccggcatttctctccccccgtccgtcgccgatcaccagagattttttttttcttgtttttgtttgtaatttgttggtgtcgtttttgcaaataattttgtgatttcacccccaaaatttggttgtcgtatgatttgtaaacccggaacaatatatactatatgtgattgaactgctcctacctattcttttgtaacacgggaatatgtatgtatttcgtgcaatatcttttccagttttcaatgcatatgcaattatatgaaaataagagtcagttttgcgtttctggattttttttaaagttaaacataataacctagaatccaaaatgcaaaatgtcaactactttggagtgatgaaatacaaaatgcctaaatttttaaggtcatatttagtttcatccaaaatgcaaaatttattgctctcatgagagcctcttgaggctctttttggagttttttggcctcttgaggccaaaatccaaaatggagaataaccactattttgtcaaaaatgttatatggtgtttagtttcattttgcaaaatgatggactaaaatctaattcttttttgaaaaaaagtgaactaaacaccccccttaagctttttcctcctctttttttttatagaaaacttcagcttccttcttgtgttttgggtcgactttgttatttcttatccat

SEQ ID NO: 4344 - DNA, 6025 bp, Sorghum bicolor
cataacaaatcagcgttagcagcagctaaaaattagtcagtcaaataggacaaaacgtctttctactctttcatcttctctctttttgtttttctttctatccattaatttgctccttccctttctttattgatataattttagttttctagaaaatttactagggaaactttgctttgtataaaagagatctttttttgggaattacacaaccaagaatgtgtagttatcttccgatctctctgtttcaaattctaaattgttttgatttttttattcatccattttgctatgtatttagatatactaaaaaaagtcaaagtgatttatgatttaaaacggatggattaattggcttagtacttagtatgtcattgggtttaaatttttcttctaacttggtttttacgagtctttagtcagccgaaggctgaatctataatgttggttacaaaaatattacaaagggtggaataaaaatttctttacaaaaagggttgtgcataatttttatgttagataaactgtgcgcaagtgttgcacaaaggtattgaagagtgaaaaatctatgttttataggttgttagttgtatgaaaatgttatgctaacaaattgtttttttaatatcaaattgttgtagtaagtttgtttgcaaaagttatgtgtagaatttgcattgaaaacccatgttgaaatattatgcacaagtttattgcgcttaaaaaaatataatgttggctaattgtattttgctaaagaaaaaaatcttagctcggcatcgggagtgattttgtactatggttcgaaaaagttgaagtttgaccaaagaaatacattttaaagatttaatattgcacccttaaaaaatgggcgcacacacacattctacattaatgagcacctctgaacggttgataattgagccaacatatttaaaattgacaaaattactctagttgtctcactttaatggacaagttatttatcactgaaagaatgacgtcgttacatgttggaacaaatccaaaaaatacaaccacactagtagatgacctgaaccaagatagttagatttcaccacaagaaattcaactagctagctaaggtatggtcacgtcataacttaacaatggtgagtgacacttcagttgaatatgttacctagttgaaatcaatgtaccatcgttttttattaggcgtccgaagtcatgatcatcatggatttcatattggccttaattctcattcatacaccacttaaattgggatgtttttatttctttgttcgtcatatagacatcatttaaaattattttatttttttagcaggaaatcacttagtactaaaaatgggtgatgaaatcacacatttcctaagaaagatacagtgaaacggctcacacaaaataataagcttttgatgctgaaaaggtaaaacccgaaaagaaagggaaagaaaccaaatacaaaatgtggtgcagcatattcattgtcacccctctccaagcatgtagtatgagttcaacccaacgtcacaatactacaataaggaagtgaataggtgcgatcccaactaaaacacaaacaaaatacccagaaaaatgacaaacaagaaaagaatgaagcacgaacacgcaccaaatcgcaaagagaaccttatctgccccccctcaagaaatttcctttcagcgagctaaaaattcccgtcgctcactctgccttcagaagtcgccatcaccacccctgaaacgagaacagcgacgaacacatgcatacggcgggcgtccttccgtcctgcgccggctgcgctctcgcagcgttgggcggtgcgcggcgccacgcgccaggggccacagtagccagcgtaccaaacgcactccgcagctcgtgaaccgtggcgactcctccattccctttctgttctcttcttgcccgtgatcgagctccttttcttccttaaattctcccccacatggccacatcctctccacctcccccaccacctcaccacacctgccactgccacggccaccctccagctgccccgctcgccgcgaagcccgatgggcatgcgacgagcacgattcttggcctgcattgccatggcggccatcgtgctcctcgcgccgccgtcgacgtgcggagtggcggggcactcgcgggggctgcggcctgggcgcagcgccggcgccggtggcgcgggggatccgccgccgctgttcccggtgaacgcgacgcgcgcggagatgatcgagcggcagttcatggagtgggtgcggtacatgggcggcctccggcacagcacgttccagcacgcgctggcccgcgcgttcccctcctactcgctcgtcgtcgacaagaacccggcgttcggcgacttcacgaccatccaggccgccatcgactcgctcccggtcatcaacctcgtccgcgtcgtcatcagggtcaacgccggcacctacacgtacgcacgcccacgctcttgcttgcgcttggccccggtggtgaccgcatcgtaatcgttacccgcctgctgccttgtcgcagggagaaggtgagcatctcggcgatgcgcgcgttcatcaccctggagggcgccggcgcggacagcacgatcgtgcagtggggcgacaccgcggactcgccgacggggcccaagggacggcccctcggcacgttcaactccgcgaccttcgccgtgaacgcgcagtacttcctcgcaaggaacatcacgttcaaggtacgtaacgcaaccggcacccgttccgttgccctacgacgtagcagaagagtagcttgtggtttgctcaattcaactctctctggcattgggcggcggggcagaacacgtcgccggtgccgaagccgggggcgacggggaagcaggcggtggcgctgcgggtgtcggcggacaacgcggcgttcgtggggtgcaagttcctgggcgcgcaggacacgctgtatgaccactcgggtcgccactactacaaggagtgctacatcgaagggtccgtggacttcatcttcggcaacgcgctgtcgctgtacgaggtacgcacgctctcctccacacagagcagaggctccatctccaaaacagagcatgctagtgcgaagcttccaaactatccgtttttgttaggaaaggaagcctctgttccggtgatctgatccgagacttccggcgcgcacccaggggccgtttcgttcatcgtccaggcaacgtcgttgcctagctaggcagcgctcccagtgaccagtggccccgtttttaatcgcccgaggctggaaacaatgactgggcggcgacctgaccccaaacgtgcccgcaaaggctggaagtaccactggagtcacggcctagtttgattagagccttttccgtgcgccttgacacatgggtttgtagtaccttgaagcattcatctccgcatgggacaaatgaataccgagggtttggtatgtactgatgagtgatgactagataagagcgtactacaagccctgagcttctgactagtgcactcccatcttttttaacccaaaaaagcacggggacacacagctacacatttgtggcttccctaacgtggaccggtcgatgtaatcaggtgccaacggcacagcacacacgtccacacgccgaaaacatccatacgcgcaccggggcccctctgacgaaacgcaggtgcgaacccaacacgtgctcgccgagacggtcattatttgggtccatgtgtgcgcgattggccccacaaaaactattatattatatcagactagtatgtagcacaaaagaggcagcagacgcgccatcgtccatcggtcaccaagcacttctcctgcccgcggactcatgctggtgtccgcttgcgattgcgaggttgcgttgcgccgcatgacctggcgacgacgggcccggcggcgctacgctacaggctacacccacgggcggccggcagcacgacagcgacgtgctgcggtatctgatgcccgcatcacgggcacggcgcagatgcgccggccctatcaaactttgccagtgcacaactgcagactgatgatcagcaccgacctagtacgtggctacatacaagtacaatcaatcatgatccatgcgaccatgcatgaatcatactactgcttatatacagtgagctcgaacaataaaagattgacgggtggctgatgctgacatgctgttgttgttgttgcaggactgccacgtgcacgcgatcgcgcgggactacggggcgctgacggcgcagaaccggcagagcatgctggaggacacggggttctccttcgtcaactgccgggtgacggggtccggcgcgctctacctgggccgcgcctggggcaccttctcccgcgtcgtcttcgcctacacctacatggacaacatcatcatccccaacgggtggtacaactggggcgaccccaaccgcgagctgtacgtccctccccatcctcgcctctcgctctccttccatcctctgctcgcgagatcgccgcagaaacatctcacgcatgctattgcatggttgcgccattgccatccccaggcgtgcacgacgacggtagtgctcgagggccacgccatgcgcgctacgactacgaggccttttgagttttgccagtctcatgtaacggactccatgccctttttctgcttttgtggtatggaaagcaaaagaagagctcagctagtcagctactacctacgttgcacgtacatagacgagctagctgctgtcgactgtaggttcgtggtgatcgataaaaggcgtgcacagcgcagacgaaagggagcactcaccggctccattccatttcctgttccggcgaatcatccgttcgcacgggtggccggccgccctcctcatctcgttgtgatcgtggaggcttttcagattcgattcccgctgccccgccggcacgggcgcacggccaaaagcacagtcctatcctagccggcttggcctgtcaggatcctagatgccaaaggctaccaaaacttttatgtatctgctaaaaagaaataaactttttttctggaattcgactcgagccggccataagctcatgaccattttctacgtacggcagagtttggaaccgaaatattaaagcttgtttagttgcacccaaaaacctaaaatttttcaagattttcccgtcacatcgaatcttttgacgcatgcatggagtattaaatatagacgaaaataaaaaataattacacagtttggtcgaaattgatgagacgaatcttttgagcctagttagtccatagttgaacaataattatcataaacaaacgaaagtgctacggtgtcacggaaaacaacgcctaatgctcgcgtgttgctgcaggacggtgttctacgggcagtacaagtgcacgggccccggcgcgagctacgccggccgggtggcgtggtcgcacgagctcactgacgacgaggccaagcccttcatctcgctgagcttcatcgacggcaccgagtggatcaggctgtaaatgtaaatctcgcagtcgccgctcacggtcggtcacggcagcacgccacaccacattgtaaagaacacagagcaagacaatatagtacagatttacttcccgtcatcaaatatggatgcagcgtctcgatggaatgagctttgccgtgcgtactgaccgagtacgaatgctctgccatttgttcaccgaaagatagacgtcaacgtctgcatgtgccaggtccgtgcggattcggcgagaacagagaaagtttctgtgcctaaccaatgtgtctccactatctaatcatcgtcatcttccagcagcacatgttgctggtggcaatttcatcataaatataccatccaactatttcttcggtactaattctattattttaaaaacatttgtacttaggatatgctccaccgtcctgaagtttcctcaaaatatgtaaaataaataaaaaaaatacatggaaggatcaacaatggctagaaagaggcaaataggcaaaactt

SEQ ID NO: 4345 - DNA, 6827 bp, Sorghum bicolor
cctaggggccagatccggcaacgcggtggctagatccggtggccctgcgggtcctgctggcctgtgcgttcggatcagggcagccttgggggcacagcagcaatgctgttcggcagtggtggatctaggcccgcctgtgcagaggtacggcagctacagctgcttcggctccacccatcgtcctccctgtgcgcgttggatggtctaaagcgaggcggagcgggccgtggtgctacacgcacggaggcagatgggcacgcgctcgaggatgctgcggtcacggaggccgagagaggctgggtggtgctgttgcttgtgcggcagcggcctgacttgcaggcggaggtggtgcagctctgctaggggctgcgctacagggttaccttgtttcatgctgaagcatcctgtggtggcccgtgttggtttggttgacgacggttcgacgaccggcactgcatcagtctttggtgcggcaacgacaactggtctacgacgactcacctcgatcttggcctcgacggctgacctcgcttagcgatggtctgtgtcggcaaggtcatggcggctcttttacttggtgaggtactttggttacgttggtggcaataatgcataactaacgctttctgtggagttcatcggaagggttcggttgcggcactcgtacaagcggatagtggagcaacatgcttcctccaagggttgatcttcgggggttggtatctactggttggctgcggtctatcgaccgacgcggttgcaattggccacatatgcctgtggctggctcgtcgtcgctgcgacaaccagcgggtggcggctcgctaaagggggcagctttgtgtggggatgttcgtggtttctatagaagcttgcgggggcgtcgatgtgcaatggtgttggcggtgctctttgctcactgcaggaacaagatgtggctactcacagtttttttaaggcaagtggctactcacagttgctggtaccatgtaggagggaggcggctctagcgggctggcgtggtggtggcaggtcaagcatgcctttgaccttgttgttgacacaacgatctcctactggtggcggttagttgtggtcgtccacgatgtgactggtttgggcttgggtgttgggggtttttgggcgaaagccatgcaaggctcttggctttggccgacaatggtgatgcctttagtagcacattcctcgttagaggcattgtcgtgagacccctcttaccctataggagtttggttgaaaaccccgggttctcctttcgtcattgttggcatctacggatatcgttaccctccttagaggcattgctgtagaaatctactcctactagtttacgatagctgttgtttctgaggatcgtggtttttgtgtttcttgcagtggtagtttgttgttgctccttcgtgaggttgtatttttttaattgcttcttctctattaatatatgctcggcatactcctgttggggtttttcgacaaaactgaggccttgtatagatccaaaattttttggtattttgacgctgtagcatttttgtttttatttgacaaacattgtccaatcatggggtaactaggcttaaaattttcatattgtgatttacaagcaaactgtgcaattagtttttgttttcatctatatttaatgttctatgcatgtgccgcaagattcgatgtgatggaaaatcttgaaaagttttgggtttttggctaaactaaacaaaatgtttgtgggaaccataataacaagaaaaaacaaacaaacagaacagcccagcccatctgatccaacggttctgaagccgcattattaccaatgggtactagttgggctgtacaactccgtgccagaacagcccagcccatctgatccattaatataacggctatccccgaacccgaacggctcccatcccatctgatccgaacgcctcctccaaattcaaatccccctcttccccaagtgctgccgttcacaccccatggcggccagctccctctcgtccccggcggccagccgaacgccgaacctgaaatcagcgccggcgccgtcaccatccccatccacccgccggatggcagcagatgcggcgtcggcggcggctgcggtggccgcggcggactcgaaggcacggttcgaggcttacaaccggctgcaggcagcggcggtggcgttcggcgagaagctccccatcccagagatagtggcgataggaggccagtctgatgggaagagctctctcctcgaggcgctccttggctttcgcttcaacgtccgcgaggtcgagatgggcacccgccgtcctctcgttctccagatggtccacgaccccaccgccctcgagcccagatgccgattccaggtgcgtgtgctccgattcctctcctaggttttctcccgttgcttctcccagatcgagtctagtaatgaatgaatgtgaactcgacgagcggttgcttgacgtggtttgttgtgcggcgcgttgcaggaggaggactccgaggaatacgggagcccgatggtaatggctacggccatcgccgacctcatcaagcagcggactgaatcacacctccggaagatccaggccgctgtctcatccaagcccatcgttatgagggctgagtacgcccactgccccaacctcacaatcatcgacaccccaggtttcgtgcttaaggtacagtacagaggtgaacttggggcttcttagttctcagacgtcagagatggtgttggtcagctgtccgactgatgctattgtttgcttgctgcaggctaagagaggcgagccagagagcacaccggatgagatacggtcgatggtgaagtccctcgcgacccctccccaccgcctcgttctgttcctccagcaaagcagcgtcgagtggtgctcgtcgatctggctcgacacgcttaaagagattgatcctactttcaggcgcaccatgatagtcatctccaagtttgacaaccgcctcaaggtatgcccgtagaacaatgagcagttggtacttgagcttgacttgtcttcagtgcgaacaagttgtgtcactgtgtctgtgtcttatgaaaatgtcatttgctcttggtcatttgaaggaattcacggagaggtgggaggtcgataccttcttgagtgcaagtggctaccttggggataatatccacccgttcttcgtggctcttccaaaggaccgtggaacaatttccaatgaggagttccggaggcagatctgtcaggttgatattgatgtgctacgtcacttgcgagataatgtaaaagggggtttcaatgaagagaaatatggatcgtacattgggttcagctgcctcaggaagtacctcgagtctgaacttcagaagaggtacaaagaagcaactccagctacactggcattgttagagcagaggtgcactgatgtctcaatggacctaacaagactagattccaaactacaagcaacgtctgatgtctctcagctccggagatcggcaatgcttcatgcagcttctatttgcacacacttggtattacaaacacaatgcaacgtattaacattctcgtttatgttgctgacacttggacttgaactgattgcgtttccttttcgtatcaaagcatgcattacttgatggagctgctgatccagctccagaaatatgggggaaaactactgaggaggaacagatgcatagtggtattggcagctggcctggcattaatatgcctgtaaaacctgccaactccagccttaagttgtatggcggtgcagcttttgagagagtaatgcatgaatttcgctgtgcaacatattcaatggaatgcccacaagtgtcaagggagaaggtactctttagcctggaaccatatatgcactttttttttgggagaattacttatatatactaatgtcactaggttgcgaacatactacttgcccatgctggaagaggtggaagcagtaggttgactgaggcagcagctgagatagctcgggcggctgcaagatcatggcttgctcctcttattgatactgcatgtgaccggcttgcatttgtcctacaaagtctatttgatctcgctatggagcgcaaccgcaataaggacgcacaatgtaagagcttgacctttctcttgatgctggttcatcttgctttctacatttccctgggtatcatttggttcatagtgaagtaaattatcactgtttagttagtatgtagcttatattttgttcaacatgttcgtcaaaaggtaggtatggattgcatttttctctaccacatatttagtcatctgcattccccaacttcagattattcacacttttgctatgactattgatcaattttccataaccgcatgggtattgtttccctgcattttgatttaagatggatcaattgccgtgttactgttttcatgctttaagccaccatgtcctggcagtttttacattgtcagcactaagtggtattattactttgtactttcaccatttctttttggagggagggggggttaacaaatcaacaaaatgttgaaaatataagccaccatgtcctgtcattttttacattgtcagtgccaagtggtattgttactttgtgctttcaccatttgctaaatgtttttttggggggtaacagatcatcaaaatgttgaagatatggatagttatgttggctttcttgctgctctccggtgctcatattataagtttgtcaaagaattgtccaagcaatgcaagcagatagtgcgtcatcaccttgattcagttacgagcccctactcccatatttgctatgacaacgactttttgagtggtgttggatctgtagcaaactccatgagtaggtttaatcactttactggagttacatcctttgatctagcggacagtggatcagctttagaggaagctcaggagaacttgcctccaagagatcagcagcatatgacaccacctaataaagggaatgagtcaaaggaggttctcagagaaagccaactaacagtacctgagacgccttctcctgatcttccatctgatgtacatggtggtaagaagaaagataatgggatcccaaatgacggtggcccaaggaaaagacaagcaaggatggcagcatatacaaacagaaatcaccataacagtatgattgctgctgatgacatgggctcgaagtcagggtcatcatactccaccatatgcgcaatatctgctcaatattttgccaaaatgcgagaagtcctgattgaaagaaatgttccctctgcattgaactctggattcttaacaccatggtatgctcaaactgatatttatgccatgttgttactctttctgctttgttcagttagggcctgtttagttccccatttgagccaaaaaaaaattgtgttttggcccaccattttgcagaatggaactacacacccatccaattttttggcaaaatggttaccattttgcattctggattttggcctcaagaggccaaaaaaactcaaaagagccttcactacccccacctaactctgaaaattttggcattttggatggaactaaacataaccctaaaaattttggcattttatatttcatcattccaaagtagttggcatgttgcattttacattcaatgaggaactaaacagggcctagtgagtttactacgacatacatattgaagttgatgctttcagctacttgaccacatctacctatactaatttccagatcaccagtcactgaactcacaactgattttgtcaactggctgatcgcatgatcatattcaccatgagtaaccagtaacactacggaaccaattgacagcatatgaatcaaacacaatcccaaatagaaattttcagtctactgatgtacatgaagttgcattttaactatttttggcactaaatagtttgatttgcaagattagatttggactgcctgaatcattttttggtatagcagctagcacatctagtaggtctgtagtgtgttcaaaatcagattgttagcaggttgtagccatttttaacatacacatgcctgcccagtatgtttgaagttatttctgacgtgcttcttccactggtgaaatgcagccgtgaaaggttatttctggcacttggctttgagctattcgctgtgagtgatgacaagttcatggacatgtttgtcgcccctggggcagttgatgctatccagaatgagcgccaatctcttctcaaacgtcagaagattttgctgtcctgtttgaacgagtttaagaacatatcccgggctctgtagtagtgatatttccggagcatctcctcaggcctgcattcttgagcttagtgaatcccctcagacgtacattaagggtgcaagcccaatcttctttatccccattctcatgtactgtacctttcttggcataacctattttgttgatgtctgtaccactctctgtcaagttccttgttgacatgttctgtatcactcacatttgttcagattcattacttgatattattgattatgctcgacaactcttgaatacaaaactattgacttagagttctgatctcatcagtttgggcacaggcgctgccaaactttatatacaaatatctaaagtgtgtctttttcaacagtggtgtatacattcagcctgagcatatgttgtgtgtgttagtcttgtttctttattacttgggaggttaattgtgtgtgtgcaccactaaaaaccaatttaacatgtgctggtatctgaggtaaacaggcaaggccaagtgtgttttgattca

SEQ ID NO: 4346 - DNA, 3259 bp, Sorghum bicolor
acacctttgcagggcagcttccctgaaatagcaacacagttcaaagatcaactgcgttcacctttcttcatggtctgatgtgttagactatttggggcacaagaaatgatctcattttcagagggatccagcacaatttgggagcttgccaaggcaactttataaaggaactcaggctgttgcagcatagagtcaagccaagccttttgaatcagtttgactcatggatacaaaatctggtctagctcaccggcttgaagttatttattttgtttctttttttgtgtcctgattttgttctccctttgtaacccctctgtatttgcctgcactttttgcttgttcttaataacttgcctgtagggacttcggtccctccccagatttctcaaaaaaaaaaaaaaaaaccaaatgcaaactcctcaagatcttagttcacggtttaatttattgaaccatcaggtgaaccaaattctaataagataagttttgttcctaatcaaattacaaccacatcaacaattcaatgatgaaaatattttttttattagagatagagaagagaagggttctagagtttcaaaaggccatgatgttatcttttattaatgttttttatatttactatattttattattcaccttatttttctatttccacatttatgtgaaatatggagaaaagcaaaagaaaaaagaaaaaaatctcaacggtggagaatctacggacggtgatatgggcgctcaggcggaaagaaaaggagaaatctggaggatagactcgccaaaataaaaagaaatcagaataggcactcatcatagggaaaagaagaggaatcagaaggggtgggcgatgtaaaaaaaatgttttagaagagaaagatactagggtactttgaaaagtaaaaaaaaggatgaaatagattttttcgctctttaatattgggtatatagatatcaattaggtatacagattaatgatgtataatagcaataatatattggcctctgcgagatatgtacaacaataaagcatcttactctctgtttcaatttatagataatgtattttgactttttttaaggtcaatgggttccccacctgaaattatatatattggcccgaaaccggtccttagatatagttagaatgtatcttgttctttacatcagatgataatacattttgactttttagatacataacttttattgttcatcttgacatatcatacatttagatgtatagcaaaaactattacctaaaaaagccaaaacaatctataatttgagagatgtgcgtcctcaaattggtctcgcattcttttccttaaggaccctaacagaggtcggatatatacacactaatgcatattgacttttgcttgaactgaagatagaacgcgaaattctggctgccgtcccgctcaccacttcagtgttagtttctcttgacagatgttttgcatgttgagtcgcttgaaacatgatcctgcagtgacatatggcattttcttagcaaagaaacgacacagttcaacaacaaagcagagcattaacatgtatacatagtgtttttcttttataataaattagaaaacagctgtcacgggttttcagaggttgaagtggagatatatatagagagatagtatacaaacgagactgtcttcctaggtgccccggccgggtctgcaggtgccggctgccaaaggcgtgcgtgacatcgatcatcgaagacccaaggaagaagatggatatctcgatcgacccccaggccgcaaagcggtgcgctctcgctggttcgtgcagactgcagagtcatggccatgcatctctccggggcctccacatgtgcccgccgaggtcagcaaccgtatcatcactcgccgcgcgccgtgcgcctatataaaccaccagtaccccctttgcatccgtacatatcatttctcggtcggcgcacctcctctggacgtagccggcccacggaggcgatcgatatgggggcttctcaggtgtgggcgtcggtgccggcctggctcgtgatcgtcgtcggtttggcggccgtggtttcctcgtcggaggctcacgtcttctacgccggtggccacgacggctgggtcctcagccccaccgagagctacaaccactgggccgggcgcaaccggttccaggtgaacgacaccatcggtaactgcgccgtctctcctctcgctccctcatcttgccctcacgaatgccgcacaccccgatgaattggttgagctcgaataatcatcatgcgcatggcgtacgtacgtgcgtcttcctcctggatcgcagtgttcacgcacgagaagggcgtcgacgactcggtgctgctggtgacggagcaggacttcgacacgtgcaacacgcgcaacccggtccggcggctccaagccgccgccgtcggcagcagcagcggcagttcggtgctcaggctcgaccggtccggcccgttcttcttcatcagcagcgacgaggaccggtgccagaagggccagaagctgtacataatcgtgatggcggttcgccggccgacgacgacgactccggcaccggccgtagcgccggcacccgactcggcgttcccgccggcgccgtcaccggtgtgggcctcggcgcccgagaacgcgcatgctccaccgccgacggcgggtgcgtcgcgtctcgtcgacggagcgatcatcggctctgtggttggggttattggggctttggtgctctgtgccgtgtagtagtcagaaaccaagagggagttgcatgcgcctgtgtcgtttttgccggctctgaacagttgtgcgagagactacggtcaaagttagttacagctatgcttagatccggaagcagacagaataaaatatattccctctagtcgtgaaaggatgacgacgtttaggacggccaaattaccctgtatattgtataggctagttaagccgtcttaattaaacatcatgatatttcacacaaaaaaaacatcatgataacacatgactactggagcttacagtagaatgcaaagagtatttatttggaaacaaatggtaaacgtgctagaacctagagaaataggaggatattcggaggggttacgaggctagtctcaatagcggtttcataaaaattttatacacattaaaatgttaatataacactatattaataaagacaccttcacaaatagtgcttttaaccatgtaagagatgggtttgagaaggcagacatgaggtt

SEQ ID NO: 4347 - DNA, 8405 bp, Sorghum bicolor
tcaagtcattaacctttaatttgtgcacccttaacattcgattaatcgagcttagctctgctagcagcacgcattgcgagctgcaaaaaatatattactgtctccatccaaattataagttattctaatttattttttgagagtaaaaaacaacttaagtttgatcatagttaccaaaaaataacaaaaaatatgatatcaaatagatatattaaacatataattaatgaagaataaaaaatctagtcatgcttatttagtattctaaatgttttttattttacaaatttagttaaactcgaaatgctaagaaagctagaataacttgtattttagaacggaacaagcactaacaaactttttccaacatatgattagtgagtaaggtattgttcagtttacaaaaatttttgaatttcgacactgtagcactttcgttttttatttgataaacattgtccaatcatagagtaactagtcttaaaagtttcgtctcgcgatttacagatgaattgtgcaataagtttttattttcatatatatttaatacaccatgcatgtgccgcaagattcgatgtgacgaggaatcttaaaaatttttaaaactaaacaaggcctaatacatatgatcttcttatgctaagaagagcagagccgattatataacactaacataccactttagtgtactatatttttgacgtgtcgttgtaatttttactatttctcaatctaatataaagatgtgtaaatgttttacgaattcgagaagacccactttccccaacgccagaactccaattttcaggccttgtttagttcaccccaaaaagcaaaaagttttcaagattctccgtcacatcgaatcttgtggcacatgcatgaagcattaaatatagacgaaagcaaaaactaattacacagtttagctggaaatcgcgagatgaatcttttgatcctagttaattcataattggataatatttgtcacaaacaaacgaaagtgctacagtaccgaaatccgaaatcttttcggaacaggccttgtttagttcccagaaaattttgcaaaatttttcagattctccatcacatcgaatctttagacacatgcatgaagtattaaatatagacgaaaataaaaactaattgcacagtttggtcggaattgacgagacgaatcttttgagcttagttagtccatgattagataatatttgtcaaatacaaacgaaaatgctacagtgtagattttgcaaaaatttttgaaactaaacaagacctaaacaaggcctcagagttccacggcatcgcaacttcccccagagtacaatgacgacgcgtgaaaaacaaccggtcccaatctcaggagcagagtatttttcgatagaaagctcgcctagcctcgcgtcgcgtcccgcccgtcggtcgccgtcacgagctcggaaacgggctgtcgaaataacgacgccccagcgccggcagcgcgagcgagatctccccctctttccgcagcggcggagcccacccccaccgcatcagcggaacctaccaactaccccgtgccccgaccccccatccgctcgtcttccaggttacgccccgcgcggccgcgccgtcggtcgtcttcgcttcgaaaccccgcaaaaccccgcgggaaaaaaaccacctgctgcacgcacgcacgcacccgcacggccgcacctctccctcccgcatggcgcctcccctcacccaaccctttgcttccattgtttccatccacccgccgatgcgacgccgacgccgcaactccacccaccgcctgccagcgccacctcaccgcaccgcctgcatcacaccgcgagcgaccatgggctgccgctatatcaccacgcctccaacctccggcacgcttagcttctctctcccccattctctcaccccgaaccccccaactagcacacgcggatccccgaggccgcgcgtcggggtgaggaggcggaagaggaggagccatcatggagtcggcggcggcccaggcctgcgccgcgtgcggggacgacgcgcgcgccgcctgccgcgcgtgcagctacgcgctctgtagggcgtgcctcgacgaggacgccgccgagggccgcaccacatgcgcgcgctgcggcggggactacgccgcgatcgactcaggtgcgtcgcgcgttttggaatcgtttttgtttggtcggttttcgggaggcaatgctaatgtgactgatctctgttccagcacacggcaacgagggaaccgaggcagaggaggtggagaacaaccacgccgctggtggcctgcgtgagagggtcaccatgggcagccacctcactgatcgccaggtgttttttcccctctctgcttgttcggttctgtgtaacactaacactgcaattgatatcgcttgaaaacttttctacattgtgggattaaactgacttttgctggaacaggatgaagtaagccatgccaggaccatgagcagcttgtcgggaattggtagtggtaaggatacttgcttcatagtctacgtcctttttcctttacttcttatgatgtaggggtagtgaaatttcaacccttactatgaatttgcagaattgaatgatgaatctggcaagcccatctggaagaacagggtggagagttggaaggaaaagaagaatgagaagaaagcttcggccaaaaaggctgcagtaaaagcacaggctccacctgtcgaagaacagatcatggatgaaaaggagtaaggatcaagcatccacttatagatctttttctctgagtcgtggaggatctatccttctctgcatagagtgatattataaatgaactgtgaatgctaaatgatacttgattagatgaaactgagaatgcctttagctcatcttgttctaatataatcggcaacgttgaggttatctcgcttacgtcaaagttagttttatcttactagatcctggaacttgtgtgatgaaattgaacttgatgtgtcgtgtagttactgttcttaggatattaaagtatggactaaaatatactagagtagaaattagtgaaccaaagcactcaactaattctggatatcgacatacatatttatgtttcatatctcattatcaggcctcatttttgacctaactcatcacctcaatcagatactaagcctggtgtattgataattctctgtttagtaccactatcatttcccaagatctggttttatgttcaatctagcacaagtgaactctatcctagcctatttcgcaatattttcaactctgcatctaatctctgataagatgcctgaaaggtctcaatttcatcatttattggttcatatataggtctgatttttagtgtggatctcaaattagaagcctttgtgataaatttcactaaaatgtgacatttctatctctgtacatgttgtaacaacaaactattttgcagcttgacagatgcatatgagccactctctcgggtcatcccaatatcaaagaacaagctcacaccttacagagcagtcatcattatgcggttaatagttctcggtctcttctttcactaccgtatcaccaatcctgttaacagtgcctttggtctctggatgacctcagtaatatgtgagatctggtttggtttctcctggatcttggatcaattccccaagtggtatcctatcaatcgagagacttacgttgataggctgactgcaaggtatgtttgctagagcttactaacacatatgattatatatatgcatgagcaatcatcagtatttgatatgccttgtctcatgtttattacagatacggagatagtgaagagtctggattagcacctgtagatttctttgtcagtacagtggatccattaaaagagcctccactaatcactgcaaacactgtgctgtctattcttgctgtggactatcctgtcgagaagatctcatgctacgtatctgatgatggttctgctatgctcacatttgaatcgcttgcagagactgcagaatttgctagaaaatgggtgccattttgcaagaagtacaccattgagccacgagctcctgagttctacttctcgcagaaaattgactacttgaaggacaagatacacccgtcttttgtcaaggagcgtagggctatgaaggtagatcttggttgcacaattgaacaacattcattacttttactgcatatgccttttgtttttatacaaacaatgttatgtacttctgtttacacagagggactatgaagagtacaaggtgaggataaatgctttggtagccaaggctcagaagacacctgaggaaggctggatcatgcaagacggtacaccatggcctgggaacaatcctcgtgaccaccctggcatgatccaggtagtttcccttttactagtgaaatatcagcatgtgagatttgtggtcatactgggaaattttttaacagctattgcatggtgttactttacttctagtatagaactgagtcactgattactgaattttataatatgagtagctgttttttaaggatataatcaagttctaaatatttcttgcaacttggtcaatgctgaacatgcatgccttccctcacgaaataaataaataaacgataataacagcaacatcctagtcagatgttgttccacttgaacttgcaaatatattctttatgctatggtgttagttcaatggatcattatttgtatgctacttctgtctcattgtgcagggtacatttatactaatactcaaaacactctgattgaaatttaacttatagatccactgcaaattacagttcagagttgaagttatggttctgtggaactaacattcactgctacagtgttcttattttctagaggaactctactaagatgccccattttcctgactttactatgatgtgtgtcgatcctttctagagtgtcaatagccttttgtgtgaagcttactcttaccaattaccataccccttgcttttggcgacaggttttccttggtgagactggtgcacgggacttcgatggaaatgaacttcctcggttagtgtatgtgtcaagagagaaaagacctggttaccaacaccacaagaaggcaggggctatgaatgctctggtatgacattcttcagtgctgattgcagtatagttcattctgtgtcaagattgatggaacatgagctgaataagaaactttctattttggcaggtccgagtgtccgctgttctgacaaatgctccttacattcttaatcttgactgtgatcactatgttaacaacagcaaagccgtccgtgaagcaatgtgtttcatgatggaccctactgttggcagagatgtctgctatgtacaattcccccagaggttcgatggcattgatcgcagtgatcgatatgccaataggaacgttgtgttctttgatgtaagtgcttagctggtgaaattgtgttgcatcttaattatcttcacacaacttatatgtccattcttacatttattaggttaatatgaaaggacttgatggcatccaaggcccagtttatgtcggaactggttgttgtttctataggcaggcactttatggttatggacctccatctctgcccgcacttccgaagtcttcactttgttcgtggtgttgctgctgctgtcccaagaaaaaggttgaaagaagtgagagggaaatcaacagagactctcggcgagaagaccttgagtctgccatttttaaccttcgcgaaattgacagtaagtgcgcaaatctggtctgtcagaagttctaacctgaaagaaaaacagcatgttcattacacaatggttgtttttgcagactatgatgagtatgagaggtccatgctgatatctcagatgagcttcgagaaatcttttgggcagtcctcagtctttattgagtctactcttatggagaatgggggcgtccctgaatctgtaaacccagctaccctaattaaagaagccattcatgtcattagctgcggatatgaagagaaaactgaatggggaaaagaggtgtgcattcttgtcttttgttatctacctataacgtcagatacatgccttgatgataccagatccttttgccctgttcgtgaggccttactttttttaaaaaaaatatttttaaatttctttcagattggctggatctatggttcagttacagaggatattctgactgggtttaagatgcactgccgtggctggagatccatctactgcatgccggtgagacctgcattcaagggatcagcccctatcaatctttccgatcgtcttcaccaggttctccggtgggctcttggttctgtcgagatcttcctcagtcggcactgccctctgtggtacggttacggtggcggtcgtctgaaatggctccagaggctgtcctacatcaacaccatcgtgtacccgttcacttctcttcctctcgttgcctactgttgcctgcctgccatttgcctgctcacaggaaagttcattattcctacggtaagttagctctcggcacgtacacctggcaccgtaattcatatatggccacaatgttcatttgcggttcttcttttcagctgtccaacgctgcgaccatatggtttcttggcctcttcatgtccatcatcttgacgagcgtgttggagctgcggtggagtggcatcgggattgaggactggtggcgcaacgagcagttctgggtcatcggaggcgtgtccgcccacctgttcgccgtgttccagggtattctcaagatgattgccgggctggacaccaacttcacggtcaccgcaaaggccacggacgacgccgagttcggggagctgtacgtgttcaagtggacgacggtgctgatcccgcccaccagcatcctggtgctcaacatggtgggcgtggtggctggcttctcggccgcgctcaacagcggctacgagtcctggggccctctctttggcaaggtgttcttcgccatgtgggtgatcatgcacctgtacccgttcctcaagggtctcatgggccgacagaaccgcacgcccaccatcgtggtgctctggtccgtcctcctcgcctccgtcttctccctcctctgggtcaagatcgacccattcgtcggaggaaccgagaccgtcaactccaacaactgcaacacagtcatctgctgattcaccatcggtaagctggtgccgtgccgcggccgatgtgtttctggtgcggatttcctctgtccatctcgcatctgggcttttgccccaggatctgggaggggtggtgtagattagttctattttgcatccaagtgttgattggtgtcgtctgtattatgaaaagttttggtgctgaagtgttaaactcgcctcaattgtgaaaaaggcactgtttaagtgtgtgtaaatcataggaacgtgggggaaaaaaggaactgagatacacttgcctaccaaaaggcgagatcatttacatcagtggagcttgaaattgcagttgtgttaagcatgaccgcacgagtgatgattatgggtacgcaaacgcaactgaattttatgcactggcctgctgtggaaaggagatgacatttcctcatgaagaccatgattaacgtacattgtacactaaacaagacgtgcgctcagtctttagaaatcctccagggtaccaagtgctcaagcccccaagctgtctgtcatcatccagtagcacgaactttttccacaccaaggccttgtttagatacgaaaactttttggatttcgctactgtagcacttttgtttgtttgtggtaaatattctccaatcatagactaattagggttaaaagattcatctcgcgatttacaagcaaactgtgtaattagttttattttcgtcatctatatttaatgcttcatgcatgagccacaagattcgatgtgacggagaatcttgaaaactttttgatttttttgggtgaacttaaacaaggcccaagctttcggagccctggctacattttcagcgccacaaccacaaggatcagatctatacgctattttctgcattctttttgacgaaagcaggcaacagtgatgacggctaatgcgggcacgcttccttcccttagcagcaccaacatcaaaccactaccacctaattgtcacgaaccgcatttgagacaagagcatacagggacagattaatctacctgtcaaaaaagtggtgcgtgccatgagactgtgaatgatgcctagcggactgcagtggtgtgatggctcctatattaaaagccaaaatcacaagtatacttgaggctcctagcgaaataagcatgtgtacgtatgtgtggttcacttgtgggcagatttattagcaggattcatctaattgctg

SEQ ID NO: 4348 - DNA, 4913 bp, Sorghum bicolor
tttcacaatcattttcgccaaaggagttaagttagcactttactagatcctaatgcatatgctcaagatgtagacctagtagcacttgattcgagagatgaccgtgatttctcctcttgatagtcgtctatctatcctaaacctggtcaatcacttctctactcatcttagaccggcaaaagtaaaaccctatgtttatacctttgccttgataactttgctcctcgtctatcaacatgatctccacttcatgcttcgtctctttgtaatcatgtggccacctttccatgccaccatgcaccttcatcacatgtgttgctatgtctaactcaaatcacttaaacacaaggcattagcaacttggtgtcattaattaccaaaaccaaacttgggctttcaactctccatgcatgggtcttcaagtttttgtgagaaagaaggcactacaaactatgggatttgtcttatgttggtgggtattcgatgaacatgtgttctaaatcttcagtttatcttgtgcttgtaagtttttaccaacatataacaacaatccaaacaactactataggtaggttttgccaaatttttgtggcggagcaatcctttgcagccacactgatttttggcacattaattaccaaacactctatttttactatagaacgtgggtagccatacttgactttagagatattccaagaatctctctatatttttcataattggtaagaatactctccaggatttttttttctaattaggtcctcaattatagtcgtcctatattccctatttctcacttgccaaagatagagagcggggctagctctctagagtgcgcataagatatagataagttattggagaataaaaagatatatatatagatatttttattcaaatagttctccaaataattattttaagagtgaatttaagaaagactcctgaaaatgcacttagaacaactctaagatcctttttcatatctttcttaattgatagaaatagatattaaggtgaaaaagtctcctctaataatttatttaactagatctccaaatatagcaattctctattctagatttctagctagttaaagatgaagagcaagatcggtttcctagagtacagacaaaatatagagaaatcataggagagttgaaatatatagtaaatgataattttgagagcgagtttaagaaaaaaaatcttagagatggtattaagcatggaaaatagtaattgacaaccaagcggtcattaataataactatatgataaccctagcgttggtactgtttttcaataaacaagaaaaaatctcaaggaagaaaaatggtaatcaacaaccaaacaactttttaataagtacttcctctattctaaattataagatattttggcttttttaagtacattattttatttaagtgcataacagaggtcatatattttaaaaagtcaaaacatcttataattcggaatgaggagagtatatataacaaatctagctcagtgctactcccttcttccaaattgtaagatgttttggatttatagaaatatggaaacgtcttatatttagaatttatatttagaatggagggaaaaaaagaaaaattcttaaaccaccgccggaaattgacaacggaaagggagaagggcaccttcccacaaggaaggcatactcattggcaacacgcttaagccacaccaacctctgaccctgccgtaatgaaaccccccagttgcggctcccccttccaaacatgaccgttggggcgctgtgccgctgtccccttcctgagatcccaaataccccaccgccgcgctctcccaactggcacccgagaatcctcgcgctcgcgcactcgacattcctcgcccccgcgccgcttcgaccgttgccgaaccccctgcgcgcacgcgctctccatctcgcgatccccagcctgcgccgcgagcacgggccctggttggggcttgggcgggggcgtatggcctgcgccgcggcgatgccgatcgacttgcccccggctccagctctggcggcggaggagatgagggcggttgaggaggacgaggaggtggtggtggaggtggagggtggagggtgcggcggaggcgccgtggtggtggccgcggcggacgcggaggcggagggtcacccctacgacttccacgtctccgggccgcgcaacctgccgccgcccaactggaaggagataatcagatcgagctggtaagcgatgcgcgcttcccgtgtctttgaaatcatgtgcttttttttttcgattcctgaatgacgatgggatggccggatccggatggtgggttatttggatatatgtggtttcgttcaagccgcgggcttctaggtttcagttggatcaggggccgtcgcttggtgttgcagctggcaccttgcttttcgggcattcccttggttttgatcgggagggggtaaacgaatgcttgcgcccattgcgcgattccccttccctgctcgcggttgaatgagaaggttcttcaatcggcatgcggcaaaatcgattacttcttcaagtagcgacattgtgattttgcagtatccagttgcatggtagatgatggggagataaaacaggggattgggtaacatttactttgaaggaaccatccattgtgaattgtgaattttactaattttgtgagagttggattttgggagttttttacattttgtgcttagtgtgcagtttttggagtaacagaattgtttactgttcctgcaagcaaggttaacttatggttgattagaagaaacaaaggcactgctcgtgccttctcttggaggaaaacagaaaacaagaaagcaatgagcagcggctcaagttttgctgtagccttcttggcggaaatcagaaaacaagaaagcaaagaacaacggttcaagtttcctgaaaccaacgtgttctgtgcctgggtccatgggggtgcaaaacacgttttctgtgcacacgcttttgttgtataacagtctgtgtccagctatggtttccatggcaaattggcaatttacagaattctttctgctcttacttcaccattaagtctatgcgcaattccagatatggtttccatagcaattccagctatggtttccatggcaaacctttttgtccatgtagtaggcctcagtggccaaattggctgtttttgaaaatttagttgatgagggctattttaaaatattaattataaaaataaaatattggtatggggaaggcagtttctggccaagccttatgttaatgcaaaagaatccatatgaaatctgtactggactttatgctattattgtatcccataggccatgatgggtttttgcccctaacattcttgctttaattgatttgcaggaaggatccaaattacaaaaggatggtaatggcctgcttcattcaagcagtctacctgcttgaactggacaggcaggaccagaaaggcgaagaggatggccttgctccaaaatggtggaaacccttcaagtacaaggtcacacagacattggtggatgagagagatggttccatctatggcgccatgctggagtgggatcgttcttctgccttatctgactttatcctcataagaccaagcggggcaccgagggctgtgttagctctcagaggaaccctcctgcagaagccaactatgaagagggacctgcaggatgaccttcgtttcttggtatgggagagcctcaaaggttcagtaagatttgttggtgctttagcagcactaaaatcagcagttgagaagtttggctgcaccaatgtttgtgttgctgggcactccttgggagctggatttgcacttcaagtctgcaaagagcttgccaaacaaggagtttttgtggagtgtcatcttttcaatccaccctctgtttcactggccatgggtgtaaggagcatgagtgagaaggccagctacctgtggaagaaagtgaaaggaagtctgccattgaaggaagaaacaacaacaccacttgagactgctaaggctgaggcaagtgacaagaagagattgcgcactgagaagaaatgggtgccacatttgtatgtcaacaacagtgattacatctgctgccactacaacgctccctcttgctcgtccacaacaacagatggtgcctccagtgaacagcaacaacaacgcaaggcaagtgagattgctggtgatgtggtcgcaaagctctttgtgacatcaaaaggcccgcagaagttccttgaggcgcatgggctacagcaatggtggtcagatggcatggagctgcagttggctctctatgacagcaagctcataaacaggcagctgaaatccatctacacaacaacaacaacaatgtcatctcctgccaagtcctagacacggcttaagccgttgcatcggtcattagaaatactctttctaataattgtgtgttcctttataaactgagaatgtagtattactccagtgacgcccggaaacagtcaaatagtttggttaaagggataatgtatgaacagtttctttttaaaaaaaacatgaacagtttcggcaaactagggtgtgcttggatgtctcaccctgttgcctggccatcctctttgcctggtctcatcctccaaaatctctttatcaaagctaggagaaattttgaaatcaagcctgttcgcttgtcttatcagacgtacttgtactttttctacctgccagcagtgtttttctctcacaataaattagtcaacagtcatttcagccataacttttcagaccagcgaacaggtcggccaggaatccaaacgcgcccagatttggttctaggcttctagctgtcacaactgcacatagtcaaaggggtgtttgtgaattatgactgctcc

SEQ ID NO: 4349 - DNA, 4614 bp, Sorghum bicolor
gttctctcttgccccttccaagttcgaatagtattggggagtaatttagtggttggatcagcgatcttgccagatatgggattgacctgtgcagacagcattttgtttgttgaatacactacttgtgtgggtgacagccatccaatgatcttatttagtgtgaccttagttatatgaaaacctagatagggtactttcatgattggggcctcgaggtggtaaacatgtgaccataatgcttgaaatcatcaatttctaacacctattcagtttgaaatcatcaatttctaacacctattcagtcggctgtactttcaaatgtccatactcctgcccaacctagagtccctaactcccaatatatcctccagatacatgtagtttttaatgaaggatttgatgaacattgatcctagcagaaaatgtcatgattaatattttcatgagtgcaatcatgaaatgcattgcactagaaatgaagaatcagatgctattctcagaatgcctaacatgtcatcttcagtgtagggattcaaaccgcaggttccgacttgagaagatccacgattgcccatgttaaaagtggggaggctgatggatatccaaaaactgaggatctggtggatgaagatactctgctatcaaatttagacagagcaatcaaggaagaagattatgcccgtgcagcgaagatccgggatgatctgcgtatcctccatgaggatgctaaagcttcgctcctagcagcaaatgcacggttctacaatgccttcaagaatggagatatcgctgcaatgtattctatctgggctaagggtgaccatgtatatgttatacatcctgctgcaggtcggatatcgggttatgatgtggtcatgcaaagctgggagatggtttgcaatgcagattatgagtttccactgaatattgatctcaagaatatagaggttcacatccgtggcaaccttggttatgtcacgtgcttggaagtggtaaagaccaaaggaagaacttggggaaagcaaatcgccaccaacattttcgagaaggttgatggcacatggctgatgtgcgtgcaccatgcttcacacatcgaagaatgaaatgcgcgcgcacttggtgaggaacgaaatgcacacacacttggcagcctgggatggaaattttgtcagggagaccaccatgtacaattctgagaaatttttgtagcttctgttttcaatgtgaattttgttgtcgatgccttatttttcatagctactagcatattttgcctgatgcccggaaggaccacgattgagttcactggctgttttacaatcatctaatattctgtctacttaatcgtagccttgttgtgctttgtgaatcatggaataaggtttgatgagatgagaaccgtcgttagaagacgagtttttagtgacactctgctgaagttttttactggcgactttggtattcctctgtggcagttaaacttgtttatgattatatcttgtgactggtgttatcttgctcgctgttacctccagaaatctgggcaccagggacggtattggttcatcctggactagttgccgattctgcgcttagatttgtgcaacaccgttcaaacttgagtgactcctattttagtgattttgtattaacaatgactcctgtaggcatcatgttatcctagaacatcctgccgaggagaataggtcatcatcaaggggcataaaaggaattaccggaacaaaacgatctactaaagcctgaacccgaggggcatcaactcccactctttctgcgccccttcgctccgcctccttcctctccaagaaaaaggaagcgcggcgagcaacaacctccgccgccgcgcacctacgcccacggaacggaccacgccgtcatatgagtgcagaaccccgggctcttcctccccctcggcgagctcggtaggaggagactagagcggcagcaacatcgacggtgtcgttgaggagggggcgatgatgctcccgctggtgaagctcggctcgctcgcgttccggacgctgagcaagcccatcgcggcccgcctcaagtacaacgccggcatccaccccaagttccgcggtctcatcatcggactcgcgcaggtgatcgacgctccatccatcccgtctggcatattttttccgtactgcaatctgtgcgccgatgcttggtttcgtttcgatttgccctggagaaattcctccttgcagttcgtttttctataagttgcaagttgaggctgcttgaacgcttgatcgtttttagccagtacggcttcgatgatgcagcgggcgttccgagattcttgatgtttgtagcgtgccataatgtccgtggaatgatttggcttgttgggtttgatctgatgagaaatgcttggggaatggatctctacaatgtgcaatgctgtctgggattcaattttgtctccatattggaccgatatactgcattgatccaaatcgttagtaatatagtgaatttattatagtattaatcaattgtttggagtggataagtttctgaagtccgtgcaacttttttttccctgaatgttcataccaataggaattccctagttgtgaggacatttcgcaatgatgccttagggatcagtttaggcttgaatctgtgttttatgctgtatcagtattgcctatcaagtaacgataggcccaatttattctcccatactttgggaacattatcaaatgatacaatcctcaccagaaccacacaaaaagaagtccactatagtccttgtaaaatacttctgcaatgttgataatgtgggcacattgtctgatggaggaatagcttcttggatatagaaatgttgttcagctcttctgagtaaaattttcacaatcagttttgcattgtacaacaactggaaatgcagcaggttaacagcattgctctgttatcctattgccgtcatggctattttcttcgcatcttactgtattgctctcttactgtaaactgaataggttctggttctgaactagcaagcatggaatcacattgctctgcaccatacattatgagacagctgtaactgacatattttatggcatacatttccaggcaaaccatcgtttcactacaaatatgcagaggcgagtgtatggacgtgcgactgacattcacattcggcccctgaatgaggagaaagctattcaagctgccgcagatcttcttggcgaactatttgttttctcggcaagtactcttgacttgcattgttctgaatagcaatggtctttttcaaagtaaaatggatagaaaaaggattaacagtgttttcttttcatgtatgatgagaaacaaaatccaatcattctagaattttcacaatgactcatcaaaccctagaaatgactatagctgacgtgaactcacataatttctcaggttgctggtgctgcaattatctatgaggtgcaaagaagtgctaggtcagaagccagaaaagaggaagtccgtagtcaggaaattgaggtaaattgactgcctccatcttttccctaggaatcattagttcaatttttaatggaaacatggcattgccaggatatctcttgaacacaaatgcaaggcagagtacaaatttgatcttaaaaatcgcttctggttcctctgttcttgatggaaactatattatgtggtacatcttctcaagcctctttcatcataattaattattcatgtccaaatgacaggcgataaagaaaagggatgaacaactggccctggaagtacagctcatgaaacagaagattagcgagatggagcggcagtactcgaagtggactcttccggggtttcgcggcctcggcactgctcaggcggcggcacagcctactggtactcagcagccaacagctgcgtagctgctctacttctgcaactgtcgatagctccgcggtctgaacggccgactgcagactacctctgtttcccttgcattactcagttacatttgattcgactgaagtttactggcgaaagggtgaaggttacgttgtggataatgaatagtgctcgagaggaatttgaactgaatcgaagttgttatcggttcgtcagattggcggcgtgacattcagtttagagtttttacatgcccaagttggaactgagatgatgtatgctatctgcatctcgtgcccggcatatgctttgctctgctttactgacttcccttttactccatttgtaaaggggcatattaggattcaaaaaagtgaaacattctaaatttctgtcattaattagtcaaaatgtgtgtgtatagtgcgcaagagatgcatcaataaatctgtatttcaggtctttcagtaagacattgatttgtaaaaggtatcgatggtctgagcctgagagactactcaacataaggctcatggaatgaaatctgtggcgtcatggcgctttgatatgcggaacagcaggagcgtgttgaaaaatgcaccaaagaagcatcaagtatctccatgcaagtatagatgcactgtgacagaagaatttcatcagcaaaatcttgctcgtatctgatatgattatttaccgtatttctactgaaac

SEQ ID NO: 4350 - DNA, 6190 bp, Sorghum bicolor
tgtgccactttggtccatgaacttgcaaacgcgaaaaagtgccccctaaacttgtcgacctgtgccaccttggcccatgaacatacaaatatggaaataacaccagctgcatgacactgttctgtcacgtggccgcctctagtatgccatgcatggcactgtttatggtgttgacatcatttgggtgccatgcatggcctaccagtggcggccacgtggcagaacagtgccatgcagctggtgttatttccgtatttgcatattcatggaccaaggtggcacgggtcgacaagtttagggggcactttttcgcgtttgcaagttcatggaccaaagtggcacagacggacaagcttaggggtcactttttcgagtttgcaagttcatggaccaaagtggcacaggctgacaagttaaagggccgccagtgtattttactcaatagaaaaactaaatttgttagactttagatgagtagatctacacattgaatagataatatagtatgttttagtacaaaatttttgatgtagctttatatctatacttttctataattaattagactaattatagctacagtttctatggtccaactgtgatgaaatttatatagtgggctaattattctatacttgagttgtagtaaaaaaaatcatactcattggatcatgtattataactaagttatatatgatctaattgaaatttttaccacagtttaaatatataataattagctcaacataaaaaatcacgacaattggatcatacaaactataattatgaattattctaattaattatagaaaaatacagatttaaagctacaacaaaaactttgtattaaagcattccatattataagttcactgtatagatctacttatctggagtccaataaaatcagatttactattttataaattttatgtgatttattataattttacaaatactcagccgaaataaataaaaatgaaaaagacaaaacagtcttcaaaaccgctcataactatgtcagaaacgtaatatgcacggttttaaaagttgaggtatgtattttacctaattttgaaatttagagataaaaaatagactttcgcaaaagttgagagactaacttctattgtgattcatatgctttatgtttgccaacattttgtattagccggcccatatgttttccaaaaaaaagttaacccgggcccatatgaacgagttagtggcggatacaaggagcactccatcggaaaggaacagttttcctttattcagcttattattatcacgcaactctgctagcgaagtgattcagattcgtgacgatcatgtaatattcctttgctctaatagtttattccgcccgtccaataaccgctcggtgagcgcacaaaacctcaccgctcacctcgccacaaatcacaaagaaaactgtactatttctgctatacgtctccatcagtcattttcaggttcatcagacaaattgtttcaccggaaaactccgtcacgatgtttcgaagtgcatgccacattagatccaacgccgaaaagagctgaggccactgagtagtgactagtgactacccgagagcttaacgcaagaacgaaccaccgcgctggcgggagcggctggccagtgcgcggtgagccggtgacctgagccgagcgcgcacgcctcgccggagtccagtcgcacacggtaccaacagggcaacggggacggaacggaacaacagcacccggttcgcctacaccccacaagccgcaagccggcagcaacgcatccccttggcggctaggccgcttggcaaattgggtctccctccgactcccatccttgcgggcctgcggcgaccagtgggcagtggcctcttcctcctcgcgcacttaaatcccccgcgccgcctccccccacttcctccccaacccgcgcctatcgactccgcgcctcgctctcgctttcgcctccctcccccgcctagcgtgcgtcgaccatggccgccgcggcgcacgaggtctccgccgtgatctttgatctcgacggcaccctccttgacacaggtacgcacgctggtccatgtccatccacccagcctcctcgccatcccgctccgttccaccagagccgctccgacggaccgatcagatagcctagatgcacatttgcacgtgtgccgtgtcgctatgctgtagctgattcgcactgttctatggcgttgtcttggcgcagagagggcgacaagggacgtcctcaacgaattcctggcggcgtacgggaaggtccctgatgcgcagaaagaggagaagaggctgggccagatgtatctggagtccaccactggaatcatcagagattacgggctgccgctcacggtcgaggagtactccaaggcgatgcatccgctctacctgagaaggtttcttttcagttttgacatgtacataacgcttctcagtctacaacctcaagcggtagcggcttactttctcctataggtggcaaaaggcgaaaccgcttccaggagtgaagaggcttgtcaagcatcttcacaagaacggagtgccactcgcaattgcttctaactccgttaggagaaatattgatcacaaacttccgaaactagaaggtaggaggataactgtttgcttcagtccgtatcttgtgatcttgtcaatggcatagcgcatagatatgtcttttggtgtcgccgcttccgcagcaaataagtacagtataccttaccactgatgaagaggatggaaattcttccaatgtgattctaaggatttatcttgcttaaatatgttatgtatctttctttactcattgactgagtgtccatgctccatttctgacaacatggatcatgcaagtagcttaacattgctagtcctgatttataccatggttcagagttcagacaaataaaaacaaggactattgaactagtaaggaatgaggacactcatctatctttattcggtgtgttttcttattatgtattgcattagctgcttaatccatgtaaactccttaattgttttccagattggggagagtgtttttctgttattcttggtggagatcaagtccctaatgggaaaccttcccctgacatgtgggtaccttaccattgttgaccaatcatctgttgctaattgttacttttaagtgctcaagtgttatgatgtttccattcaactagcattgtgtagcactgtttgttactgatcaggtatcctgcattcttctagatttttggaggctgcaaagaggcttggtgtaaatccatcgtcgtgcttggtcatagaagattctgtgtaagtgtaggaatgatatcttctgggcgagccgttgtgccttcgtgaaaaaatgttatcctttgcatgattcataacttatcaggaccttgcttaaaaaaaacttatgcgcacacttttagatgttattgaaatccgatcggtagccaaatgatgtaacttccaatagattctggtatgctatgatggctatatttaaagtggatccctttatatcttctgttgaattcacaccaatcacaaaaattaggggctcaaggcatcaacggttgattttttattggcagagataaggttaaaatttccatatgcaaataactgataagttcacttcctttggttttcatcagcgttctattttctatgtgaaatgatatggcccaatgtatgattagggacacaagtttcctttttttgtcactggacttcgggtcgacccaaaacaaacgaactgttccagatttccaagcaagaaaatgggaaaaataaattaaggcagtgaaccagaactacccattgggtactcacttgcttttctaaatttatttcattctcacgacttctcaaaacctgacccttttatacacctcttacacgtatacgtaggatgcccatacacttctttcaatcatagaacattataaggctcacaaaacaatcaataatatttatatttactctttcataatcgctctcaactatgttgaatcttcatgtcactaaagtgataagttgcatgcttccaatgttgatgcattgaaaataatgcacttggtatgtgctatcgagttatggtttctgctttcttggtcgttttttatagtgttggcgtcaagggtgccaaggcttctggggcaaaggcggttgcagtaccatcacttcaaagtcagaggaaacactattatattgctgatgtcatcatctattcacttttggactttgatcctgagctatgggctcttcctccatttgaagatcgtaactctcttcattaccactgattttgttttctttgataaaactgtcattatttcaaatctgatgatgggtgacatttatcataggcattcaaggtgtactgccgattgatcccttactttcaaatgccaggataggtgataaaattgtaaacaatcttcattgggtaatttcaggttaaacactttctgattactcttatatactagtgttttttaatactgtaaatcacacaccttttttactttgactatctgcaaacagatgactgtacctacgagtgtattcctgaccaaatatcaggaatttatttgggttgggccgagtccaaagtgcatggactctccaaggttatcataggtactgggtgggacttctcacagcagactgtcgaaagagtgatggttggtacttcttgttctttatgtgtcgttgttttcatgcgggaggccagctctccaatgatttccctacagttctaagtatcttttctggcacgggattttgaacattggtggtctagtaatatttactaacagattaatgcatagtaaggtttccaagttttctcggacaatcatttgatttgtggtttttcttttgcagcaagtagattttcttgattcctctggcaggattgaaacagagcctgtgaagctgcttgtaattggctacatccggaagctccaaagtgcggtaataaccttttattaaatttagctataacttgagaatctgactccactgaattttttcttgtactgatatgccatgtagaggattgccaggtagtatgccttatagcttatatagagtatgatgaatgaatattaacttattttcaattcatcgagatagaagatggcgacggctgacacttatttccgatacaaggaaataaatgactctagaaaataagaaagataaccaaaggcttgtcttgagcacaactatattggcacattcctggggattctgtctgcccttaggcttctcatagctcaatgtcacgtcctcattatgtttgcatcatttctatttcatattctgctatggatctcctttgccactatgtcatgcaatgctggacttcttaatttatcaataagtagtacatcatttttccgcttgaaaaaacatgaggcctttgtatcattgtttgctaaaaggaaggatcaaaattataaaatcaaatataaccacaaatataattttatgtgcaagctcacaaatcatgatatgattatatcgactatatgtaaccgttatgacaggatgatatattgcaagctttaagtataaccgacgaagacaggagcattgcaagggaagcattggacctcccaactttctctgaatatgctaatgaccttcatcttgcctaagtcgggccttatcattgcaatctctcacctcactgcctcacgtttgtatttgttattgttaacaagcaaacatgatgtcagctgcattttcttccatgaagacttcatataaaatgtacttgttgctcggagaagattagagaagaaaagaacggaaggcatgaagcgtgccatttagaggtcgatcaatgttaccatatgttgtagtaaattcttcccgcttaattttgtttatgtataatatactactgcacatgctgggcagagtgatagaaaagatgcgagcactgaaatgggaaaaaagtgtacaaatgattcttcacatcaaacagtagcacagatgcacaaatttgatcaacatgtatcgtctcaatctcactgatttatcttatgcttcgctgaaagactgactgccatggaactagacaggttccatttccatggtttatttcactttcatttgtaagattcaaagtactgtactcaataattttccaaca

SEQ ID NO: 4351 - DNA, 3076 bp, Sorghum bicolor
ccacttgaaattgcgtacatgtgtgcaattctgacgtgggagcggactcctttcgcaccttgcgtagcattgtcggcacaaatgtgcagcactgcatgtataaggaatgctcttatccgtttctctagtgaaaactgtctaggactgtccatgaaaatacttagccttcccaatgctaagttggctagtagtcccatcctctacgtttgcaacagttatccaaattatagcttcagtagaggtcctatcctctacgtttgcaacagttatctaaattgcttgctttgacaaaaagatagaaccatcactcaaaagcgcgttgtgacaaaaaagcaaaccatactagaaaaaagaaacaggctaaagttccaaacaaaaactataaacctaccatgcctattacgtgactatgatacaataagagtagcatgcgatgtaagattggttgcttcaaaaatcaaaactcatgtatctatacggcttgtcattttattttgaggctatatatagtacgtcattttattctgaggctaatattattgttagcctacgttgaagttgtccttacatggtagtagcacgtgtttcttttaatttgtttccacgttggattaattggctagaaaacggaaacggaagaggggttttccagcccatctccatccgtttatttcattcctaatctatcatgaccaaatttattacaaaacaaatccaactacctaaatcaaatatgtatagtacatacataataatagacattccacagcgtcaagtctcaattattcctccactgtattctgttattttagtatatggatgtccttgccaccttaagtactacttagtaaattaaattccatgtcaaatattcccggtcacatgtatgtgaataatttcacgttaagttaaacaataatctaacaaatatatgaatgatgttgaagccacgtggaactagaactctaagtagagaagtccaacagatccgaacggaacatcattgcacaaatgtggtcagctgtcaacttgtcaagtgtgaatgtgtgattcatttgatccgacatgagacgtcaggcagctaaaggctataacgataatactcctaccattcatcgaaaggaccatctgtaaacctcaccataaataaataaataaataaataaataaataaataaataaccgatgaacataactacagtataacacaaatcgaggctaagtgagctgaaggacgggagtggagtgtagtaggtccagagctgtaacccagcccataaacatgtttattaggatgggaggcccgcaaacaaatatagccaactttgttgggccaccgccgggcgccgtcctgtgttggccagccaggcgcatcgctgctggtctgtttctcaaaaaaaaaaaaaaagtgccggtctgtttctcacgaaaaaaaaaaactgccgtctccttctggccgactccattattttcgccgcgctttgctctcacgagatgaaaaacgccaccggatccgaagccggtcggctcctcgtcctcgcacagcagcgatcgtttcgtcctggaacgcgcatgccagcgggcggcgggcggcgggcggctgtggtagcgtgcgtgctcccgggctcccggcccatgacgcccctgcatgagtttccatgtcggcatcagcgtgtcgttttttatgcaccggaattgaatgcggaggtggagcgcgaaggaagcagtcggtgcatgcatgttgagtacagaaaattgttcgtcaactccttggcctgccgaccattagctatggcacatgcctcccggagcggtaacctgttacaagatgatgagtatatacggggggatgcacaacgtgttggcacagaaacaaccctgtatttcatcaccaaattcaccactagctcaacgtactagcatcgtcgctattgtcaacacagcctgataagataccagaactgccggagtgatcgatccatacaactccagagacgagaatgacggtgagtttccgcgctatattcatgcattttccttgtagtaatagtctactgggatccctgatgtgtcttaattacgtacatcacctacagctcgtggagatgtgcgtgcacatggactgccccgggtgcgagaagaagatccggaaggcggtgcagcggctggaaggcgtgcacgacgtggagatcgacatggcgcagcagaaggtgacggtgaacggggacgtggagcagaagaaggtgctcaaggcggtgcggcggacgggccgccgcgccgtcctgtggccgctcccgtacgctccggcgggcgcggccgccggcggggccggcgccggcgcggcgcacgtcctggcgcaccagcagctcatgtaccagcccggcgccgcaggcctggcggcgcacgccagccacgcggcgcggcccgcgtcctcgtacaactactacaagcatggctacgacgactcgcgcatgtacggcgcatactaccaccacggtgccaactcggccgtcgccggcaccagggccaccgactacttcagcgacgagaacgcgcaggggtgctccgtcatgtgattcacagacaggatccccatgtcagacatgtaaatttcagaggtataattggaaatttggaatcggtgtggaagccttggaattacaagctatcgtatatagtatgcaatatacatgtgattgacgacagacttttctcacctccaatgctttggcaattttggtttggcatttgttgttgtttgccaactcccaattgcaaatgcaaaggaaaaaatatggtcatccccaatggtttggcattctggacttagcaattacctagtggacccagccaattctttgcgcgcgtctttctgtcacacgcgcgtgtttcttcgcgcatgtttcccttcgcgcgaacggaggcaccgccgctcgcaatcgcagtttcgtgtccgtcgtcgccttcatctttctcgtgatgcacaccgttcctggtggaagtagcagactcgatcggcatatttcaatcgcgttcagggaggaacgacgtagcagactcgatctgcgtctttgag

SEQ ID NO: 4352 - DNA, 9712 bp, Sorghum bicolor
atcacgcatgcaacttaaagaaaaaaaaacagtaagaaggaaggagctggagcataccaaactgtcatatgacgatatatccatccaacaatcacccttgttcttctccgtgctgtcgtgcatcactcctttcgtgctccctgctgagtctcgaactctcgataaccacacttgctcttccgccgtgaccctaaaccctatgcataggaatggcagcgggccaagtaagatgcgggtaaagcatttacccgtcaccgagcatacccgtgagattccatatgcgcgcccgatgggtacccgacgggtatcaagtacttattgggtatacagtatgttcaagagagatcaaataacaaaattattatgatataaaataataaattcatagttaaacaatacgcaaatatatcaatctcacttacctagagttcactaggacaatatagagtagctcacaagccacaatgcatcatagattaaccattcaatcattcatgctcatacaaataacataaaacaacttacacaaactgaagtaacaagttaatagttttgatctttttattcagtaatccaaaaaatatcgtctttgtagttcaacatgctatgcaaatgctacagattaaatgttaaataagctagtcgacatgatatgtatatgatatacttgacatatattcaaatgtattctcatttgcggatacccatcgaatacccacagataaaatttaatatccaaatcaacttggcaaatattgtgatttgccaacttccaaacaatatgggaagtaaaaaaataatccatctctaagagtttgctattttggactccaaatcaacttggcaaatattgtgatttgccaacttccaaacaatatgggaagtaaaaaaataatccatctctaagagtttgctattttggacttgacaaaatggaaaaaaagaaggcccataagatggttttttccggcgctactaattctatatgcttcccatcctccccttcacgcaaacaatgccgctggcgcatcataagttcattgatcgatttcttggtgtcggacctagcgtgaatcctaaaaggacaatgactacccacagtgccggccttgccctagcccctagcagacgtcgactaccctagctggtcataaagatcaacaatgggaaaaagagggaaccacatacctgaatgttggacggcctagcttcgcattgaggagaaatcaagaacggcggtggcgtgacctttttttcacgcggacgaaggagagacacacccttttctttgtgcgcttgggggaaggaaaggcgcaaaggcttcgtgcgcgcgggggaaggaaacacgacactagaaatcgtgatgacaagttgatatgccaagttactatttttgagtgtcggaagtcatgatatgccaagttgctatttttgccaagttgatttgccgaactgttagaagaaaaaatttcttattttaccaaaattatatggattttaagttgttttgccaaactcttgaagatgctcgtgtacggtaacttctttgccaagtctatcatagcctgcccataataaaaatcgaacatatctccctagagctaacctcctgcaaagattattcatgtcgctcgctggcaatggaaaaacgaaaattcactcaatttcggaaaacaaagctcttgctcccccaacgggcctccaccatgatgagacctgtgggcgagagccgaggagtaacgctccacttggatgggctttcttcgccaccacagtccaagttggaagggatatacgacgaatccacccagcacaagcgacagtcccgtcccgtcctataaatagcagaccacaacagagagagggagagggtgtccctctccgctccgtcccaggaaacccggtatagcatcaaaggaacgttttttgtcgtgttgattgatctcctccctcccctttcgccccgtcctgcctccgggcctcacccccagaaaaaaagaaagaaaggagtaaagcctgtgccaggtgaggtgctttcctctcctctcccttcgatccagtaggtttgcactctagttcctagatcttgtttaggcatttgtccatcttggagtggcacagtccctagcctcctacaacgggtgattgttgtggggttttgatcatactttttttttgtgcattcgagaaagccccgtgctttgttggaatccgtgtgcttagggctgcgtggatcctcttctcgcatcaagaacatgtcgaaatccgtgggattggagggatttgtggggggttttctcttctcttttgataggaattgtgggtgttgatctgtgtggattctgttgcagggggcgagaaggaaaggggagtcctttggggagagggagatggcgcgcaatgcggtggacaaggcgacgtccatcgacgcgcagctgcggctgctggccccgcagaagctctccgacgacgacaagcttgtcgagtacgacgccctgctcctcgaccggttcctcgacatcctacaggacctgcacggcgaggacatcagggagacggtatgtaaatgctccaatcgattcctgcccgtggtgctatttgttccttttcgattctggcaattgatttaggtggtagatagctcgatcatgcttgaaaatctgtttatactgtcatgcatgcatgggtcgcgatagcaggagaatcatacagagcatctgggccttgtccgttgtgtgtttctatatggtgatatttttctcatctgttttggtattgcactctggtgatggaaattagtgctgcatttaacaaatcgtagtagcactgggggtccacccatttgttctacagttgatgatcaatattgtgctagttctcactttgtgttttctagcttatcaaattggtagatcaccatgatgttcaaaactggtggggttatcatgatgtgtatagcacttgcactataatcatggccttttgatactcttgagttattatgccctttgaactattgttgttgctgataggaggtagtttgcagatcatatttattatcttttctatgcataaatagtatgataaaatggtaaaaagccacgttttttttacaatgcatagacctactattttacattatcattttaccactcaagtaagtctatctccttgcccattttttggatatctgcaagccaatctttgcttaacattctgataggtggcttgatttctgtgctcattcgttacacagcaattccagtctgttcaccaactcactctacattcgataaaatttatactttttgcaatgctgtaaagtttccctttcttgtgaataggtgcaagaatgctatgagttagctgctgagtatgaaaataagcttgaccccaaaatgctggatgagattgggaatgtgctgaccgactgggatcgcggagactccatggtcataaccaagtcattctcacacagacttatcctggcaaacttggctgaggaggtacaaatggcataccgcaggagaataaaactgaagaagggtgactttgttgatgagaactcagcaacaactgaatcagacatcgaggagacattaaagaggcttatgcatcagcttaagaagtcccctctggaggtattagatgctctcaagaatcaaactgttgaccttgtcctgactgcacatccaactcagtctgtccggagatcactgctccaaaagcatggcaggttagtcttgaagctttctgaattgttagatctcaggatgagatttattcgatggagttgaatatatgcaatatagaaatgttggttcagttcgttctttatatgcactatgcaccacagcaccagggcaatgcagtttgttcacactgaatttcacatacccctttcatagaaaacctgatgtttattttctgccttttttttttaagtgtaagcatgtaagcattccttgcatggttttgcagtagtctgccttttacaagaaacaatagcaatagaaaaaaaaatctcgaggcatcttgaatcatatgttatatgtgcctttcgatgccttagattcttcacctttcaatgtgcaggataagaaactgtttaactcaactttatgcaaaggacatcactccagatgagaaacaggaacttgatgaagcacttcaaagagaggtaatttgcttagatattttggtattagtgttgtataatactatctgtgtagtagttaatatggaaaactgtcaccttcactaaatactcctgttccatatcttatttacagatgagtatatgtttatatgattctaatatcctgttccatttcttatctacagattcaagctgcctttagaaccgatgaaatcaggcgggcgcctcctactccgcaggatgaaatgcgtgctggaatgagttattttcatgagaccatatggaagggtgtacccaagttcttacgcagggtcgacactgctcttaagaacattggcataaatgagcggctgccatataatgcccctatcattcagttttcttcatggatgggtggtgatcgtgatggtacatggcattctctctcccttttttggatagtatatttgatgatgtgctgaatcatgcaactgtagttcacaagaaagatgtatatatatagctctaaactgatgtccatgacagggaatccaagagtcacaccagaggttacaagggatgtgtgcttgttggctagaatgatggctgctaatttgtataatgcccagatagaagatctgatgtttgaggtaaatataaggacacattttttatttgaataatgtagtgatattagtctcacaagaattcttttttgtcgcatgcagttatctatgtggcgctgcagtgacgagttacgtgtaaaggtcgatgagttacaatgttcctccaagaaagatagaacaaaacactatataggtgcagattatattatgatattttttgttaaacttatatattatatcttcaacatccttgcctaccatctgttgcaaaatatttaaccaaactagtcgccaacctgttctttccaatggatgaaatagttatacattttataaagtacctccatccagaaaagaatgcagttctagttctaatcttagtcaaacaatctaaaggttgatgaagtttatagaaaagagtatcaataattatgacaccaagtaggtacactatgaaaaattgaaaatacatttcatgacaaatctaatgatacttatttggtatcataaatattgatatttttttggcacaaagttagtcaaacttgagatggtttgacttggtactatgctagaattgcattcttttccggatggagggagtatcatattgcttatgattaatatggatcctcattgtaaccataaatgtggttccagtttgatagtttattctcggattacaataaactgcatgaatctatgctgctgaagactaatctgagacatgcagatcaggattctaatctaagtgattctaacccacgtcagcaattgaggaaaaataggcatggcaaatccatagtccaaaagggttggactgtaagaatcagaaacagttaccttgcaaaaaaaggcattgaaggatttgaaacatgcaataaaacaaatgtatttagctgttagcttaataaatatgatcatgaagcaatgtaatattaagaaacagctgtcatcgggactcagaagttgcattgatatatgtgctttcttgccatggttgcatttgaatcatgttttgctctctggatttgtttctgagacatgtggatatctatttctgtcgctgtactatgtttaatattggaaagaaccatatcactatggagttatattttttaaagacaaattcttgctgttttcatgcagattttgatatttaggatgacatttttggcagcaacaggcatgatatgatgcatgctatttttgtctattcctttatattaatgcagccaattagacaaaactaggtgaagttaatacatgctgacatgcttttcctggatgcagagttctggaaacaagttccccccagtgaaccttaccgagtgattctgagtgatgtcagagataaactctacaacacgcgtgaacgagcacgccatttattagctagtgggttttctgaaattccagaggaagcaaccttcaccgatgttgaacaggtatgtaaagtgaaaacagtagtgttcttttgatgttcctggcaaggataaaaaattaatctgaccatatacttttagtgctatattaagattggatcctatcatttccaagataaaggatctttgtaactgtttcaggatattttatgttttatggattctgtctcgattgaatctttttttctcttacagttcttggagcctcttgagctctgttacagatctctctgtgcctgtggtgatcaatctattgcagatggaagccttcttgacttcttacggcaagtgtctacatttggactatcccttgttagacttgatatcaggcaagaatctgaccgacatactgatgttatggatgctataactgaataccttggcatcggatcataccgtaaatggacagaggagaaacgccaagaatggctactctcagaacttaatggaaagaggccgttatttggtcctgaccttcccaagtccgatgagattgctgatgttctagatactttccacgtattagctgaacttccttcagacagctttggtgcatatgtaatatctatggcgacagctccctcggatgttcttgctgtcgagctcttgcagcgtgaatgtcatgtgaaaaaaccactgagagttgtgccattgttcgaaaaactggcagatcttgaggcagcacctgcagctttagctcggctgttctctgttgaatggtacagaaacaggatcaatggcaagcaagaagtgatgattgggtattctgattctggcaaggatgctggtcgtttctctgctgcttggcaactgtacaaggctcaagaggagctcattaatgttgctaagatgtatggggttaagttaactatgttccacggacgaggtgggactgtgggaagaggtgggggccctacccatcttgctatactgtcacaacctccagaaactattcatggatcgcttagggtaactgttcaaggtgaagtcattgaacaatcttttggagaggagcatttgtgctttagaaccctgcaacgtttcacagctgctactcttgaacatggtatgcatcctccaatttcgccaaaaccagaatggcgtgctttaatggacgaaatggctattgttgccacaaaggaataccgatcaattgtgtttgaagaaccacgctttgttgagtatttccgccttgtaagtcttcagttttctttgcttgtgttttcctttcctacacaccttcacttgtctttatgttgttattccactatgagattaattctagcttttatttagtccttggcatttcactcttgtttttgttagctgggaattcatcttgctagacctgaaggttaatatactgtttcattatcgtttttttactgttgtttcattatcgtctttttactgtcatgtcattttttaacgtagttttactgtcatgtcatgtcattactccttgtagtataccctataaatttatttatttattttttggtaatgggtcaatttttctgtgtaaccaatcctgacatttgtgtatttctttcaaataggcaacaccagagatggaatatggtaggatgaatatcggaagcagaccatcgaaaagaaagccgagtgcaggcattgaatcactgcgtgcaatcccttggatctttgcttggacgcagactcggttccacctaccagtgtggcttggttttggcgcagcattcaaacatgtcttggataaggacatacggaatcttcaaacccttcaagagatgtacaatcagtggccatttttcagggttacaatagacttggttgagatggtgtttgccaaaggtgatcctggtatagcggctctgtatgacaagcttctagtttcagaggatttgtggtcatttggcaagcgtcttagagccaactatgaagaaacaaagcaacttcttctacaggtgatggtctaagatcttcttgcatctgttatggactgctagagttgcatgtagactatgtgatgcctctacctggcttgaacattgtgtgtctgaatgagtagataattaagggcctgtttggttctccatgctaattttagccagctaaaattattttagctactcttgggtgactagtgggactaaactattttagcttctttttagtcagtgtgtttggaagtttagctactaaagtgttaaagtttagctggctaaaattcagcaaggggaaccaaacaggcccttgttaattcgtaatctatagccacatcatgcccaactacttccagagaatgtttagatacagctcctagagttgcatgtagactatgtgatgcctctaccaggcttgaacattggcatctgaatgagtagataattaagttaattcataatccatagccacatcttgcccaactacatgcagggaatgtttaggtaaggagaaaatggttctggcaataggaatacaggatgttcatttaccacacccttttcttgtctcaccagtgcattgtgaccttgtgaatttcaggttgctgggcacaaagaccttctggagggcgacccttacctgaagcagaggctgcgcatccgtgactcttacatcaccgcgctgaacgtttgccaagcttacacgctgaagcgcatcagggaccctggcttccaggtgaacccggggcctcacctgtcgaaggacgtcatggacattggcaagccggcttcagagctcgtgaagctcaacaccacaagcgagtacgccccggggctggaggacaccctcatcctcaccatgaagggcatcgctgccggaatgcagaacaccggctgaaagaacaagaatccagagtgcctttctttattctgagttgatgtatctatcgtagcgtaggggatcatggcgtgagccggttaacaagacgtacggggtgcacacctggatatgggattactatatgctatttgctatatcgaactcctatgtatgcatatccatgttgcttgagcctgcacttagcttttggatcataacttgttaggttatgcgtaggtcatcttgttgcggccaaataactcttgagctgtgccgtttggtgctgggatgctggcttatttgtgccgaggagtctactgaatgcttggatcattgtattgtatcttctctgtcgtgcggtatcttgttgaatactactactgtgtcgtggacaaacggacaggctgtagagaggagcgcggcgtgtatcacgcacgcgcagcggccgcccctggaagctgcgaagggccggagcccgtggccggagcatctacaacatcaagtcacctagagctccgatcaagaaaaaaaaagtcacctagagctaataatgtatttatttaaacctgtagatgttaatatgtattataaaaagaaatatatcaaatttggtttagcataaaagaaagtgatgtgtatataatttaaaacggatcaacggagggagaagcccgattgcttctatatcctcagtgtta

SEQ ID NO: 4353 - DNA, 6305 bp, Sorghum bicolor
aacaaacccagctatggaatacttcgaaacctatccaagtaaacaaagttggcattagtgattgcatttttattccaattaaacttaaactaatcttgaaagtgtataaggcaaacaagtacaagaagtatcaactgaaaaactgcaacaaatcagttaaaatgctgatctacacatagaactttgcattattgcaaatagatggcagcgccaactgctaaacctaaatatttcgggggaaataaatgataaatcaaaatgaatttggtaaagagaatgatgtctgatgcacaatcactcattatagaataacacattgagaccaatttttgatatatccacagtatatgtgatagaagaaacaagaaagtgaacatgtatattcaacgtaccaatgttttgaaatcatctgccatcaagttgacgtttgtctttgtccgacacaaaacactgcaagattcattcaaaaatgaaacttaacaacaaataatgatacatgagtctgtttctatcaagttaatggatgtaaacttcttctgaactgcaattgttacattttttacaagatatagatttgactataatgaaactaatatagccaatatccacaaaacacacattatcttgttgagcttgtaattcaaatcttctcagacttgactttgcgacaacaacagaggcaattattgcaaaactccaggcaagtacagggcaaaaaaaaaagtttaacacaacccatcaaaatatagtctgacctgcttggcccagcctaatggagcaaagggaaactgatgacgttgggtgtgttatacatgaaaaataatgaactaatacacagatggttaggtaaccatgtgcttatcctgtactactaaatgactagaagtgtcttctgagtacttgcatctctatttctaatctacacatagagataagtagacatgcggtccttgaatcaactatatatgtaaaagaaacgaaatgccatatactatttttggaatttggtgtctttcttttacccaacaaatatgataatctatagtttaattttttttattatttatgcaattttaaaaaatgatgcaaataaagtggtcgatttgaccaaatgcattccatagggtgtttcagagacgcacacaatatccaaaacaaaatcataataggctagcaccacactgtttctgtcacttcaaaatgcagaacacctcgctccaatcatcgaatactatcttgagtaagttaagatctgaattggtaccacagtgcaatttaagcaggtcaaaaaattgtacactgaaagaatgcaccatggaatataacattcttgcacacacattcatatttcaacctgcatctgcatcttgagatggcaaatatacgcttatgttggattaccacagtgacttcactgaacatgtgccctacacaagttaacataggaacaatagcactaaacgcagcgagcccgttgtgcggcgggtagcaattgttggaggtgcttacctcagaggcaaagcgatcctgttcttctcatcggagacggacaccccgacgtacttgctgccaacgtcgagccccagcagccgggtcgccttattcttcgacccgacctccagaaccttccgaaatagctcctccgcttgcagcagcctcattgtgtacctccgccggaacaacgcagtgggcgataggttcggggcgacggcagagcagccgcgcaggcgtaggcaacggcgagcgcggacggcggtggcggcggagttaggggaagggatgcagagacaagaagtaaaggaactcaaactaccaatttggacggcctagattagtaggataaccatctgatggcagatgggcaacggcaagtacaaactggatgccccaccggccaccgcactagacaacagcgccccgctcagattcccgtccctcgctctcccttccaccgagacctctgcgcttcggtcgttgcggaccgcaggagtgaagattccatggcggaggaagtggcgcaggagcaaccgagacccacggcgccacgcccggtccgctgtatagtcaagctaggtgctccatcgcgccctcctcaaggactgcttggctccttgtcgtccgtgccttgtagttgtagctctgtgtactcctctctggcattggttgatttgagaagctatggtggggtggcgcaggtggagcggcgattacgaacaagggcgagctggagagcatcaacgaggagaacctacggtcggcatgtgcgcagctgcggcatgccatgtctgaatctgacggcgatggcgccacggagaaggttctggggatggactggagcaggaagcccggagatccggccgacccggccgtggacgcggagtggatcgcggggatggctgggctggggctcgacactaacttcatcgtcgtgcacggcgccggtattgttcgggctctgacatcttactgaattgactcttgctgtctgtcttactcctggttgattttggtgtgttgtagacggcacataactgttcatatttttgttagaacttggaagcttggaattatttagcaaggaacattgcacaaatgcctctcagtggaagagcaaccgtgcacattggactgcccaagtttagacacaactcaacagtagtttcgatgttacgggtctacggtcttcctgagagatattctaagaaactggagagattaatcaatttatttattacttacaaactattattagactgatacattttattaaggtagagcctaaaacaatagtagataaatatagttttagccttttaggtcttaggatactgagtttgtgatattctgcttcagggtcttttggccacttccaagcaagtagatctggagttcataaaggagggttacattcgacactggtgaaggctggctttgtcgctacaagaatttcagtgaggccaattctggaattctatttgacgaggataacttcaattttgatgtctaatattcttgtccagcatcttgtcaaaatggttgtgcttctttgataaatattatgtaagtatattctaatgcaatatttttttttcgaatttaggtgacatctctcaaccaggaaattgttagagccctagcaagaggtatgcaattttttaggttacttgtccatgtctttatttccatgtggtattatgccaagtattagtcatgtctacttatgctctctattttgttatttctcatatagatgttgcttaggctctcagaattcatgattatgttccccccttgtctgcagtaggctatgctatgtttccttgtgcttagtttgaacatataattaagttcctatttgacttatgggccaatgcaaggatgtatcatcatttgttatgaaccatctctgcctgtattcgcaaatcttaatgaacatccaacaaatcaaccggtgtatttgcttgcccctaaatagatcttgaattgtttactagattgtcagttagaaccagtggtgggcacaagacttatggaactgcatattcttttgcagaaggaataccatctgttgggatgtcaccatttgcttgtgggtggtctacccagcaaagaaaagtaagaaaacttgaaaactgtttctttcttgcatatcattctgtatcttcttggaattagacagttgttttacatccatacctaatcctgttaatatgcacttgcagcttgcatcagcaaatgcttctcaaataattcagtcactccatacaggctttgtcccagtaagttgttgtaccaaaggttctgaaccactattccttcataatttcatattatgaaagagagggcctggcgcggtggaagatctctccacttgctgcctggagatccttgcaaaattaagcaagggtaaggatgtatagaagttctcttccccagaccccttctcttccccagaccccttctcttccccagaccccttcttctgtgggagctttcagcactgggtacacatgcctgaagttgttgttagcatgtgtgatataattagagtcacccccatattttacagcatatggtgctactgaaatatgtatcatattattaatgatttcttatacatgcgctattttatgcatcacttaatctagattgtactggcagtctggtactcttgatagtcgttttcagcacatgaaatgataaaacaggtcttgtatgaattatttagtattaattataagcataggggaagcattagataagttccatgtgctttctctcatctgcagctggaatctaaacatgatcagaaattaatatgaacttttgcttatagcataacacccttgtttcttgcaggttttgcatggtgatgcagttcttgatgaattactggtgagttctcaaatcaaagcatgtctacattctcgtttagattttatggactgtgaagttaattattttattcaaactaaaattgatattatcattaaatgaccaggattgtaccatattgagtggggatgtcattatacgacatcttgcacagcttctaagtccaagatatgttgtgtttctggtactgttaccttcccaccttaacagcttaaaaagttctctgttatcgatggaagatggttttgtacactgtattctttaattgcttgtaccgtaaagtttgttgtgttctccttttctcccaagcatacttcaaatgttccgttcatttttttctataaagaattgatatatggttctctgaaaattgagatatagacagatgtccatggagtatatgatcgccctccaactgacccaaatgcagtactcctgaaagaaataggttagtattcacctagttgattttcatttgccctgcccataatatctggcctttactgtttgatatggattagtcattatgggaggaaacaggacaaggaaggtaatgcaattgccatcattcaagtgttgggtaaaacatgttaatatgcttattagctgacttgtgctagttaacagaggtggatgacaatggaggctggtcgattgtcaaacctgcattgctgcaaggcaacactaaaggaggtatgttgtattcctttttatgtggattgtgattgtcaaatggtcctaggccctaagacgtgtggagttgtattgaggagttatgctccttgcctccttccaattccaagtacctggttcagatagtttacaagtgccaactttcttaatggcaacccaggacaactgaataagcattgccaacctagttttttcgtcaccattgagaatgttcttcagtgttttcaataacgtgacattaaatgctcctaatgaaggcgcagtggttaagaagcgaactgtaggatcaaactatggtttattaggttgacaactagtgacaatgatggcttggttatatttcttctaaacttcttgttgtagcctttgtgttttatacagtaagatatatgtttccgtgtactgcagttgagatatcagttgcagcacatgacaccaccggtgggatggagaccaaaatactggaggctgcagtgatagctaggcttggaatcgatgtgtatattaccaaggtgcgaatgcttggttccatttttccattttgaaacatggaagaccaaatttttagcttttttttctgaatgaacatgacccaagcattattcaatgttttatgtgatgtaggctggaacagaacactcgctgagggccttaaagggggatgttagcaccgactcagaagattggcttggaactattatacgctcttccaaatagatttcttgttgcaaaacattcggactggttactggcgattttcccgatgttatatgagcaagtgatgagccttgggcttttgatgatgattcaacacgggtctattcctaactgtgatcgtagtttggttcatatcctgttcgtttggctgaaaagttataattgaaagtattgttcgctgatttgttgtgagagaaaaaaatactattgaatggctgacagattcggcagataagctcaagcaaatagctgattttacaaacactattcagtgttgttttgttttctgaaaagaatctgcattggtcgcaagatgcgtgacctcatttggtacgttttagtcgtttcgttttctcaaagcgatctgcaacatcttggggatagcagattttgagggctgcatcttgggctcatccaaaactggtgaagccgtgaaggagtggtcctggcctcctgggcccctggctgacctggtactggtagtatctgggccgtatgca

SEQ ID NO: 4354 - DNA, 3894 bp, Sorghum bicolor
gcctcgttatttttgtattgtctgctcatatttttaatggcatagtgatcattggttaaatgtttcctataggctatagctaagtcttgggcaaataaaattgcaaactaactgggcacatgggcagcacacttctatcaaagaaaattatatcaaaatacaaagctaaccagtgtcatttcaagcacttaccgatgtctatgttttgtttgttctgtgggacttaattcttatatcctttgtgccgttcatagggaaacagatatggttgctctctatattatatgctcaacaataggttaacatgttttcttttcccaaaattttgacccttcttttgtgctggggctaacctttctttctttttgctgcagattggattttggaagaagttcaacctcatatttcttttctttctccttcgcaagcttattttgcccttctattccttcactcttttctgcatcatccttcccatgacaatgtttattcctgaagctgagctccctgcctgggttgtgtgctacattccggcaaccatgtccttgctgaacatcctcccagcccccaaatccttcccatttattgtcccctatctcctatttgagaataccatgtcagtaaccaaattcaacgccatggtttctggcttattccagctcgggagtgcctacgagtgggtcgtcaccaagaaatcaggccgttcttctgagggtgatctcattgccctcgtcgagaagcagtctaaacagcaaagggtagggtctgcacccaaccttgattcccttacaaaggagtcttccaatctcaaaaaggattccaaaaagaagaaacacaataggatatacaggaaggagctggcactctccttccttctcttgacagcagctgctcggagcctgctatcggtgcaaggaatacatttctacttccttctgttccaaggggtatcattcttggttgttggactcgatttaatcggtgagcaagttgagtgacgggaatacaagggagagtaatgggggtatttattttgctgcgagtgtgggcaacgcgaccaaagagcacttcaggtaaaggcaagcacggtacatgattcaacgcatacacgactacacgagaagattttgattccggattaagaggggttatagttggtcagggatacttgaaacggtgaaatgtggattgtagatatatggcttgggactgtggactgtaaaaggcttgggtgtctaattcttttgtaagaaaatcttcagtgattagatgggttattttgcttacttgacggtttaccttcaaagggggatactgttggggtccatgtaatttgggcaattgctacgaacgcatactgaattactgagactgtgatacttgttcgtttcttgaactctcacttgtggatagaggattgcaacccagaaaagggaagatgttctacatgagtgcgtcagtagtaaacttagaacgcctacggtttgtgaatgctagagcctagaagggcaagtacggttgatgggaggaatatcaacctctgtctctctcgtgtcgcaacatacagtctatagcttgtttcattcagtattgttttgccctcacaacaaatcagcaaccagctacgacttattagccaagcgaacgtgggagtaggactaagcagcatgattttactgtacggtggcgatactgatttgctaatgtgttttcctgttctaaagcccgtgcacagccctgtcgacaaagcggccttcataggcccggatcacttgtgggccaacgaaagctaccttccagcccactcgtcccgcagttcggcggatcccccggcccttcctagttcctagcctcctccccctccatcacatcacggtcacggcgcctccaactccaagcgccgcctccgcctcgaaaactcttcttccccgcgcgcgctgcagcaggcggcccgaccggcgtgtggacctctcgcccgcccccgcctgccggtttccgcgatggctgccgcttcctttccaccagcatcttcctccggcggctgggacttcacttggtgagtcctccctccctgcccgtctacctccttttgtctttggccggccgtgtgccggtgcagtcagataccgtttaggcacgtagcttccttgctcagccaatttgccattacgattcctttgtgcagtgcgactgctgttgattatgtgccctgtgctagcctgcagcgccatgcttgtttcgtgctcgactaattccctcaaaagaaactgacggttattattaggcagaaaatgcctatgtgtgaatgaatgcctagaccatcctcttcgttcagatcatctttgatgtaaaatcattgtaaattctttgtattttctccatgtatacataggaaaccgtgtgtattttcatgaatgctttttggggggaagggaaactgactaaaattgtgggaatttggtagcctgtagctgtagtttggcaagtccatccttgttatgatatccagggactgaggccttgtttagttctgctcgtgaaatttctttggctactgtagcatttcatttgtattcggtaattattgtccaattatatactaactaggctcaaaagatttgtcttgtaaattacatacaaactgtgtaattagttattatttttatctatatttaatgctcgatatatgtgccgcaagattcgacgtgacgaggaatcttgaaaagtttttagattttgggttgaactaaacaaggcctgaggcaacttgatatcagtatcaattgcttgtttggtttatcgattgacgtcgacaccatgctctgatgataatttgaggtgatattttactgacatgtcaaaaaaatcatgcaatgacttgatacatgttgcccccactgccctacagcgtattttgtttctcctgcatatgatttctgggtagaacgcatagtgcaacactgacatattgcttggcagtaaccttgaagttgattatgggtctgaagaaaatgcatccatcgtctacaaaacgttagcggttgacaaggaggtaaagtagctgtgttctacgtactagtacttcatgaactcatccagttttctcactttgcaactttgtattgcagttgcagcctgacaaggtgaagagggaaatgactctatcaggcagcaagctggccgtgttagtatatccgctctgtcatccctaactgttgtctatgcattgctgtgtcaagccataactgaagtcctcgtatttttgaaattcaggcactttgcagccgtggaggcccggttcctgcgagcatcgttcagtgcatttgtggatcttatgggactcgtcacgaagcttgtcgaggaatatggtgtggccatggaagagcattcttgaatcttgatgaacaatctcataccgacttgttcgcttgagcttatctgtcaaatgtgtcagccgttcagcagcgtttttctctcacaacaaatcagcgaggagtactttcagccatggcttattagcattgcggagttgattttagtccgcctgtgaggactttggacagtctgtaccagtggaattgctcttgattttgtcaagtgaatgtatcattgtatttgaccttgattggtccaatcctatttagagcagtgaatcattttcggcatactattgtgaaatgaactttcatgcaacgttaaggcaaaatgtacaaataagaacaggttgtaatctgttgtgaaaaatcatacgaacacttctaagacccgtctttgtgtgagtttcatttgcattaaatagattgttacgtagatagttttatgacatggcagcgtatttaagaatatagagagagaagaaatgagttgacacgattaccaattctttatgaggct

SEQ ID NO: 4355 - DNA, 7676 bp, Sorghum bicolor
aatataattacatgttgtgaaactatataatttttaaaattgatggtcaagggagaaaaatgtttaacttaggagaaagctaatccgatatataaaaaaggatggatggggtaaatcatttaacctgagggtggcaaagtgggccggtggggtctatggtcacgtgattgtctttttgtggtattgtggtatggcaatcaatcgaacatgcatgtgggaaacttaaggacatgttgctttcactatcgtattatcatttcatttcataatagatacatcaaagatcgaacatctatgattctatattgtgaaaaaaaatggagaagcaaggacaagattctaaaccttaagctcgtgatagagtttcagataggagttgacaaatagaaaccacactatgaatttgaaccggatactctggcgtgcattgtagtttgcatgtagtatttcaaactgaaaattgtgacaatggacaaagaaaacacgcagcagtgtttttttgagaggaaaatgttttttttaaagaagtaataaataaatattgtcgaactcttatgatgtattgcctccattctaaattctaagatgttttcaaacatacattatttttactatttattaaaatctagaaaaaaccaaaacatcttataatttagaatggaaagagtagcatacatgatttggcaaatacttaggaatgtatacattgctttatagcagtttgagcttaaagatgagtctcaatgaagatttcaccatcatcattaaataaggtgccaaatagcggaaaaaatggatggcatagttatggcttatggaaaggtaagggagtggattttatttggatgaaacttagtaccgtatgtactaataacattagggcaaaagttctgtttcattgaatctatgtccaatcagatgcaccatattaattgttatgaccagcctatgaaataacaaaatcacattacgtattggagggttttttctagcatgaatgctactactctctcttttctaaattataagtcattgtaactaaatatatagtatgtctagatacatagcaaaataaatgtaaaaaaaagttaaagtgacttataacttagaacgaagaaaacagtactgagaatctctatttgacctaatagcatgagaaaatccaaactttataatagctcttttttcctctcgaaaattaaaatttaccggaggtaatgctttattttgtactgcggctttattttgtactgtgattggtatgatttctgtcctcatatttttctctaagttatcttgtgtaataaaaaaaacttgacaagatcgtcagagaatcgaatccgaggaggaagcgctcacactcagaggtcgcctagtacagaggatcaggacctacttcacacacccattccattaacaatggaccctcctaccattcaccactaaccaaactgctagcccactgccaaatccacacccaataccaccattagtgagacaaacaatcatagaggagagagaaaagcacggtactggagcagcacagagctagattagcagccacaccaaaataatataaatataaaataaaatagactaagcaatcctgtccaaactaaaaaaatgcatcctatagaaagagatagagaaaagcaccattcacacatacaaataacataagagataaataggtgagaatgagattgagtgacatacaagccagactgaaagccctctttctccctccctcatgatcttatcccttctttagcatctcatctaccactgcgattgccaatctctctctagtttccccacctcttcctctaatccccttgacgtgcctcggaatttgagatcctatttttcagaagcctgttagtactacctcgaaggggaaaaatgaattcttttttatgtaggtttccatgctactagttttctttgggagccataaattcacctgccgcgtctagtatttcggaaatattttgtatttaaagcgagagagagagagagagagagagagagagagaggggagagagagaagtaagcagcagccgagtccgagcatctctctatttccctcgcccagctctcagatccgaagcccggaaggaaatcgcgccaacaggccctagccccagatgcgcgccgccgcttgctacaggcgctgctgctactgcttctagggggtcctgcggagatgctgggcgtcgagcccgagggcagaggcggcgcgtcctcctccgccgccgcaggtgaggctcctggccgctgaatccgctgcgctggtgggtttcttgccgcgttggtctggtcgccggttcgttcggttgttggtgttggttggctggttgttggtgctgttcgggtcgatttggtgggtgctctggtcggcgcctctgttgcggtgtttctgatgcgaattttcggggctacgatggagaattgttccagtgaggcctttgggttcaagaacctttaacaaaaaaaatcgttttttctgctggaattgtttcctgtgatgttcttgcgtttagttcgtggttgttgctcgtagtcagggttgaacatagtcgcctcttgacgatgctgagatgatctgacgtttcttggtgcagagaattttgacgctgggcagtatgccttcttcgggaaggagccactggaggggttcgagctcgggggcttggaggaagccggcggcagtgatgccaatggcggtggattcagtgggccagatgaggggctgtaccggctgaactctgttggagatgaggtgcagattccagaaccaccatatctacaaagttgccatattgtttctttataaattgtgtgcctaccgttcctcgcttgtgcgtttggttcccatgtatgctttatttctttctcggtacatgtcaatttttgcatggcctaactgatagtggaagattagtgcggggagcaatccagaatatattcctgtgggccgcaaggacaaaatttagtggaattgaggttcacatcagtagtgccccaaaattgggcacttgagtgattgtagtggaatattgtgcgcttgattgtaggcaacctagatgtgtggaataatggttctaagtttgcttggtagcacaagagcttagtttggattgggttattagcttcatttggattgagttattcacgacagagacggaagaagagtattcttgcacacatcattttgttgaattgttaagacactgttgagaataactagaacattgtaggaggtgtttttttaggaaagggtagtaacactggatgctctatttggatgaagtgacaataatgaaataaatagtgttcacagtggcctttcttgagattttggtgtggttgagcttctccaccctcaaatattttttcaggcacaaactgacttatcttctgtgttttgggatccatatagttgattgcaaggataaccataaggctttgttttacaatgaagtgcatccatagtactacttgttgaaatgtagctaatgacaaattaacatatccaacttttagtgggtacggttaattacttggaattaacaagcacatctaaaactgtcacttggagtttattatgatgatcaaagtctacataaagtacttaatgatgaagtagctgtagtgttcaacctttgatttgataacctttgaaactgatgttctattgaggtgcatgcatgtgtaactggggtccctccctatactgctgtacatgacacttttttagtgctttgatttcttttcattctgaattctgaagctcaatatttatacactcacgatatgtttcaatcccaactattgtgctatgcagattgatgatctgagtaacctgtctgacattgatgatcttgcaagcacctttgctaaggtatgtcacttgttttgaaacttaactttatctggctttggtgtatttgctttgatgagtcgtatgctcccttttaatagcagatgtttctgggcccagttatacaagtagctagctcattcaaatttgtatctaggcatttgaaacgatatgagaagaacggttatacatatatttttttaattgaatcgatctgagttctgaatggaacttgagaccataattcaatgcaacctttatgcttaatgatatccattgaagttttcgttatcgccatagctaacaggcttttattaggccatgtaccagtgaggcagtgctcccagcaggactggataatgacacagcttaaacacatgtttgcacttttggcatgacaatgatatgaatcatgacctacatttttcaaatcttaggcaccagttaaagctgttttgctcctatattcgtaggctgtagcaattgaacatggtttaaggatgatattctttttctaagtaatcttgtattgcttcctcatggattggtttatggatggctttgttttagcctttccttttgtgcttgcttgctgttatgctttctttctgttacttggcacacactgaaaattcacaccttttctggcagttgaaccgaagcattagtggaacccggaatcctggtgttattggggacaggagatccatttcacgaggaagtgagtgatatttcttcccttatggcatgttgctctgaggtgtaatactatggtgtttattttgtgttatgtctggtctgaagtcacatgcccaaactatagtggtttcggaattgtcagttcgtttgttgactatatgttctttctgctgtgccttatagtttgattttttttaatatatttttaatattttttgtgtaatgtttagcctgagcgaggtaaggaggctgctttgtatggaactctttccctttttctctatttattaatacaaatatacacatctctcctgtgtgttcgagagaaaaaattagcctgacatgtgtaactgtgaatttgagggaatcttattatatcaagagtctgacataattattgccttaagaatttttcttttgcagaattatctgtcagataatcagatttcatatatgcctaagtttcattttttcactgaaccatgcaacaaccttttcaggttctttaactgttgactgggctgaggatgtggagttttcaaactggggagatcaagacgtatttgaaaatgaggaattccacgaaagtaaaagatggtggtcatccaattcttcagttcagcaaggggattctaactccagaccactaagtcgaacatcttcctaccctcagcagccactgcagcaccggtcaagtgaacctatcgttttaccaaagacatcttcatttacctcattcccaccacctgttgctgctgctggtggtagatccccttaccctgctcaaggccttacacgtcatgggagcattccatcaattggtgctgggctccaaatgggttctccaggcatgtcactttctgcttctccataccatatggtcggaccatctcatgggctgccatacacaggaggaatgccttatggtgctcttaacctgcctgtaaacaatcctgtgcaaaatgattggtcgaaccatggtaaccctttcactggggaacatcttaatctactgcccaacttattgcacaaacaattatcacttcctaatagcccaatgccatcactcctgttttctcagcatcagcagagattggcacaggtccaatcaccccatcagaattacctcaatataactccacacctgctatatccccatcactctgcagagattacaggcaggtttgattctgttggcagttctcattcatcaagagacaagagatcaaggtcggggaggggaaagcatagccttcgcttctctcaaccaccatctgatactggtagccagaatggtgacagcggaggtataaagtttagatccaagtacatgtcatctgaagagattgaatcaatcttaaggatgcagcattctgcaagtcacagcagtgatccttatgttgttgattactaccatcaagcttgtatggcaaaaagaggcgccacttctaagcaaaagaccaatttctccccaacatcaatgaaagatataccatccaagtctcgatccagcagtgatcagcacacatatcttcaggttgatgctcttggaagagtatctttctcttccatacgtaggcctcggtctcttcttgaggttgaccatccttcatctgctgatggctcccatgatcagaagtctactgtgaggcccctggagaaagaaccaatgcttgcagcaagagtcactgttgaagatgccctttgccttcttcttgaggttgatgacactgaccgtctgttgcagtctagccagtcacaggacaacattttccaactgaagcggagacggcaagtcctcctggaaggtctagcagcatcactgcagtttgttgatcctctcggacccagcaaatctggtcattcatctgggttagccctgaaggacgatgttgtttttcttcgcattgtttctctgcccaaaggacgtaagtttttagcacgttaccttcggcttcttgtccctggcagcgagttgacccggatagtatgcatggcaatttttcgccatttgaggttcttgtttgggggtttgccatcagactctagtgcagcagaaactacagttgctcttgcaaagactctttcatcttgtgtgcatcacatggaacttggtgctcttagtgcctgccttgctgctgttgtctgttcatctgaacagccacccctgcgccctcttggtagttctgctggtgatggggcttctctagttattaaatcagtactggatcgagcaactgagttactgactgatcgccatgctgcagccagctacactgtgccaaaccgtgctctctggcaggcatcgtttgatgctttctttggtcttctaacaaaatactgtgtcagtaagtttgaaagtattcagcagatgtttgtcatgcaggcaccaagctcaggaattggacctgaggcttccaaagctactagtaaggagatgcctgttgagctacttcgtgcaagccttcctcatacaaacgagcagcaacgccagcggcttcttgattttgctcagagatccatgccagtaacaggtttcaatccctcaggtgctagaggtgggcacatcacttcagaatctgttcctggttgatgtaaccgaaggagacacacaagggcaaagagtcaatgcttttaaacattgatgagctggtcttcagctgataattattgtatctgaagacatgcatgccccattataagttgtgagcgagcttggagaagttccatttgctcaggaaagtagccttcacttcaggttgtgacgtaagtttaggtttcagagtaatcgaatagaccagtgaaatctgccttatgtgggtcatttaatatagcacccacctgatgatattataatagactatgcatgtacgtacctatactgttgtaactctgtgcagtgttgaaactggtggtcatggggcattttagtttttaacatttatctgctccagcgaagaagaccattgtgggcgtagtttttagcctgagaagaagacctctggtgagcgggcaggcacatttgcattcctaccagtctagcagtgattgtacaggttgggttatcgcttatcagggactttctgcttgtta

SEQ ID NO: 4356 - DNA, 14078 bp, Sorghum bicolor
gctagtgctagaattgcttcgccatttgttttactaactcacttgcttagtgaagtttgtagaatttttaaataggctattcacccccccctctagccatttggacctttcaccctctcggtcccacctcattcctccttcaatcagttgcgccaccactagcctcgttggccccttcttgccctggcatggccatcacgaccctctccacactggcttgtccctttaggtactagcacggtgcgtgcccccaggctcgacaaggctagcccccagcgaggcagcaaccctggttctggtcatgctgctcaccacacccgctgcacgctactggtgattcacgggtgttggtgttggtgctggtgattcgcatatggacgcgatgccatgagtcccacgttgaggaacttgagcttagtctggcgaggagctcgcggatggagcttggccgcacagttctcctcacgcgccatggcttggatgcaccggtgagctcctctagggcaccccatggttggttggcgagggcccgcgcatgcgcggcctgcgaggaactaggcgtgtgcgtctgtctccactaatgaggctacatggccatgctcgtcgagatccagagctccctttgccccactcggcgaggtctagagctcccttcgctctcgcctcaccacccaactcaagttcttcgtagctcatcctcacctgtttgtgtgtccatgttgtcgttaagcagctgccataatgtgcctccaacaagtggacgtatatggtggaggagcacgtctagttcacgaggaaggtgagctgcatgtcgacggtggagccccggagccaaacattggggggggggggggaggtggatgatggcggagtaaggtgaggtgcgcatcacatattcgatgaaataccaaataggggtaactttaccatgtgaacgaggaggtgattctattccaacaaaactaactaatcaaacatataaaaacttagccaagcttaaacaatctcaacaactaaacgagtgcttgttggcctgtataaacttgggtaagtctagcatgactcaaaaagttagccactaagaattaaaaggaaccaaacacaccctgtaaattgcgaagtaagaacatctccagaagtttggtatactttacttgctaaactaatcaatttagcaagttaacaaaagaaatagcaatcttaattttgtttttctccaacagtttcctataataactttctaaaagttatagtagggctcacatttaatgtttttttggtttattgtgttaataaaaaaataaaaaagaaaattacatcttttgtcgacaccgcactgaagcgagcactagctctgtacaacaagcaaggcgtataatgcaagtaatgaacatatataaagatagaaagctatgcatatatgaaggcaacatgctatgcttttaaaccaaagatcaatagcacccgcgaaggcaagcacgaagcaatagcagcaatggagattgtacgtgaaaatatccaaaaagaagagatagagagttctcttgaatttagaaatttatgagtcgaggaggatagttgataaatttctatttttaaaaaattattttatcaaattgctaaagaaaactttttttactaaaatattaagatagggagtttggtgagttgtttcaccaaactcctttgctaaaactcacttgctgtacttcgcggtgaacgggcttaccagccggtctaagaggcaaccggcccgtttgtgacttccatccgtccaatccaaaagcccaaaatgtgaaactggcagtcccgcacgcagcttttatagcggaaaaccctttcttctttctttcgtctttgtctctccccttctccccttcgccttcctccttcctaaaccctagccagactgtcctaaatacgctcctctccgctgcgatcgctgcagcgatccgatctttcgccggtcaccggcgccggagacgccgggctccataatcatggctgtgtcgggcgcccccgaggtaaaacttctaaccaatctgcttacgtttcactatgacagaccagatgcttcctttcaggaaggaatttgcgatccggggttggtttggaggctttgattaggtttgatttggttggggctgcgcgtatgacttttagacctgtttttcatggttcttggtgtttgcagcagccacagcgggagcagccacagcaggaccacgatgaggagatgctggtcccgcatcaggatgccattgaggggccgcagcaggatgttgttgagggtccgcagccgatggaaggtgagctttttagttgtcatttgaccttgcatctattggagtttttctttgctaacacatcatctttgaagcactccagttcatttttgtttttcatggtgatatacggtacggttagggctatagcacagttctttcacaaccataacttttatgcctggtttctgccactataaaaaatagtgcttttaacttatgttgctttaattatgattttggaactgttttcagtggttggttttgtcaattatcgttttacccctattgaaagaaattatttttcattgttgcaatgttttttcatcatgttttatgagtggaacctatatgttgggtgttactttgcttctacgtttttactctcagaaactatttctgctcattttgtaaaatttcctgaatattattattctaaagcagtgattgaatactgcaacaatatatgctaaaaaagatgcaagtgcatgcatggctcctacaattattcttacacatttgaaactataaactacaacttcagggttatttaactttaactggagcacttgatgtagatcatacattctatgctgccttgtaaagagcattctgttcaggtagtgagcattttacttttacctatgtaattgatactgtggatgaagtacaatgaaagtaaaatgaaaaccctgaaggatggaatgtcccattacttcttgtttttctccttgcttcaatgattattactttctttggttgtattgcagaatctgcatccgctgttgagaaccaacttgtgccagatacctccacatccagatttacatggtgtattgaaaatttttctaggcgcaatgttagaaagcactactctgacgattttattgttgggggatacaaatggtgagtaaagacatatgctcattgcttctaactgtgtattagacttttatagagcttggttcggtgctttttgttgcctccttgcaggcgagtgcttgtcttccccaggggaaataatggtgaccacctttcaatgtatctggatgttgctgattcaaacttgctgcctcctggttggagtaggaatgcacaattcagccttgctgtggtaaaccaattagacagcaaagcatcattaagaaaaggtatttcctgttatctctcacccagattatacatctgatatgtacaacacatcctttagtgttcctagcaacattactgccttttgggggtcttgcatgaacataagtgtacattcacctagcaagcgtgaagttggctctgattgtttatgaagatgaatacttttttttaatgttatcattaccaatgcttattttttctgtcttctgtgacagttctcaagtaaacaatggtctttttattagacattatagaaaagatgttatatatgttccattatgttaagcatttcttggtgttattcttatatgctacaaaagggtaaatatgattgtttcgaattatggaacatgatggatcagggtaaagaacaatacatacatgaagataaagctccaaacaatgctgagcaagacatgttgagcaataaagaacaaaacatgaggattggcacaaatgctttatgctatgctctgtgttatgcctggacatgttttgttgtgtattcaactgaaaagtgggaaactaaaattttgaaactgttaaaaactaaggataagaatgagtctttatggcagataagagctaaggaagataaagctttgagtcgacaaaataaaaaggagaaagaaatgaacctgttatatggagtaactagcatcttggtttcctttcagtttaggttggctggttttttcttttatgatcaagttgcaatctgttctgaatatagctttgttgtcaacttgtcatgctaatagatcggtttttattaagtatacattgtttgacactatttaactgtgattgtttgatgtgctccctcctctcccagaagcgatacaccaattcaattcccgtgaaagtgattggggttttacatcttttatgcctttgttggatctgtatgattcaagtaaaggatatgttgtgaatgataaatgtatcatagaagctgaggttgctgtgcgtaaaacttttgatttctggaactatgactccaaaaggatgactggttatgttggcctgaagaatcaaggggctacctgttacatgaactctcttcttcagactttataccacattccctactttcgaaaggtggggaaacatttctattttttttcttactgttgatccttaagtgtggcgctgatactgaaatttatattttaggctgtatatcatatgcctactacagagaatgatacaccttcagggaacattccattggctttgcaaagtcttttttataaacttcagcattgtgataacagcgttgctacaaaagagctcaccaaatcttttggatgggatagctatgattcgttcatgcagcatgatgtccaagagttgaatagggtcctatgcgaaaagctggaaaacaagatgaaggtttgtcatccaatttttttttttgaaaaaaagcctgactcttatattgatgtgcagctattcttctctctcagggaacccccgtggaaggagcaatacaaaaattgttcgagggtcaccatatgaattatatcgagtgcattaatgttgactcaaaatcgaccaggaaagagtcattctatggtaggtaaaggggaaatatgaacttgtttttagtgttttattagttgacaagaggcaatactcaatagcatacttgtttgtttacttcttttccacagatctcgcacttgatgtcaaaggatgttctgatgtctatgcatcatttgataagtatgttgcacaggagaggttagaaggcgataataagtatcaatctgaggaacatggtctacaggtgaattaatcttggcagttacatttagaaccaccaaatgttgtttaaaatggtttgtatatgtgtagcatggtaatgtagattgtgctgatacacatctattttgtttaagtcaccaaccttaactttaggtttagacattatctaattgttttttgggttattaagtgggccctaagttctaattttagaagcattaatgagcttaataagaaaaagatggcatagaatgatagaacaaagttactgaagatgattacgattttttgctctttgcatgatttttttcttttttttttcaggatgccaagaaaggaatgctttttattgacttccctccagttttgcaacttcagttgaaacggtttgaatatgattttgtgcgggatacaatgctcaaggtctgtacttgaccttttatcttttattagcctatcgcggttttccctttttcatgttttttatttaattgtggtggcttcaatcacattagagaagtttacgttaatgtttgataggtttgaggtcttgaacatactagtgtggtcaaactataactgccaatattgcatttttttacatttagggttcttgaactctttgagctgtcagctgtcatattggctcaaacttttgaaacataacaaggctgaagacaaaaatattgtacacggttctttctggagcattagagtagctaaaggttccattgaaagaattgtcactgtaaagatattctaatgtagttttgggatggattggtgaatatcgttatcatctgaggcatgcattcaaaagtgtctatggctgatttgcattcttgcttcttttaaattaatttggttttcatgatgtagataaatgaccgttatgagttcccacttcaattggatcttgatagagatgatggaaaatatctttctccagatgcggatagaagtgtgcgtaacctatatactcttcacaggtataatagttcgataagcactccacttgcatatattgttttgttttattattcggaaaaaattgcaggttactaaatactacgtgagaacttacatcttacctatattaagttattaactatgctcaacttattttagataagttcatatactgttttttccacttgtaagttataacggtggagtagctaacatggtggaagtgtgatatttcttaaatatttgctcatgacactaatctgatattcacaaattctgtagtagctggttaggtgtagacttatgggttgggttttcaaattttgagagctgtttggatattttgtagtgatatttgtagctactctttaatgcagcgtgctggttcatagcggcggagttcatggaggacattactatgccttcattcgcccgaagctgtctgatcaatggtacattcagtttgatatttgaatctaactgtttttatctttcactggtactagatcacatccttgttttaacccaacctgaaaaggcaattcaagcaacggttattgatgttgatcgctgatctaattgtcactcatgagtcgacctcagtagaaagatatgcataagcaaatttcatttcgtgactatctttttctagcagctaagatgggtgttcttatctaagaattatctgctctacattgaacaataactagagggagtgatttgtaatccatttagttcgcaattgaaaatttaggtacaagtttgaggatgaacgagtgacgaaagaagacatgaagcgggcattggaggaacaatatggtggtgaagaagaggtaatacatgtaggcactaagactttttcaattaacttgagtatatgatgtttctctgagaattctttgttgcagcttcctcataccaatgggcttaaaaatgctcctatcagatttacgaagcattcaaatgcttacatgcttgtttacatccgagaaagtgacaaagagaaaatcatctgcgatttagatgatgaagatataccagaccaccttaaggtagtacttgtttattcaatttttaaaaaatattaaatactccctctgtcccccgtgcaaaaaaagcaattctatgctttgaataaatcaatattttctagatttgatcaacatttatgtctccataatcaatctaatgacatttattcagtatcataaacatttgtaagtttttgtatatatatatattttggtcaatcttaaaattgtcatccttgggaagtgcgatatgcatctttctaggatgagggagtagtagagtccatagagtttgtcttgatgtcacagaaatattcccactttcccaggttaggttaagaaaggaacaggaagagaaggaatgcaagaaaaaagagaaggctgaggctcatatgttcactgcattgaaggtttggcttttttttgtctgttacataatctgattggactatttctcatttcttaaacaatcacttaggtggcccgagactctgatttcaaagagcaaattggaagacacatgcattttgatctcgtggactttgacaaagttaatagcttccgtgcacctaagaacatgtcaatcaacgatgtcaaggtacttcgctgggccttgtggtttgatattattatgattatgattattgatcttgtatgtttagattagtaagttacttccttaaagttaaataattctgtgatgtctgtactatccgttttacattctactatggactgagtatttggctgcaatattaggtgtttccatattttttcaagtgttttacttgttatattagaatttagtccactgcaggggactgttattcccaagtcaccaaatttatactagaaattgagattggggatgggtagttggggtcaggttttggggttttacccatttgtgtttgtagagtgtgttcactggtttgatggtgcacatcgaatcgggatgcctgcgtgtcaggagtgcctctattcgtggtgtgagtcttgcagtgggggtgctgtgttggtttagtggccgcgttttgggggggggggagctgtgtcaaaatcaaagaatatggcgccaggtggattggagagagagagaggaaagctgttggtggcaataaggcagaaggaggcagtacatgtagcgtggtgggtggaggcagggcaagaagaaatagtggagagataggcggggaggataatattagacgagggagggtaatgggagccattggattttgatctgtttttttttaaatgacttacaccaacataagtgacctgatgaggaaacatacccttttgtgtgtgtcagggtttactatattttgtggccattatgaatccaggtgcatattttattacaatgcaatcaactaatcatttcttggagtctcatcctgctcttgcatctgaagtatatttttctggagttatgttattgaacttgtttaaaaaaaattgaacactaatatattgtccaattatggactaactaggctcaaaagattcgtctcacaaattacaggtaaactgtgtaattagtttttgtttttgtctatatttaatactccatgcatgtgccgcaagattcgacgtgacagggaatctaaaatttttggcaaaactttttgggaactaaacaaggcctaacattgctagagtagattgggctggccaactggtgtaactgcaactatttattgctgttgttatattctagcaaacaaaaaataattttactggactgctgttgtaacaattgtttgggatgcactctaattgctattgcaagatcataacatggccttattcttttttttgtaatggcgagaaaaggttttccatgatctcatgatgctctcttcgcaggaggagctttcgaaagaatttggcatcccagtagaatcccaacgattttgggtgtgggcaaaacgacagaactttacctacagacccagtcggccattgaccttcctggaggaaacatctgctgtaagtggaatgctgcgttaattaagtgtttaaatctttatttattttgatttgttttcctacacatgtaatataagcttggcagggttgcacttcattacgatctatccattcgacatatgtgaaaaatgctcctctgaatgttgtcaattttttttatctttttagagtaacacattccaatttttctctttaaaatacaacttgggtaactaccatttacagtggataatgaatctgcaatagttgaaaagatcaaaatagaatacttgtaacctcatgggccatttccccctctgttctcttcgaaggtaccagcttgcaattcatgaatttttggagcttagggtgggacttgcacttgcttagccttgtcatcgtgcaacctggggtcttgggcctccctcagtttctatatttgcctagaataggcagggcaggggcgcaggcaagtataggggcatgcttggatctcttgcttccctcaccttgccaaacaaagccaggtgtttggttccttgggaaaagcttgctttgctgagcaagtttgctcgccccaacaaggttttccttgccagcgcaggtgggccaaattggttgtcttgcacgagcaaggttgctcgctggctcattgctgctctattctcaagtctagtgctagggtggccttgaaattgaacaccggtgacacatccacagctgtaagtttctgttacaatgcttggacaaccagaggctcagcttgtcgatttgtgatgtcgaattggtagcagaatgccaaacggagaagtggtgattctgtcaaggcaagtaaggattcctcctgtacatgaacggcagcggaagagatggctttgatgacagaaatcgaatgctctgttgcagggtggcgaccttggcaaggttgctgcttgcgcaaatcaaagtttggcatctgcaggaatggaaaggcgggaatcgatgcctggtggcgcaatcgtaatgaaaaatagatgcttaggtgcatctgttatgtcgttgtcattctcatgttggctgcggctgtgaataaaggaggatgtaccaaaaatcacatttgattggagaaggaagatgattggaaaagatcaagggaaagagaataactgttgagcatgggaatctaacaaacaaccctttgcatgtgtagctttgctaggaaaggtgaggcaatccttgcccagctagctcatgtgggcaaagaaacaaaacatgccctaggtctcctgattgtcaatgcatgtgcttcctctctttgtctatcaatgactaaatgacatattttccaattgtatgatgatttttcaggtgcttgggggctttagtggcatgtgaaacaatatgaactgaacaattagtactacctccattcatagttataaggcatttaagataagctaatttgaaaatagaggaagtatttttttattgcattttttataagaatgctttaaattgagcttatacaatggctgtatagctcatgtcacaactcacaatatgtagctttatggctaatgcaactaatcagccaggtcctcgtacgtgctcattttcaattttttcattcattttgatgatggcatggcaaatccctatgcttttgagtactctctccatttcaaagtgcagggtgtgctagaattagaagtccaaaacattataaacttgaccatcaattagtttgtatgcaaaaagatgcatcagtggattcatactttctatcccttttagcaatatgccggttttgtagtaattggtaatatgctttaacaaaaggtaacggtcaaagtatgccttgaaagattttctcaaatgctaatatgtcttacaaaaaagtggacggagtatctgttttcttatttcgttcttgatttatttatgttgtccccgaacattattttgatatctgccaacactgatggtttctttaagatttcatttatttttatttttgttagtgttgattcataatttaagtaatgttttctcctttttttcagattgggtatctcaaagacgcaatagtggcaaagttaccaaattctgaagtacggttgttcttggaggttcatttgggacaggttaagtgattaaatacctttttagttgcttttggtcccagtttttagttgatgttattcatttacctaatcttacttctcagttgccttttgattatttctttactgtctaacattgtttctggtgtatccaggagaatcaaggaattgcttctgggaagaccaaagaagatatattaattttcttcaagctctatgatcctgaaaaggaagacctaaggttatctttttctctctgttaaacctatttgttcgtgtattttttcaaccaaccaaacaaaatatatattatccttgttattttgaaacagatatgtaggaaatttttttgtgaaagcatcaggaaaaccatctgatatagtagaaaggctgaatgagatcgccggatttccgtctgatgaagatattgagctctatgaggttagaaatatatataacttatacaatcttgaaagtatctgaccactatagtcatattggttaaatctctttaggaagtaaaatttgaaccagcggtgatgtgtgtaccaattgagagcaatatttcgttccgttcaagtcaggtttgtctctcttttctctctctctgagtactgctatagatacgaccatttcagtacactttgagtacagctcatgatccaactgttgggattacttggatggaaagctcatacatgataaatgcatcgaactgtttagatgcatggttgtatttgagagttgtacccaagtgtttgtactcgatggatttcacttttatttatatatgatgttttgttcttgttgatactatcttttgctgtacttatgccctgttatatgtgatactggcagattgacaatggtgatataatatgctaccaaaaacgctgtttgccagattcaatggatcgataccgatatccaagtgtcccttctttctttgaatatattcataatagacaggtaatttacatagcaggcttagcagaatatgcataatatttctttcgcttaccttgaattgttctatattttatacttcatactataaacaacatttgttatgtgccatctgtaattaagatctgcaatgcaaggtcattgcatgccctcctcttctccttatcatttgcttgttgagaacaagggctcatgtcaatgacaatttcttttggtggttggttagactgttgacatttgcttcgttgaaattgtagtgcttgcaaaattaaaaatgcatcctctgacattaacatattatgtcatctgaatactgcataagtgacttgaatgtcgctgtaaagatggtatagttatcgatttatggcatcgaaggacaaattcaatctgattatggtgttactgtattagtgttacattacagggaagatgattcagaagataaatttgttgacaattgacatgcagctctcctttgtagatcaaggaaaataaataaatttgctcaagttttattgttaccaaaaagaaagattgcaaattaatgtctataataaaagaacaccagatgaataaaacatggatcaattttaaatttatatgttcaaaagctttaaaaagttttatacgatagagaatactatgtgaaatgcttgttttggtagtttgaaatatcaagactgaaaactatgtaaaatgctgtggtctcttagaacagatcatattgcaaattagttcttgtttacagtgtagtccttcaattacctgcaacagaaatgtcatttttagattgatctttcttttttgttttactgctctcatttaatctatgcctcattttattttcttccttatccccctctagtaagtgagtctaacaaaactagctcattttgtgtgcagtctatctgcttctgattttttgagaaggtttatgttgctccaaataacgttactgcatctgtcatttttttggggtgtgtgtgtgggtcaggggtgacatttgacttcgtagttcagacctcttgagtgagcataattagttactagtacgataatattgtaccagacataattgtttatgatatagctgcattctgtaatgtctgattaaaatatatcatctctcgggccctcaatcttcttatttggggagttttgtttgcctgtaggttgttagatgctactggtactgcagtctaatggttcttcataatttatatttgttttctgacaattgatttctattattatttgtaggttgtctacttcagattgcttgataaaccaaaagaagaaggcttctctctggagctgtatgtgttgtgatttttgttgagtagcatccatttattgataacattgcaacaatattcacagtaatatttgaattttacctgtgaagttcaaaacgctccacatatgatgatgttgttgagaaggttgctcggcaactacgtctggacgatccttctaaaatccggcttactcaacacaacctatcgtctcagcaacccaaacctcaccacatcaaatacaggagtcttaattatctttcagacatgctacataatcataatcaggtttggactgcttttcttgagtttggggagtatattctcttcagattatatgaacttccattgatttggcagatgtgtaacattttatattatgacgtcctggatattccgttgcctgaactagaatctacgagatcactgaagatcacttttgaaaacgccacaaaccatgaggttagtttttttttcatattctgtgcaacttctatttttctgatcatgtttatgagactgtttttattgtca

SEQ ID NO: 4357 - DNA, 7787 bp, Sorghum bicolor
cttggtcaagtaattggtcatttgaaagaagacaatagggataggaccaccgactcatgttcactcatcgccaaaaggttggcaaattgaacaatttgatcaagtaattagtagttttcactaagttgagagagtttattattattattttggaataaagatgtctgtttaagtattttgctatctttgtccttaaaagatgcaagcttgagtttatattgagccaaacattttaaatataataactaatttttaaaactattaatatttatgattataaataggtaaattataaaaatatattttataattaattaatatttatttaatatttaatgtttttatagttttaatcaaattaataatgtttgacttttataaaatgagaatgcatccttttaagaatggagggagtaattactctcttcgtcctaagataaatcaattattagaacaactacaaataggccaattagtcacaacaagagtaagcaatttacctagataccattgacatattaatattaataaaagaacaacatatgttgcctcttattcgatcttgaggtatttgcagcccttggagcgtgctatgttgtggaacattttggtgtaatataccgttgttttccgaaaaaacacaatatttatgacaataaataaaaatattataaaaatatattttatagaatatttataaacttcaaatgtgttatgaaccttagaacttaggccttgtttagttcgcgaaagtactataacacatttatagctgtagcaattagtgtctaatcataaattaattagactaaaaaaatttatcttgcaaaatttatataaactatataattaattatttttaaatatatatttaataatccatatatatatgtccaaatattatatatgataggagtttttttagaaacccggatttatcacgaacccgatgtcgatgtggcttgcatttctcgatgtaaggcaagtctcagtggctcgtttcaatgcactatttccaaaacaaatctgctgacagagcatcaatgaaacgaacaatgaaacaacatccacaatgcatgagtttcaccttgacgtttcctaggctgagcaaagcatttaattactgcaaaatgattggatcacatgcaagatggtgaaacaatttagtcctcagtggagatttcatcccatttcgccgcgtgggaaacaacgcccgcggagtttcagcatggtgaaactacttccttctctctcctcttcgtttcatgtaaaaaatgcaattttgctgacatgacgctgtaataaatatgcatgacatcatgatgaaataacccccaatgagactcgtctacctgtttagtttgtcacccaaaattttttcatccatcccatcgaatctttggacatatgcatggaacattaaatgtacataaaaaataaactaattacacagtttggttgaaaattgcgagacgaatcttttaagcctagttactccatgattagcctgaagtgctacagtaactcacatgtgctaatgatagattaattatgcttaatagatttgtcttgcagtttcctgacgagttatgtaatttgtttttttattagtttctaaaagcccctctcgacatccttccgacatatccgatgtgatatttaaataattttcatcagcaatataaacagggcctaaaaagacgaaaaggcgcggcgttttgcactaatgtaatgccccctccctgattcggtgattcctctccctctctttctcatttcggcatttctgcttcccgcgctctcatctcctctgctctccttcctagaaaatccacaaaaatccctccacattcctgggttccaccatctcagcggactccggactggcatcagagagggagggagggagggagagagttgagtgagagagagagagagagagagagagagagagagagagagagagaggcgagggggctgcggcggcggcggcggcgacaatggggatccaggggctgctgccgcagttgaagtcaatcatggcgcccattagcgcggaggagctgcggggccagacggtggctgttgacacctactcctggctccacaagggcgctctatcctgcggcgaccgcctctgcaagggcatccccaccaccaggtcccccttccgccgcccctttctttgaccaatttccgctccgatactgtagggtttcttgagccgttccgccggccgcggtcacatgatgggcgaatcggtgaaatgtggttctttccatttcgcgcctgagccctttgacgtcgtggcagtcctgggaacgattgcttcgtgagggcagggcaggggttttcttggtttgattctgttgtttgggtccgggttggtgaaacccttttcgggtgggcaaaggagtgttttgcttacaattcttcaagatttcgcccgtttgtgagggggagatttattgtttgcattgcctcagtcatcgtgtaatagaaatgtattgcattttatttggtcatatcgtcgagacgtcgaccagtttgtgtggaggtttcaagcttgtttatgttggatggaggagggggtgtacaataacacaatgtttcaatttgggaaaagttagtccaaaacgttctatttacagaagtatctgcaaatactagaagcctagatatcttaatatcagaactcttcaatgagatctaagaagtcttagatgaaatagtggatcatatagttttagcaccagttctttaacatgtttggggttttactataaactcacatgcgatggttttccccttgaaattgaaccaggcatattgaatattgcatgcatcgggtcaacatgttgcggcattttggcgtcaaaccaattcttgtatttgatggaggccttctgccaataaagagctatcaagagacgaagcgggcaaggtatgctctagtttgggtttcagaaagagccaacatgtttcaactgccaatgaacatttacattacttttacactatcttaattggatctgttagatcttaaactctgctttgctatcctgatgcactttctcatgttttgtaagttacctgctaaaaatgtcgcccttcaggtcaagaaaggaaaaccttgagcgtgccagggaacatgaggctgctgggaactcacgtgctgcttttgagtgctatcagaaagctgttgacattacacctagaattgcttctgaactgatcgaggtacagttaaaatttcttgtaatgttaacacctaacagttaccacctagttaaaatatttctaacagacttgttcaaatgtttcttcaaatatgcaatgcaggtactgaagaaagaaaaggttgattatattgttgcaccttatgaagcagatgcacaaatgacattcttatctgttaataaacttgttgatgctgtgatcactgaggattcagatttgataccatttggttgttctagagtaagtacactattacaaccctacaaccctttgctcccatacacagctagatttcctttcatagcttgttatatgcccttcaataatgtacactttttctttgatgtgcagattattttcaaaatggacaaattcgggcaaggtgttgaatttcagattacacgactagagcgaaatagagagcttgactttaatggattcacaagacaaatgttactcgagatgtgtattttaagtggctgtgactatctcccctcattgccaggaatgggtgtgaaacgagctcatgcactcatccaaaagctaaagtgtcatgagaaggtaaaccctatcttctatgtgtctcttgcacatgataccattgtgcctagttagaacttaacagacggtgaagggagttcaagcaacatgtataactgcaggtgatcaagcacctgaggtatggtgctgtttctgttccacctcaatatgaagaggacttcaagaaggcaatctgggcatttaagttccaaagggtgtatgatcctgctacagaagatattattcatttgtcaagtgtgcctcatgacctcattgaagatttggaatttttgggcccatatcctttgccacacttgtatttaggtgttaaagctctttcatatgagattatccactgttctagatgttgtgaagctgtttcttgaatttagtaagccactctgtctaatgatcattgcagttgagtttagaaataagctaagggcattgccttgctagctttccttaataattcaaaaaaaagttaaaactcgaagaaactcatgaattagagcttttccttaattattcttttacatggttaccgcagaatattgccaaaggcattgctctagggaacattgatccactcacaaaggaaccattcgaggtatcttgtctcctttcggaaagaatttggactgatgcacatttttcgcctcactttctatcatattctctctctctccaagcagaaattgaatttcattgcacactgcatatgaaatgtgtgcactttaagacaaacaaatttactcaaaaaagcacaacatgactacatgaaaatatggatgaaccaaacaggagggtttttgcgttaaaaaaaagggagggtctttggagatgtaagagtattttgttagggagtgtatatgaaaatatggatggtcacggcttcatttttttggggttgttgcactacatacactttttttgtcacttcttagttcttactgcacttagttgtcaggacatgtgaattaccaatatttacttgtagcctttttttcttgattgctttcttgcagatcaaaccagagtgcagtgcacctgctgttcataaggtttgtccaaccagagagcctactgcaccttcaaatgggaggaagaagctagatttgcctgtgcagaaaaacattttgaccaactatttctgtatcctctcaatatattgcaatttcagtcatgaatacgtcacatcaatcaagttacttactaatagtaaactcttactgacatattatataaaaaaatcgcaaaaatataagttccttgagctcagtattaaaattttttgttcctagacatgtcttagatcattttataacatcttatattttccctcagtattttagcaggcagggctgttgagtgttgatataatctgtcaattttttagtggcataatattcacacctacgttgtgattgggttcattactttatttgaatttgaatgacttgtacacagcaatcaactgcctgttggattacccttgactttttctaaggcttagcatcccttgaggcaaaacggaaattcagggcgcctaaagtaacacataagcaacaaatattgaatgaatctttgcctagccctcaaactcaaggctctgatacccctgattcagtagaagatactaggttgccaacagatcacatccaagcttctcaatgtagctctgagcatttaagctctgaacctcctcaaaatgacccaatcagtgttggctctcagtgtagctctgagcgtttcagctgtgagtaccccctcgatgattcagacaatatttcacctcaatgcagttcacttgatggtggtattgatactccttgcaaggatacgagcattatagacagaaaggtatttggtacttcccatcacttcatcatctagacatatccaatgctgtcctgtttattaactcatgtagcagccacatttctatcgccctcaaagcttgtttgtaccattcaggttgaggctgactatggcaacgaaaatacaatatctacaagttcttgtttagtgggtaatactactgatttgcatagttgattcgtgattcaatctgcaaaccatgatctgaattatttggttatacaaaatcataacaatcttgtcattgattcttagcttgtgtgtgtattctctttttctaggaaatttgtcctggacatcagagccatttttacttccccataacgtggaaccatctataccagttcaacatcatactaaaagcattgtggcctctaaaaataataacattaccgtaaggagttcatacttcaaaacggtaaataagagagtttgcacagatcaagaagactatgatgttggtactggtaatctttctggagatcaactgaggaaatctggcatgttgaagagaagaaagctttctggcatccaagatttcaaagatgtatttttcttcttttgaatcatcatatgacaaccagcacctcatgtatatagctggtcctaaatatgctgtttatgcaggaaactttacaaccaattcattctgatgatagtccaccagtcgttgatgaaggtaactatctaccttttcttctaggtgataaagtcctataagttagagatgcaaccttggtgcatcgtattctttaacagtcttaggtgccttcttgatcttccatgtagttcttcctgtattgtgatatatgttcttatgtatcaaactatataagcctttcttaattcattgtcttgatctaagaaactgctgcagatcaagatacagatgatcctgatgatacaaatacaagaactgaaagaagatttggatgcaatgtttcccatgtgaatacatacagtggaattgcagaaaaatcaatggataagtttgctgcattggtatcatctttcagataccctggtccccgtgccagcggccttcgtgcccctttaaaggatgtgaagaacacactttctgtgaggtatgcagctctagaaccttttttcagagatttaaaatttctaaggaaattaagtatgattggtttacttactggagacagcagtcttgttacaataagtatttattttttatgccatgcttatttctgctacagatctattctcaaagctccagaacaaggcacattcagacgcacagcaaataaaacaggtctagggcccccttcaaaaagcagatatacaagtgatgataagaaaagtgctgccagcccccctgatattagcacatttgcttataggcctatgaaaactgctgcttctgatcaaggcaaaaccacaggtaaagctacagacagtactgatggccctgctgatttgggaacgtttgcatacacatccgtggcacctgctgtctgctatcctgatcggagcaaatatgcaggcacagctacgagaattgcagacacccctcctgatctgagcacatttgcatataaacctgtgaaaggtgctgtcagaaatttgggtgggagcagattcacagggacagcactgaaagcaactggaggggcaggagggccttctaggagccaattcaaatagaaccagtgcctcacatgttggctttcctaatctgacctgaaaaaggcgaggtccagcagcagcaaatgctgtggtgaaaggaaaacaccccctgatgagagcatttccatttctgagcaaaaggaagcatcgttcaagatagttgacattcagaccctggaggaccgcgagtggctgcagaggtttctttgtttcagagcccctctgcagaggtaccgctgctagtagcaggagctctttattttgagctcatcttttgttgtattgaagccccaaacctgtatcagcagcccctattgttgtattgaagaaagcaatctcatttgcgactgcattgaactgtagttaagatacttgtatgttcatccttgtaagtatgagcattattcagacggcatcattgaggtttcttgaacattgaaaaaacgaagaaaaaacagtttatatggtgttgtcct

SEQ ID NO: 4358 - DNA, 3428 bp, Sorghum bicolor
ggccgagcctgcattagacaatgatcttggactggaagtttattttctcttcttgacaccctcacggacccgagttcagctaaatggaccagaattaacttaacaaggccgacaggactagaaacaactttccttggcccgaaaattttatctggcccgtgctggaaacgatcctatggtcacgccatctcccacgcggaatttgcagtttggcaggggaggccacggcggttcttctacagagccctagcagcaccgcgtgtcacgtattcctacacacgtgctgctcgagtgctccagcggtccgtccggccttgtgctgctgtattggatcatgatctcccagggcctctttggctcctgcctctacttgcctcagccgcagcgctgtgctgcaagtatgacaagcaaaaactacaccaaacttttggcgagccacggcgccaaaatgaatcagcaccgtctaagcaaagtttggcacgccataacttgggtcacaaagcaaacactagttggctaaacgtgctgggctgtgtcgaaccaaagacactccaaatccgaggaggctccccaatcactagtttccagctatctgaacaggcgtaaattgcctctattctggtctgccactttgtctccgagcccttctcttgtttgcatttgaattggtggtaaatttgttgtaaaaatgcctcaatattttatgaacttggaaattaggctgttacagccatgctaggttgaagcggaaatgtgtcaaactgtcaacgtctttcgaacttgaaataaggttgccattgccatattaggggcaaaataatctggtgcaggaacatttcttattttcccttttttttctgaaatttgaaacgctgaaagaccattttttgtaagcaggggccgctagctggagattataatcatcacatttgtgcttctctctcatagctgtgacaaacaagtgttgtcctaaagaggactaaccaaacttgtcagtttaaatagtagtatctatttgtaagggtaatctaactgagctttctttgctttatttactaacaacttgatgtgacaacatattatattttattggcaatagaaagtagagactttgcatttgaggccttgtttagtttccactaaaaaccaaaaagtttccaagattccccatcacatcgaatcttgcagcacatacatgaagcattatatataaatgaaaacaaaaactaattacacaatttacctgtaaatcgtgagacgaatcttttaattctagttagtccatgattgaataatatttaccacaaacaaacaaaaatgctaccgtagcaaatttcaaaaacatttcacatctaaacaaggcatgaatggttgagtctaaattgcaccatctctcatctagaaaaaaaaaaaactatacattgggagtgctctttatggtctatatttgatcacctagaactaaacttcaattaagtgatgtttggatgccggctaactttaactatgtgatgtttagatgcagatggtgctaaagttgcaccattggcctctctcaacactcctatggcagatccttaacaagtccattaatttgaatactttgagtgatattttgtttaactggatttggtatgttttgtacgaaagtacacgatgcacgccaacttccgtccattaaacaggtcgccactgtttaaatactgtatcaacaggtactcatgtcagacaatagtactgtacctggttgctactgtttcaagccagccagccccagcagcaccagcaccactactccggctagaccatactacagtcttcatagactagttggccactttctccaattcccgctgaacctactcgaccaccagtcccccccacgccacgctcccatcctcccgctcagaagcaccccgtgctggaatccaagaacccgcccattgctttctgacttctctcgctctcactgatctccacactgcagggtccagaccacggccaccgcgatggctgcttagtgcgtccgcggcagctggagacatgggctgctgcttcagcaagaagcgcaagacccgtccggtggccggggcctccgccttcccgcgccggtgcgagcccgagaaccgcgacccgccttcgccggaggaggagacggtcaaggaggtgctctcggagacaccgagcgctaagctgagggccgagcccaagcccgtcggcaatgccgtcgtcccagccgcggacgagcgggtagtggagaaggcgaagaagaagaagcaggacagcgtcgtcgacgccgcggtgagcgacctcacgggcagctgcgtgtcgctgtcgttcgccaccgacgagcggtccgaggcggcgtcggagtcgtcggtcgcgaccagctcggtggccgggccggagcggtcgccggggaggaagccagcatccaggaggcgcccggtctccgccgatctgggcccagcgcggcgcgaccgcgaccgctccgccgcggctgcctcctcctacggcgtccgctcccgcagcgcgcgggcgtcggcgtccccgccgccgccgcggcacgtgccacgggaccgctccgtccggcgttcgccgtcgccggcggcgaagcggcattcgtctgagccacgccgcgccgccagcccaactgcgcccgtagtgcagcggaagccgcctgtaccggcaaggccgtccggccgcgtctcgccgcggcgggcacaagaggcagcgactcctcctcgtcccgcctccccaccggaagacgacgacgccgtcaccgcggcatgtgagcccagcatcccggacggcagcaccggtggcgatgttcaaggtggccggggcggcgacgacgggaaagagtcgttggagaacccgctcgtgtcattggaatgtttcatctttctgtagcgctgcgctgatgcagtgatgtgtgtgtgtgatctcgcgctatttcccttcgaaagccttcgcgctaatccagtttagatggtaatggagcagttagctgtagggcatggtggttcagaagcagagctacgtactgccgctgccaccttccgttaactttgtccaaggaaatgccagtagcttttgacttttcagaatttcagaggcgtgtctgacgatgtgctttggcaaatggcatgcttgacgatacattttgcagagtggtttctgtaatcgtcatgtcttttcctctgatctactctactgccttgctccatttcatctacgagaccctcctcaaactatggtggcatactggccttgtttagttcacctaaaaatcaaacccaaaactttttacatcgaatcttatgacaaatacataaaatattaaataaaaataaaaattaattacatagtttatctataaattgcgagaaaaaatttttaagcctagttaatctatgtttgaacaa

SEQ ID NO: 4359 - DNA, 2857 bp, Sorghum bicolor
cttatgctcatggacactagtgtctgcccatctggaatcgactggttaagatgcatcagcagatcagtctgtttttgccgtgggagctgacacctgacaaacatcttgttgctaatacagatagaatcagcagatcaaccagcatgcagtttctccagaagcttattttcccaaacatggctatttccaagcatcaaactaggcaagttgcaaactaaaatagtgaccgtgtgagggagaatggagagagagatctaacggtagaatgattagtagaaggctgaataaacacatctccgtacctctctgaacttctccagataagtgaaatgccttctcgaattgctgcagtgggtatagaccaattgttccagcagatatctccagcaccatgaacattcaagttgccactttggaccttttccattggaatttggaaacctatgaagctatttttttccaattgccagtaaactgcagtagtcaatgctcgaaagcgactcaaatatgtacagtacatactcactgtagatgttgaacggcagctagcttctctctgaaacaaaatttttgaacggtatattttcgttttttttaacggtactctctgatacaaatttgagtatgcttgcagttagtgcaaggagaagaaaaatttgtgcacccaaaagaaatactccaagttgtcattactctgtggtggcaactaggcatggactcctggagatgggcaactagtccggcatgaactctagagccgggctgggcaaaacgaacgaaagatgttgggcattttagtgggccggcaatggcaataaggacggctatccacatctatatatcagaagaacagactgtgaagtgcttttcaaaaaaaaaaaaggaacagactgtgaagtggctattccctttttaaaagaaaaaaaagtgtaaatcccctggggaaaaaaacaggacaggaagaaattaagtgatgggaaacagtgataggttccaaagaaaaggtgatgggcaagtattcgcctatgatagtattcgtctatgcagcctccatccacatcttgcactagtgttatccctccgctctcttcagttcgtcgtataggcgatgcaagcatgtcatacatggcaaataagatgaaactgtcgaggaaccataagcaaaccataaaagccgatcatagccttgaacgattcgctatgtttgtttgagactatttgtcgaatctgccagacatttagcagtgtttttctctttcacgataaatcagtgaataataatttcagccatagctttgtttcgtacttgtttgatacatgacactcgagcctattcgctggtctgaaaagtcatagctgaaagtattgtttgctgattttttttgaaaaaaacacactgacaaacgaacagagcaaggataccttggtgcattccatgatcctatgcggtcataatctttgtgcatatcaccaggatacctaacgttttgggcccacacgtgacaccgtccaggatcctagaacgtcacacaacaattaaaaaaagccaagaaaacaacgccaccggactccggatcacaaattattattagcataagccaccttgcttctgttcataccaggacttccggccacagccagtatccgttttcttatgtgatcaaacatttaagcccctgtttacgtataagtcaactgcgaaaaagaaagagaagaaacatgacaagacccgttcaagcaaccactctttgtgatctcgtggatacctgtgtgctatttcgcagaaaccaaaccaaaaccaccggacgcggcaaccacctggagataggcagatggggtaagcgggaagcctgcaattacctgtacttaggttggcatgcatgggggagactgcttccgagaacctccatggactcacgcatcccccttatataataaccaactacctccctctccatcacccatcaaccacaaccattgtcagatcttcaatcttcaccatgatctcccaggacacttccaattcgggctcagacaagggctcctccatgcagctccaggacttcctgccgttgatggcgaggaagctcggggcggagggactgattcaggagctctgcaaagggttccagcttctcatggaacccaggacaggcaagatcaccttccagagcctgaagcagaatgtggccaggctcgggcttggagaactccgtgacgatgagctcctggagatggtgagggaaggggatctggacgaggatggggcactggatcatatggagttctgcattctcatggtcagactgagccctgagctgatggaagaagaggcacacaggatgtttcaatattgatgtaatttggtccttgttacttagtagttagtacaacagaatacagtgatctttaatgtcgatttggtccaactccaatgtgatactaattcggaaacactaatgtagtctgacaaactgactcatattatgatactaacaaaaggtaaaaattatacaacaaagagcattcacttgtggtctctagggcatctcgaagcaaagatatatgctgatgtttactttgtcccgttatcagcgatggaaattatttatcctcaacagtgtgcaaatgtgcagaacaaaattttgtgaataaccatattacaagagggttgtctcattcatactgtacctcaagcgcactcctctccatccaatctagttgtgtggtatttcctgtactacagtactgttatcaaagttctactggagtatgacaaagctcaccaatctccttctccaaaagctgcacaagattcgctccagttcgcttgtatatccaaccattagttgccaca

SEQ ID NO: 4360 - DNA, 3376 bp, Sorghum bicolor
tacttgtagctctgtcccttcatagtatataaggaggggcaggggtcccctagaggacaactcaacacattacatctcatatcatcaatacaatcagacgcaggacgtaggtattatgccctcacgacggctgcacctggataaagttcttatctttgttttgcgtcaccatctagttcgtagcttgtgtacctgtctgtcgacaatctactacattgggcatatccctaggtagattgccgaccatatttcgtcgacagtcgatgacaacagtgactcaacgaacgatcctaggccttgctgctaagcaaacaacctaatcctaggccttgctgctaatcaaacaacctattctctcccgtcaaactgagcattggttgaggcactccatgtctctctaagcacacaccatagtgcacatgagtccacgatgccaacttctcttcctcaaggcatgccttcttatgcagactctgtggaggggcattgacgaatagaactgtggtaagcgtccacaatgattttgctcatgcgaaagaggttatagaatcctagggtctatgctagccgccaccgctaccgccacgcctagggcctctctccttcctctctagtgcgtctgctggggacaagaagaggagggggctcatcctttttcccatagtttttatatctagttgcttagggtttggtctaaataaatcttctagcaaaattagatgattttcagtcgaggttgtgatccatgcgatgacttcggtggttgccacgataagatcatcgttccaggtttcaatttgatcggtagatggtcaattggtggtctttatctacaaggggatgaatgtttttggtcactcacaacgaggacaactactctgggtcgtcgatcaaggtttgagggcgatgaatctacatcctatattgtacctaacaatgcaactaccgatattctttcatcgatttagatgcattttggacaggttctaaagcactggatcttgtggtatacccaatgttttgttgttagtcgttggatttagcataaagactgcactttggcttcggtatttgaggtaaaccattatgaaagaggacgatggaagaatctagatataatattatatattttttatttcagattttttttcatgtgtaattaaggaatatttgttgaaaaaaaatcacagctatacatggacacatgacatgaatctatagcgggtgactatgggtgcataggctcctaatttgttttccgctaaagagcgtgttttgcgctgtgggctcccgttggactgtacgtacaaacggcggttgtcaccgaaagcggcggcggatcgctggctgacagtttcgcaatcgtgcggcgtccgtgggcaaaacatggccatattcgattgttttccatcgccacactcggcttcacagctcactttcggcctgcttgaactgggccgcgccggggactcggggtggccggagaatgtacaaccctctgtctgatgtgatcttgatcacgcagttcctgacctgtttgatgctgcttcggccgtcagctgctatgcatggatggattccttgcgtgcatcttccgaaggcggttacggtaagcactttccttgcagtcaaaaaacaagatgcatccatgcatatatgcataaaacaaagggagggcatcatgaagtgaagttcgataaaacacatgtaccgattagttctcgtaaacaacttctctttttatttcccgtggaatattgttttctggtttctgctgctttacttttccccttttctagttctagcttcattgcctgtgtctgctttgcgtttctagtgtctgtctcgcttgttcagaaattatgtggcgccacgcaccgacgcacgtacgcccaccacatgcgatttgggcgttcgaattacgccaacgcaaaaagggcaaatctcgttctttcgattatacaaacggattaccccatactgcagcaaagcaacgcgcaacaccgcctgcactacaaatacccgcgcgagcaaggtgaccacctgccccaggcacgagagcaccaccagggtccagggctccaggcatccatcagcagttcagcaccgaccgaagccggccggcagacaatggacggcgcccagggcaacgtcgacgcggtcgagagccactgcgacgtcgtggcgcgggccttcgtggaacactactaccgcacgttcgacgccgaccgcgccgcgctggccgcgctctacggccagacctccatgctctccttcgagggccacgccgtcgcaggcgccgaggagatctgccggaagctggcgcagctgcccttcgagcaatgccggcacaccgtctgcaccgtcgactgccagccctcgccgtccttccccggcagcatcctggtgttcgtcagcgggaacctccagctcgccggcgaggagcaccagctgaggttcagccaggtaggccatcttggcagtacgtcttttccttcctctcaaactgtttccgagcttgaggtttgaattctgatgctgtgattcaatcttggaatgcagatgtttcagttggtacccaacgagcaggggagcttcttcgtgcagaatgacatattccggctcaactacggctgacgcaatggccggtagcgtgtgggtgccgaaaggaagtcggtgctcggcagatgctttgatgccacacatggaggggacgcctggcgcgtgatcctctgttttctcctttcgctttcggtcttcttctcttcgtgttggatgcagcacagcatcccagtgctttctttcagaaaatgtagcatcttaaataaagtttcctttcagaaaatgtttccatttgagaatggcctatatttatacggaagtgctgttacaatcggtccatcttggagtacggtttgggtcggctgcctcgcctgtgtgtgcgctccgagtttactagttcggaatttagtttttttattgtttaataaaactgctctgtttcaaatattagcaagaataagcttcaatcactaataaaaaaactaaaaactaaaaggccgattgaaattaatcgccctctagaaacgttatgtgtataaataaagaaccctttaataatattatcagtgtatactctactctatatttttatcaaccttaccaaagcaaactcacaaattatcaatctccacatgtaagctatgtacactatccctcaccaagtgcaaaaaatgtctatactatcattcactaagaacaaagttatccatattaccccaattaggacaagtacaagtacgttactacatgttagcggtttcataagtcatctcatgcattctagtcttgatgtagttaacaatctaaaggttga

SEQ ID NO: 4361 - DNA, 4309 bp, Sorghum bicolor
cataacaacttgaaaaactcccaacatgaaagttgttcaactttttgagccctacaactttcatgttgaccatttttcaaaattccaaacagattttgaattggagattcaaattagaaaaggggacattttccggaaatctgtattttcaaaattactttgaattttgtactgaaacttcaaaaactcaaaacaccaaagttgtacatcttgacaagatctacaacttttcttttgaactcaactccaaattttgcttggtttttgaattacacaaaaggggcaaatcctgggttttaaaattagggtttttcccccctttagctctcggaaaactttcacccaaggattttaaacaccaacataagcatccaaacacaatatagacacactttaattccctaagcacaatcaaccaaaataaacttatttttaagttaatgcataatgatgacatgtcacgttttagattgcttaacaccagagtgttacacatctcccttgtgctacccctgcgccaacaatgtcccctcgacattaagtatgctatgcccttttctccctctttctttggcaaatgtaaatgtggatgttagtgtacatgtaccgatgtgaatgtcgattgtgtatggtttctaaacttccatttgacacctatggttaacatgtggcatggatgctctctggcatgggatgtattggttgattacttatgcattatgtggttgtaggatttgtgaattatgaataaggtcgagacattggttgaaacttcttgccatggagagtgatgaaatggatatgtttgtgctcaagaatgctctaggtatgtaattgctcattaactagcccaaagatagggaaggaaaatatttatgtagtgccatagagactagaaataaaatagaggactattggtgaatagagatttgttgcagtcttagatgatgaatcgcataaaagaataactacctctttcgtgcatattctaaaatattagtacgttgtttgaactatttatattgaaacttaagatttattgtgttatttaataactatatacaaccatagagaaatttctatagtgctttgttgaattgctaaatcaattttattgaatgatatatgaaaaatttgttgggcgtactctagctatggaaaaagtcctatatccaccactcctcccaattgattaagttttaatttttgcctgttgtttgtaagtttgtctaaggttagctgtccgatcttcttctttccataaaagcgtgacaaaattaattaaattttatgtaagaaaaaatataaggaaaatttagttctgaaaacaaagatgccacggtaaactctctcaactgaactggtaacgttcaccaccaaaggcgatgccatgtactacaaagtttcctgcccttgtttaccgctttcttagatagacgtgattttgaaaaaccatagctgaaagtaatagttgctgatttgttgtgaaagaaaaacactactaaataactggaagatttggcaaataaggtcaagcgaacagggtcgaaattcttatggtccgaactaaatcacataataaatgtacacactacagtgctacacagtccaagcagattgggcccattacactactcatccatccctttattttctctctcgcagacctaccttgatagttgatatagctgttcacatgaactgatcagtagcactagcaccaaaggcatggatattcgtcaccatcgtatacgaagtaaagcatagcttccaaaaactctcgtggcagcaagaacacacgacaggacctaacgccacgccatgcaggacggcacgtacacacagagcataaagcgcggcagaaatatgcctcgtcccagcgttcacgttccctgacttttacgtaaagaacccgtgctacgaatacgatctcgcgcgctaagcttttctacgcgcttataaccatgccggccctgaacacctgatcgatcgacgacgcaagccagcaacgctcaatcgcaacgtacgctcgatcgcactctcgcacgctagctagctagctagtttttggccgcgcccgcgcgcactcaggtttttggctggccggacggcgcacgggcggatgatgaggtgcgtgagcgtgttcctggcgtgccttgtggcggcgtcggtgtcgtccaccgcgtccgcgttcgtgttcaaggcgggcggcacgggcgagtggcgcgtgcctgccgcggcggccgctagcggcaacgcaagcgcgtacaacgcgtgggcgcaacgcaaccgcttccgcgtgggtgacgccatcggtgagtgagcagctaacccgatcgatctctcctcacgcatgcatgcatgcatgctgtttttgccgtggcattcatcagtttccggttccgggatcgatgtgctgctgtatccagcgtcgcacggcgcagaggctaggatacgcaccgatcaatattaaaaaaaaaaactgcattatattttcgttctgagtcggatacgctggtatgaattcattgctcgagatagtatggggatgccatggcacctgtgtctgcaccggttccagtgaagtccatctggagagggcggcacgggacggggatgcggggcaggcgtccgtcctgtggcttgcatgccggcgtctaacggttctcaagtttgacttctaggacgcacgcatcctcgttgaatagaattggaaggcctgcagacgctgtttgtcgagattcctgtaacgctctatcgtcaaactttttttttttgacaaattctatcttctaattttaaatctcgaggagtgcaatctatctttatatctatatatatatccatatctatatcagtatttatatttatatctatatctatatgtctgcaccgctggaaaatcatggtgattctgcgaagggaagcgtacgggagttgtatgcagcgctgacccaagtaggatgacattcgcttgcctaggctgcaacattcaatgcagcgtatcctcgggatttttacagtggtcttgccgtttctgtctccacaacggcgtgacgcaatcgccatgcctaaacactcaatctcccttaatcgcattgctaatgatgacagtaactcactaatcataaaagttcaccgttcagtacaactctcactgattactgcatttcaaattttgactgcgccgcgcgcgcccatgcagctttcacgtacccgcccggcaacgactcggtgctcctcgtcgacaagaggtcctacgacgcctgcgacacgaacgcgccgatcgacaccttcgccgacggcagcaccgtgttcaccttcacccgctccggccccttctatttcatcagcggcaacaaggacaactgcaaccgcggcgagaagctgatcgtcgtcgtcatggcggagcgcgccgccatcggcaacggcaccgagcctggcacggggctggcgccatcccccaatggcccattctcgtccttctctccgccgccacccattggcatcgacatctcgccgacggcggcgtacccaccaaatgccgcggcgcccaagatggcaggagttgccggcgcggccgcgttcgccattggagccttgttctgcgcgcttgtttgagacgtgtgttttgtttcttttaaatttaaatgttcgcatgcgcgcgaagtggagggagatgatcacacggctgcttttactagcttgctcaaattatacatgtatatccgattgagttgatgagtgagtttgtttttaatgtatatttaatgtataatgtatcaaatgttgatgtaatgtatgtattgttgattaattcagagctgatggaaatgtgattattgacaatgttccctttatgcttatttccctaataagccgcgctatttatttgcaaggaaaaagctttgaccttacgcatggaaaacatttatgcaaactaaggtcaatgaatttggcatagggcaaagcttttgcacatttttaagtaaaaaagaaaagaaccctagcttagatggaccattagatgtacaaatcgccttttgtgtcctcgtaacgatgagcccactatccgacagatttcgaaaaggccacaacattttattgtaagagcatagtccaactactataacagtctgatccttataacgggcggcccaaatacgacaatgtaagacatttaataaaaaaaaaagaaaaagatcgctcttgcgacttaacttgattatcttgatagtatctttaacggcccaacatcgtatccgactatgtgtcatgtttgttgatgtgtaatgtcttatcgaggccg

SEQ ID NO: 4362 - DNA, 4400 bp, Sorghum bicolor
gcagctctgcagcatctctgcagcaacaagcaggacggcaggaacaaggcaaagtttcacatgtctcgcgatgacggcgggaacaaggtcaggactttcacatgtctcgcgggaacagcaccgaatacgcagaatcgtacgatggcaagtgcgtccgcgcggcgcatacttacacgcgcggctcggatatttggcaagtgaaacaatttagcaagtgggaataccaaactattggagcaagttttttgcctcttttgctaaattttttagaatggcaaatattttagcaaactgttggatagtattgattttcagatgttgtgtagacgtacgcgcaattactaaattttaagcacaaatcgaagattagtttgatagaatattatacctttaaaacaccaccataatcttccttgccttcatggcttcaacattagatgaaatgaaaagaaacagctgcaagtctacaacggcatgctctgcttacaaggccacaagcaaattgaacaataatacaatgcagcatgtacatgctcagcattgtttatctggaccatccaaatatgctatgagattcgtgctgctacacttctctccactgtgttcacacttcttcccactgtttcacacatctcgatgcatattcaacggtgcagataagcaatgcccagcatgtagactctaaaaaactgcttctttccaatgttgtgttccagccaatgggcactggtcctgtgatgagagtgctcatcgatttgcaggctaccagtctagcacattttcctccggtgcgcatcgcctacggaagtttggatctgcagtcgcaggggctctgtgtctgttaagcagggaaggagctaatgttgttagttttgctgcctagctgcctttttatcgtacgctagcaaaaatggtcgcccagccaattataataggacgtacatttcagcgtaagcattagcataagctaaatttgagctatcgcactaccttagggtgacgacgtagtcctttgctactttgcctcccaagtccccacgcatgcctaggctgcgctgccaagagtggagacgagagagagataagagtggcgtatagatttccatgcaatgagccggcccgagcacgacactaaaaagcacggtctagacacggcacggcccggtggtagtaccgtgtctgggccgtaacttcggcccgcagtgtcggcacgggcacgacatgattaataggctggcacgacgctggcacgattatttccatcatctgatgctttgaggatagatcatgaccattgaatgtattctgagtcatgtatataaacatcacacaacccttttaaaccctaactccctagtcggcggcgcaaacacatcattgttgcggtcactctttctctcgcctgactatacgacagcgtagcgctcatcttctctttgaggcaggacgcaatgagcttctcgacttctcctgaagccacgagccggcacgggcacgatgggccacagtgcctatcggcacggcacgacacggttaaggagctatagtgtcatgcctggaccgagagtttgacacgatggcccgagatggcacagcacgatagacatagtgccgcatagtgtcagagccgggccgcccgtttggccaactatagagtggcggagataccaggcgtcggcgcagaggggcgaagctatattattgcttgccacaccatactcatcgctcacgtcgacgagcaggaagcgaacgacggggaggagagtcgggggagggacgacgcgggttccacttccagtaccctgcgtgtggagaccgaggatgagggttccgtgctgtggcaggcgacggtggcggtgcagtcctcattccgtaccgcgccgggtcgagctcagctcagcagccgaagctcttatcccagccacatcacagtctctctcccatacccacgaaccaaaaggtggataagatttccagacacttccatttcccattcccacccatcagactcctaccagagagcgataaagcccaaccgcttcattgcaaacgaaacaagacaatggcgacagcgagtgagatcgcggcggtgggggtgatcggcgcggggcagatgggctcgggcatcgcccagctggccgccgccgccggctgtgccgtccttctcctcgacgccgaccccgccgccctctcccttgccgtcgcctccatctccgcctccctacgccgtctcgccgccaagggccagctctcccaggtaagagcgttgacctcctaaagcacccttcccgaattggtgcccgattactcggggactgggaaaaaaaaagatgatcagctttctccttgacaaatttgggggcttgcttggtctccaggccgcgtgcgaagactcaatcaagcggataaggtgcgtctccaccgtgcaagatctcagggacgcggatcttgtgatcgaggccatcgtggagaaggaagatgtcaagaagaagctgttcgtggagctggataagatcacgaagtcctcggccatccttgcgtccaacactagctccatctctataacccgcctggcttcagctaccagacgcccctctcaggtgatgggcaacctctggcgtcaaagaaactgaattcgctcttcaaggttgtgaagtgagtttcgtgctgcaggtcataggcatgcacttctttaaccctcctccgataatgaaactgatcgagattatccgaggagctgatacatcagatgaggtgtttgctgcagtcaaatctttttccgaaaggtaactaaaattttgctatgccctctcacctgaatcagtttgttcatagctagcagaagtgtgtagtgaattagtcaaaaagatattgagtttgcttcctttttttttttttttgatgaaacaggaggggtttaaccccctactggaattttattgaaaggaacaaaacagtttacaaattacagagacttgaagtcaagaaacaaagaaagaaagtttacttcctttcactgttatgttaaagttttgatctggaattgacactatgggcagtatttactcagtcgagacttctgacagttgtataggtaacataatagtggttttcccttcaacaaaaatctttcatagccacatgattgtgtcactccaacaactttacacacaaaatggatctcacaggttttgaaacaacacgtacctgtctcaggctctcacagcacttgcctatcttggatgttgactgcagcttgtgctagtctgaaatcacaactctgtctaatctgtaatgtcgatgttaccagactcgtaacccttgagattgcctgatgatttgaaaactttgcagacttgggaagtccgttatatgctcgcaagattacccaggattcattgtgaaccgcatcctcatgccgatgatcaatgaggctttttgggcactgtacaccggagtggcaaccaaagaggacattgacacagggatgaagttgggcacgaatcacccgatgggccctctgcagcttgccgatttcattgggttggatgtgtgcctttcagtacttcgggtacttcatagtggcctgggagataataagtacagcccttgccctcttcttgttcagtatgttgatgctggccggcttggaaagaagcgtggagtaggtgtatattcatatggacagaagtcttcatcagtcaggccaaagtcatctatgtaaacatgaaagtaactgttgagcaaataaaacaagatgtagcaatagtatgtatgttacattgcacatcagagaacaaggagcacaacttaattcagaggttgctgctcaatatagaaaaaatggttcagtgttttaatctaataaatggaattcatgaaaattacatgctcaaaacatccagcaattcaagctcagcaataaaatgcagcctcctgggtgaacttcatttatactccctctattacacattataagtcgttttggctttttttaattacatagcttttgttgtacacttagatatagcgctctgtctaaaaaagcaaaaccgatttacagtttagaacggatggagtagtatataatttttcagatactcaggcagtagatttagacaacttagtcccagaaatgatcactctgtgtataacgaatcatcgaatagcctcgaccacaaccccgtcgttcctgccgttgctaatgccaattggcacacgaaatggtgacaagaaaggtgatgtaaatgggtagtgaagtgcatctgcccaacgatcatgtgaagcatgttgatatgtacggaggactatcttttcttcatgcaaaatgaacaaggacaaagtaatgttcacgcacacgacagacatttccctaaattgcattctgctcgagagggaga

SEQ ID NO: 4363 - DNA, 6458 bp, Sorghum bicolor
gctcacaacagaaagaagatttaacgggacatattctcccttttttggaagaagaatactatttgtttttgtatactgtaaataggtgctaaagaatatattattgtatattctacagataactgtgtatctacaacattacatcaatagatggtccttttaaattagtcccttagtccgtcagcatgtgaaaggagacataagtgttatttaatgcttaatacatttgactaataaaaaaatacttatattaaattgcatatttttttcctttgttcatttccgaacacaatagtcataatagatactttgtagtctctatctggttttattttaaatctctttttaaattacatatttttatcctcaagttaagttgaaactattgtgcttattatatatttttaaattacatatcttgtgtttactacatcaaaaaaattatattaaattacatatttttaatattattacttgttgaaaaatttttatcctcaaggtaatttgaaagtcttgtgcttattacatattttattagcatttcttttgtagttttaaaaataagaattctaggtcagaaaccatagtcttaagtactaagatatcattaatccatagtcttaagtattaagatgtcataagcagttatttaaaacttgcataaatatcgtttagggtccatcgtaaagcttagggtaagattttagaatggggtaacgatgctaatctctagagaatattaatctttaattcttataatattgtttactctgaaggaatctcaaaggccagtaaaatatagccactgaagcagtttaggtgtcgagactcgagagggtaaaatacccgtgtgtatatatggacccttcgaaaattaactacgtactcctaatatcacactccaatatcaaaagtgcaagtgtgacaccctatggataccattcaattgatatgcagaaatgaattatataatgcgcaatattatgttgttgtttcttgctttccaaagttaattattttttgtgacctttgtgaaagaattgtccacatgcatgctctacaccactggcggggctcaggccaggccaacctgggccttggcccccctaagcactacttaatatataggctaataatcattgttcaatactttgtagttatataggctaataatcattgttcaatgcttcttttttcttctaattttcatactcatctgcaaaattatttgctatatgacatacaaatattaaatgtgacttataaatgataatctgtacttaatagtctatttgatatttttgttgggtttttatagtattaattagcagcaaatttatgattagtgattatttgctctagcatatgtgtacaatttgatctacatgaggtaaaattagccccttcttaaagttgcacctagttccgccacggctctacacccttttcaacgtaaatcaacttttagaattgttctgactcaaactactttaagtttaacaaaattcatagaaaagaaaaactaatatgtatgacattaaattagtatatcactagatatataattgaatatatttttataatgtatttatttaatgtcataaatgatgttaatattttttataaagttaatcaatgttaagatagtttatcgagtcaaagctataaatggcaatgaagatacaacttctagtatatatatttttttcttttatatccagtcaaagctatatccccacgaatataatagtcttatattaggagtatttattattaaatatacatacataggtatatataagctttaagcctgtaactgtgggagagggaagacacccatgtcagtgttggtgtggtcctaatagtctcctaaacgccgagccgcactcgcgcctccttcgatccatcagctcctcccggtgcttatatataatataatcatcttagcttgaggcacattttgtgtgcgcggccgtagccagacgcgtgcgtacgttgcgatgggtctctccggctccggcgtcgcgttgttgcttgtgttcctcggcctctgcaccgccgtgtcgagctggacgccgccgccgccggagatgctgcacgagagcttcgcagggaagtcggagttcaggacggtgaaccggaggagtctgggcgtgtgctccaaaccgagcccgtacctggcgatcagcgtgagcaccggcggggcgccgctccccgacgaggcgttcgtcagggtgaccgtggccggcgtcctcaggcccgatgccgatgactgggtcgccatgatcacgccttccaactactccaggtaattttagaaaacaaagaagttagcaaaatattgtttttagctgactgctagctgatgtttcgatcgtttatttatttacttgataacggatgaacggatcgtctctctgatctctccgtgaattggtgcatgcgcaattgcgcatgcagtgtctccagatgccgtttgagtggtgaaaactacgtccagaccggcgatctagcgcatctcccgcttctgtgccactaccctgtcaaggcaagtttcgcattgcatgcacggctgcttgcttcaccgtacccttctgtgttttttttgctggttcatccacgcctacgtagggtactagtttgccaccaataattgctatacaaacttctttctgccatgttcaagtcgttctcttcattaagaggttgctgagtttacgaaaaggcatctctagttggttaagtattttgatcatagcgacattaatttttcggtaccagcccaatgcaacatgtctcacaagaatgggcatccatatcatgaatgaagcaagccttagctagcgtgcaaacattggtcatccgtatggatacattgtcatcacatgcatcacgtgcgttgcatggttcaaatgggcaagctgtgtaattggagcttagaaagtgctactctatctagtactactagtagtagaatcatcgttgctcaaagccgtcccaaataatgggccaaagtatgcatgggccgctaaagacgccaagtttcgggccgaactgagtctgagcttattttgacgcggtcctcttaccgggggttgcgcaggcccagtacctgaggcacgaccctggctacttgggctgcaagaccgcggcatgccagaagcgcgacgcgtcgggcgcctgcagcgtccgcacctgcgccgccacgctcaccttccacgtcgtcaacttccgcaccgatgtcgagttcgtgctcttctccggcggtttccggacgccgtgcgtcctccagcggtccggcgcgctgcggttcgccaaccccgccagcccgctctacggccacctctccagcaccgactccacggcaacatcggtgagcactgagcagtcccaccgttgtttcttcgttcattctactggtgattttctgcaaaagcaacagctttacggcaactgtatctgagcgctggaagcatgcattgggtgttgctagatgaggcttacctgggtgagcggcgaccggaggccgcagcaggttcagtacggagtgggcaagtctgctacttctcaagtggcaacgttcacgcagaatgatatgtgcagtaagtcgtgatcgttcgtttatcttagagagcagatgttactgagggaaatgtgacagtgtttgattctggaattgcttcggcaaacttatctccgtgcaggtagccccttgttaccaagccctgccaaggatttcgggtggcatgaccctggctacattcacacggccgtcatgaccggcctccagccttctcagtcctacacctaccgctacggaaggtaaagtcctcttgtgactaagatccttgcaaacaactgatcagcaacgcttcagaattagaaaatgccatgggtgttagtaaggtttatgactttaaaatgtcagccagttctgcagtaacattctggcaaccaaaggagatggatgtttcatgtgttcacacagatattgagtttgtgcttgtgcagtgattctgtgggttggagtagcacaaacaaattcagaatgccaccagctgcaggctcagacgagacatcatttgtgatctatggtgatatggggaaggctccgctggacccatcagtggaacactacattcaggtagaccaaaatgttgccttgaaaaacagaatcgcttaactctgggttttgtgttcagtagtaactctcacggcaagcgttttgcagcctggatcgatttctttggccaaggcagtggctaaagaaattcagacaggaaaggtcgattcagtcttccacataggagacataagctatgctacgggctttctggttgaatgggacttcttcctaaacctcatagcaccagtcgcttctcgagtcccctacatgaccgctattggtaatcacgaaaggtaactgctaatattaaaatcttaagtttgcaatgtaatctgaggagttgatttgcatcttcaaatgcaccatcattgaccatgaacttgcgttgtctgcctcagggattatgcagagtctggttctgtatatgtgaccccagattcaggtggtgaatgtggagttgcatatgagtcatatttccacatgccagctgtcagtaaggataagccatggtattcaattgagcaagggagcattcacttcgtcgtgatgtcaactgagcataagtggtcagagatgtcggagcaggtatacagtcaattggaacttttcatgtattgttcagacttagaaatgtatgtattgtctctgaaaattttattgtttgaatagcacaaatggatgaatcaagatttgtcatcagtcaatagatcgaggacaccatgggtaattttcattgggtgagtttcgttacataagcatgtttgttttgaagtagcttggctatggacggatcatgccacccagtaaaattacaaacttaggttctttcgttttatactttgtttctcttgaatcggtaatatgtgctattcagatacccatcaccatacttcaatgaaaattgcaggcatagaccgatgtattcatcccatgtcggaataccagctaatgtagatccaatttttgtggcctctgttgagccactcttactcaagtaccaggtaagaaatcacacttgaaaactgaaacttaactacatcaggctggtatgaaaagaaatggccagctgatctgaatatgctaaccatagtatcatgttttggtttttgggtgagtaggtggatttggttttctttggccatgtacacaactatgagaggacttgtgcagtataccggagcatatgcaaaggcgagccaaagaaggatgcaagtcgaattgatacttatgacaacagcaaatatactgcgcctgttcatgccatcgttggagctggagggtttagcttggacaagttccctaagattgtggtaagaattatagtaacaagtctttaaaaagtatgatatacatgagatttcttgtaataattattcagtgaacattgagatttgagagatagttttaagtttataactataaattgatatccaatactatacatgcttgttaacaatcttgccttgattttcaaataatcagttgaacaagtggagcttatcaagagtttcagagttcgggtatgccagggtgcatgccacaagaggtgatatgctggttcaggtcagtttttgtatttcctttccttttctcaatgttttctatcttctcacatgtttgactgaaatagtactttggagattcaagtggcattgaataacgaaaaatccagaaaattccgaaagatccccattttggcatttctctctgaacaattgttactctgttttcttcagtttgtaagctcaaatactatggagattctggaccaatttagaattgtgaagccagatccggcaaggaggctacggaaccagccagttcaaccatagctgcagtttatggaaaagatggaactggagctacttatatttttgttatgctataaaaaatggagctgaattacacaattcatggactgatcgtcaccgtggcacagttacaatacactttaactctctcttttttttcgccacagttataatttactgaaacattttattttgacgtacctcagtatacacgcatccacttacatatatagacacaaactcatcacaggtgcctctccgattagcacgagaataaatatgagcacaacgttgatgactcgaatccgataggcatgttccattgtaaggaacttaaccagctgacctttgctcagttcgcaatcattgaaagtagggaactaataaaatttttttcgacatcaagtatgctaaaacattacggcaacatctaagctctgcataatatacgccaacacagttcgactgtccagctgcgctgacaacgaaaattaagcgaaagctacatcatgtctccaggt

SEQ ID NO: 4364 - DNA, 5729 bp, Sorghum bicolor
agcctgccttcacgcatgcatggggctgccactgtgcgtgtggtggaacgtttggagctgtggatgacgcgtgggcccctgtacgacagcacgcggggaagcagctgtggcctccgcctcggtcatcgaacggtaatattctgaatgttttttattctttctttcttttccttttctttagctctgtgtccactttatgtttacacttgcttggcaggtgaaaaacaaagatactgcgtgctagaaagaactactctggtgtgtttggctgagagtgttaaagtttaacaaatattgtagtattttcgttttacttgaaaattaatatctaattatgaactagttaagtttaaaaaaatcgtctcgcaaattactctatatctatgtttttaattttataaataaactatatttaatactctatatatacctacaaacatttagcgtgacggtcactaatttttacgtgcgccaacccaatggggcctgatttgttcagtgcccatgctcgatcagatccaggtctgcaacttgcaagtgtactgtgtactagcgcaaacgggccgacctttttgagctctggccttgtttacttcccagaaaaatttgcaaaatttttcacattccccatcacatcgaatctttagacacatacataaagtattaaatatagacgaaaataaaaactaattgcacagtttggtcgaaattgacgagacgaatcttttgagtctagttagtctatgattggacaatatttgtcaaatacaaacgaaagtgctacagtgtccatttcccaaaaattttcggaactaaacaaggcctctattggactcgtttcctagaagcggcaactgggcctgagcaagctgtgttccttttcctccacctgccaatctgaaacggcaacttgcaagtgtgctgtgccactgaagatgactgatcatcgagacggcttcattcctcgaacgctcacagcaaacatgaaaaggaaaccagatgcaaaacacgaataattggagacaccacccgatcgaacgatcctccttttctttcgttgggaaaaatgaaataagttgggaggacattttcgtacactcgtataagcattgagctgagctttgtccccagctggtcgcttccagcaaagcaaaacttatccactgacctcacacctaagccgcgctggccaaaggaaagattcttcagaacggcatcctgcccacgaggccacggcctacgcaacagttggaccaaaatactccacactggagaacagaacgctgtgccagaggcctctctgctcctgcgagatccaatcttggaacagctcacgacaggaaggcaactgtgacggccgcggcgcacgtggcccacacgtgagtgccccccggaaaaagctgaggggtcactcacatgcacacggcccacgggcccgccgccccgtcgagccgtagcgcggacgctggacctggacgtcgcaccaaccggcacccaccgataagcgtaccccacgatagcgccccgcaccgcacctggggccagccagccagccgctgccctgtccccacccctcgcaccgccgcaacacggcctgtggtgagctgtggcatccaagtctcaccggcccgtgggaccaatgctagagaaaccccacctgtcagtgaagttagcctgtggtggcgttcaccgggcccagcgtttgccagctgcgcgggccagcgtgggggccggaaacgttaccggggggcaggttgggaacagcctagacggcgtgttacgctgcatgtgggccccgacggaatggcgatatttgcaggggggcaattcgggtacttcttcgccgcagggtgggaaatttgaaaatcacgcaagggggggagagatctgggccgtgcgtcgcgaggagggctcggaacgggatggcgcgggccgtcggatgctcgctgcggccaccgccacctacggctatttaaccccgcactgccgacgccgcactcgcccccggcttcctccttccgcctccctccccgatctctctcgctctctcgccgccagttgcttcgcagtttggatcgtctcgaacctcgtaaggattttctgcactaccctcgtaatcgagttttgaatctgtgctgtggtgccgcattatttctgatcagttgtggcgccttagctaggagttttgtcgaattctgggttgttttcgtgatgtaaccggaaatgtgattcgatctgtggggatctgctgattattatttcccacctagtaatgtcctggtccagtgcttgtttatatctatttttcgaagaagattattcgattagtctggtgattctgggatctctactgttggatttgggggatttcgtggttcttttttgcgactaatcactcgatctcggaaatgtaactgctagaacttagatgttgaacagttgtggactacaaatttcaggactgaaactagatctggaattgacgtcaccgtttgaactgttgagctcgcgaggaaatatcgactagatctgctataaatattgatgcatttagtacttagtagtaggaggcgactcagttattgatgtgtggaagatggttttgaaaccccagatcttgcaagtgttctatgcgattagagtaggagttgatgtgtggaagatggttttgaaaccccagatcttgtaagggttctatgcgattagagtaggagttcagtgacattcagatctgaaaacgtgagctcgcttccagtaagggttctaacttgaggagggtgacaactagcaaatgcttttatttccattcgcacagtattccaagttggtgtgcttgtggcagtatctaaaactaattcctatgcacttctcttgtttatagggcgaagatgagagagatcttgcacatccagggaggccaatgtggcaaccagatcggtgccaagttctgggaggtggtgtgtgatgaacatggcattgaccctactggccgctacactggcacttctgaccttcagttagagcgtgtcaatgtctactacaatgaggcctcctgtggccgctttgtgccccgtgctgttctcatggaccttgagcctgggacaatggacagtgtccgcactggaccctatgggcagatcttccgccctgacaactttgtgttcgggcaatctggtgctggtaacaactgggctaagggtcattacactgagggtgctgagctcattgactctgttcttgatgttgtgaggaaggaagctgagaactgtgactgcttgcaaggtacttgagctttattgttgataaagctgattgtttatagttgttagattagatctgttaagagtgagatgtacatgttcaaatatctcctgctttttaccatgcttgtgattttttttttcagtatgatgcaatacattatatccatctgactgatgctatccatgggacctagaaccgcaatatcttgttattattataaagttgctattgctcttgaaagtcatttcgcttgttttagttcatgtactgtatttctatatcatcttaaatgacattgatacttggttattgctgatgtgcttagtaatttcacatttcagtatctagacactgatacttgtggttattgctggtgtgcttagtaatttcacatttcagtgtctatcttgtgtgctgttgacatgttttgacacaggatcagaaacaaaaagttatattcttcaatttatatggaagtgtagaatcttgcacttgttgcttgaacaattgacattctgactgtgattactatcacctctgtgtgtcatgtatcttggttgccatgtgtactttattaactgttgttttttcaattgcctgtgcaattaaacttgattaccatgctacattaaatattaactcaatctatttgtttgttcaggattccaagtatgccactcccttggtggtggtactggatctggtatgggtacactgttgatctcaaagatcagggaggagtaccctgaccgcatgatgctgacattctcagttttcccctcaccgaaagtatctgataccgtggttgagccatacaatgctaccctttctgttcatcagttggttgagaatgccgatgagtgtatggttcttgacaacgaggccctctatgacatttgcttcaggactcttaagctcaccactcctagctgtaagcaacctcattctttctcagttttatccttcaggttgcagatatatcatatatatgcttgcttgtactggtgtatttacagatatgataacacactatatttgttaatttctgcagttggggatttgaaccatttgatctctgcaaccatgagtggagtcacctgctgcctaaggttccctggtcagctgaactctgacctcaggaagctggcagtgaacctgatcccctttccccgtctccacttcttcatggttggctttgcgcctttgacgtcccgtggctcccagcagtacagggccctcactgtccctgagctcacacaacagatgtgggacgccaagaacatgatgtgcgctgccgaccctcgccatgggcgttacctcaccgcctcggccatgttccgtgggaagatgagcaccaaggaggttgacgagcagatgataaatgtccagaacaagaactcgtcctacttcgtggagtggatccccaacaacgtgaagtccagcgtgtgtgacatccccccgaggggcctgtccatggcgtctaccttcatcggcaactcgacttccatccaggagatgttccggagggtgagcgagcagttcactgccatgttcaggaggaaggctttcttgcactggtacactggtgagggcatggacgagatggagttcaccgaggccgagagcaacatgaatgacctcgtgtcggagtaccagcagtaccaggatgcgactgccgatgatgagggcgagtacgaggacgaggaggacgtgcaaggagatgaaatgtgagaggctgtgatagtgtgaagcctggtggttctagggcaggcagaccttgatgggtttggtgtcccctttcgtattgttgccgtgttactactgctagcgtaccaccctcgtggcccattctgtcgctgttgatgcttgtattttccttgtgctatggaaccttgcttttggtacgatgctacttatgctgccagtattcttggcgtttaaggttcctgttgtgaattttagccttgcgtgtcgcttcttattatgcagcgatattaatttcgtgcattgccctctgacatggcttggagaccggctgctccctgttggcgaagcaactggcagcttgttaatagcgaccgctgttatatcagtcagtttcattgacgccagaggggattttcctgggttttcctcaaccgctactggaaccagaaaaggctgcaaggatgaaagagtcaaatgctagttaagcgctctccctgccacagggtggaatagccacgaacctgcataatctgctggcaatttttcaagtatttttgtcagtatttttgtcactatccacaaggtacaaccaccattcaggatatacagaaatctcataagttgtctttcgttctgatagctgttcatatacaatgccacaatggcttgtttcaacaaggaatcctgtgataaaatctagaacagaataatgaatcaaagtatcaaacactaaactctcattaatgtacagagcatcc

SEQ ID NO: 4365 - DNA, 5370 bp, Sorghum bicolor
aagaactctggcttttgctggattgatcttgaccctccataaggacttatcccttggcaaaagttgggacaactcgtacaaccatgagggctatatggctctggctttagctcagtatgaagaccttttctagcttgttagcggttacctgaaagggcgctagaggggctgaaccgacacgggtatagtgcgagcccctgtccctatgtgtataggctgcgcgtcattgtgccattcggaagggggtatctatatctgctcacgaaggaaaccttgcggccctaacatgttagacgaacttttgaaaggcttcatagtgatccctgccgacctcccttggaagggggttaagagattagctacctcgggcgaaagggtaaatcatgactcatggttaaagatgtacaacctctgcagagtgttaaatctggtatactagccgtgcccacggatacgggcggcccggaaaactgacggaatagatggacaccgatgaacgtgaataatgataataaatgatggtttattatgttgtttatatgtgttattcttaattcttgtatacattgatcatgtggttatgggatttattatgctaccttgatatttgctattcaatgattaaacatgctatcaactattaaaagctaaatgcagtcaaaccagtgtcagctatttgagcctcatgaacctctggttatacttattgagtacgatatgtgctcactcttgcaatttcccaacaccccaggttatgctaatgatgatgactggaatgaggattaccgctatgagtactaggtttggagtcaaccagtcaacagtgtccctgtgtggagcttccgtcgagagcgttgtttacttcttgctatcatttttgtatgagactatgtgatatcttatattccgctatgtaataaacactgcaatggtacagttgagatttgtctacttatgtgtgcgactattcctggggcacatatgagtcttttatgcatcctattttgttcttaaaatatgggtgtgacaagcatgtgttgggccttgtttaaaattttgtaaaaaatttttagattctctatcatatcgaatcttgcgacacatgcatggagcattaaatatatattaaaaaataactaattgtacaatttgcctgtaatttgcaagacaaaaatcttttgagcctagttaatccgattgaacaatatttgtcaaatacaaacgaaaatgctacggtagtcaattccaatttaatgctcaatacaagcatccaaaaaaattcgatgtgatagagaatcttgaaattttttgaaaactagttcagttcccaaaaaattttgcaaaatttttcagatttcccgtcacatcgaaacttggggcacatgtatgaagcattaaatatagataaaaataactaattgcacagtttgccagtaatttacgagacgaatcttttaaacctagttagttcatgattggacaatatttgtcaaatataaacgaaagaactacaatgcttttttttaaaaaaaaaaactaaacaaggcctaaaacaagtgtgaattgtgaccgtgcccgtctctctttgtgtcagtgtgtgccgttcggtttgtttcgtgtaaagttcgtcgattttgctgggaatgggggatgcatgtggaggtgccatctactgtaacagtagagctactagcatttgttttgccgaagatctgacgattcctagcaccggcactggccggctgcacgtcgctacgtcccgtggcgcacgcacggggctaccctttcctgctttccatgtgtggctgtgttttacgcacgcgcgcagcacaggcgtgcgtgccatgcgcccgtgcgcccgtgccgttctcgaggccgaaagaacgcgagatcgcggcaccgcgcccgcgcggcgtcgataacagactaccagtacgagctgcgcgcggtcgccaggctctctccactagccaaacaaagctccgagcggccagcggggcatgatcctggtgcggcgcctggcgggggccacccgcccgcggggcctcgctggtcgaggcctcgcgtcgcggacctcgggggcgccgcgggaggcggcggacgccgtggtggtgggcgcgggcgtcgtcggcctcgcggcggcgcgggcgctggcgatggccgggcgcgaggtggtcgtggtcgaggcggcccccagcttcggcaccggcgccagttcccgtaacagcgaggtcatccacgccggcatctactaccctccgcgaagcctcaaggtgcgcgcgcgccctttgctgtgtcccccccgaattcaccatacgcgcgctgcgcaggtgatcctgattcagtggtttctagcaattgatgcttgcttggacgtccatttgggcttcaattgtgatcgctatggtttaactactatttgacagttgccgcgcatacttccaaacttaggtgcttatttgtttgttcaaacttcagacaagtcgaagagcgttgtgtagtggtaccggctacagataaccttttagcgatccatgacaggattatggatgtatctatgaaatttgttccagatgacacctgacacattctattctgcaggttgatcccttattagtgtttggtgcaaaatggggcttgtcaattgatgcaccagagttcacagaaatctgttgctcctctagtaataatgcatctctgcgggaagtgtttagctagatcttattccttccaaaaactagcagaccagttctcaacatcttaaatagctgacactctgacagtggtcgctggtaggggctttgacgtacttaacagtagacgtgctttaggattttagacagtttaacaaactttagtatatataaaaattgtgcatctaacttgaaaatagttctaactttacaggcgctacatgaaacatttatatggatcccttaattgatgtatcacagactctacctgcggattgccttttgtaggctaccctttgtgtaaggggaaaggaaatgctctacaagtactgcaaagaacgaggtgttgcccacaaacgaatcagcaaactcatcgttgccactggtgctgcagaggttccaaagctggacatgctcctcaggaatgccaaagaaaatggggtggatgatcttcagttgatggagggttctgaagctatggagatggaacctgagcttcgatgccttaaagctttactatcacctagtactgggataattgactctcattcactcatgctctcccttttggtatgatgaccatcatataaatcaatccaatttagaattttatggcgaaagacttagatcaatctgaatttgctttcactgtcattttattttgattgtttttatgatgcaggctgatgctgaaaacttgggaacaactgtatcatataacacagcagttatcagtgcacatgttggatccgaaggccttgaactccatgtttgcgaaagcaaagagctgcagaactgtcatgtagagtctcatgtgaactcacagattgttttgcttccgaagcttgtgataaactcagcaggtctgagtgcagttccacttgccaaacaattttgtggccttgaccaggcatttgtgcccactcctcactatgcgcgtggatgttacttcaccctctctcaaaccaagagtcctttcaggcgcttaatatatcctctgccagaggatggtggcataggggtccatgtcactatagatatgaacggccttgtcagatttggtccagacgttgaatggatatctgatggtggaaaggaccatgtgtcatgttttctgaataagtaagcaattacaaacatgtgtacattcagttattaaaatatgccactgttttttaagcaagagaccccacttaaatcgaattatgtttcccttccttttctatggggctgaaattttcatgctttttctaggaacacatttagcttcttggttcatgaccaaagaaggctgtaataagttattctagataccaccttttttaactggcatgctaatgcttgtattcttattttgcttatgatagaaatatagaatctgtagcaacttagtagtgatgatgataaggtatgttatagatatctggatgtctcataactgaacctgtgttttccaaagaaaatgcaattcggtgctgtaccatgcttgtcatcattcttactatcagcatgatttatggaatctggagcacaataatagagtattttagtaactatcacaaggtttctaactttagagtcttatcttcatcaggtttgattactcagtaaatcccaaccgctgttctgtattttaccctgtggtaaggaagtattttccaaatctcaaggatgggtctttggaacctggttattctgggatccgaccaaagctttctggtcctggacaacccccttcagattttgttattcaggtgcttactggtatcatatgtcaagtactttgataggcatctagctctatatcagatccaaaagcttatttttctcatgcacattcattactgattagttgaatgactgcagggatgggatgtccatggtattcctggactggttaatttgtttggaatagaatcccctggtttgacatcaagcttggcaattgctgaacacattgtttcaaaatatttgtgatgggagtctcctaaacaaatcttcattgttcgatgctccatgcattgcagaatgatgaaactgacgtgtcaggactagggttcgccaaagaaaataattctgtaaagaacattttcagccgttttctttttttccttgatcttttcagatgcttattgcatgtaattgttagaagatgaaattcactgaaagtttcagcgaaacatgaatatgatggggattcaacgggtttgacacttccaaggacggaacttggtgtgtagtctgaagagatcacgtgttcttttggggtactatcaatgttcagtccgcaaaaaaaagttttttggtactgtagcacatttgtaactctagtaattagtgtccaatcatgaactaattagccttaaaagattcatttcgcaaaatatatgcaaaaaagtttgtgaatggattcccccgctccataatcatacatggtcaaatatccagtgcagcaatcttcgtttattgtatggattctttcaaatcctcgtgttctttcattatacttcgacttcagaattatgccaacttgctggatagatggcgcaactcaacttctagtttgtgcataaaaaactgtggtcaagcccaacggtattatacatgttggtgttggatcaaattcaatagtttgacatgatacatgttgatgttgggtcgaattcaacagcacatc

SEQ ID NO: 4366 - DNA, 4948 bp, Sorghum bicolor
gtctctccgatacaacgcgcttagcctattgtagaagacaacaaagtgcggaagacaaccaagtgcttggtggcctacacccactgccctggcttgatgaccgccattagtgctcggacttgagtgtttaaccattagaaggaccttgcattcattttttttccagagctcccaagtaatcaagtcaaaaagagagtctggaccgctcctgcaatttcttgtccactacgaacaccaaacatcccaccaatcaacaatggagttggacggcaagagctgatgtgtctcacctaggccttgtttagttctaaaatattttacaaaattgacacagtagctctttcgtttgtatttgacaaatattatccaatcatggactaattagactcaaaagattcgtctcgtcaatttcgaccaaactatacaattagtttttatttttatctatatttaatacttcatgcatgtgtttaaagattcaatgtgacggggaatctgcaaaattttgcaaaactttttggaactaaacaaggccctagtgtcgtgccgatgtcgcgtcagacttgtcttgacaaagagcaggtaaccacaatgtgatcgatcgttctagctcttggtcgcagaggaggcatgtgtcgtgcatgtcaagtccatgtcgtcttctttggtcagcagtccaatagtgtcttcgttgaacaccaagccacaagaacaactttactcttaggtgcgcccatgacttcctgacgcaaccttgtaccgagtgaaaggccgagtgaagcactttatacgtcaactgtactataaacttcttgtctgatgagtgatgacaatctctagatgaactagtcgggtgcatctgaaagcgccattatctgaatggctctccagatgtacaggtagtcggcaatggctaggacagagatgcattccctgatctatcatacccaactcctgtcgatgagtgcctcaatgaccatctatccgtttatcaccctcgtagggtaggctctaacagagactgagagactctagatctagttgtccattcataatagtgtatatgtgccattatcgatgacaatgtaggtggacatgcggaagaatgtgcgaacttcatctgtcatctttaatagtagttcagtctaagctttctctcgatcagtcttcagcaaccagaaccacttagctttgaacgctgtcgtggccatgctaccatgagttttcaattgttctaaatcctatcattttaagtttaatcattttactgaaaaagattattaacatcttttatattaaggagataaaatataaaaaaaacataggactattttataatgtatcttttttgcaaagttttttataacgtgtctaataatgaagcttatttggcaaatacctagttccaaattataagtcttgcttatactttttctaaataccatcatttatctgtaggttacatattttttttcctatgcagctaaatatacgatatttttaaatacataataaaaaattatgtacctagaaaagctaacttgcgattaacgtaacctgtgaacatttctgctactcacattgccaagaaatacaattcctattttttgataaattaattattttaaaatttaactaaattatacagaacattaacagttattatataaaataaatattattaacttggttatgtagtatacgtttatagtaaactttgttagagttacagaccttagtattattctatttataataaatttggttaaatttaagttagtttgacttttataataaactatgtaattgtattctttttggatggagggagagagtattgcattatccgctggggatcgtgagaagtactcatacctacgaaccacacatgtcaattctcgaaatttctcacaagactgaaggcaggcgttggcctctgcctcgtgtcattgccttctagtcgaactgacgaactggcagagagctttcaggatagacacatggctgccgcctttaccgtcatctctctcctgctatcggtctgcgtccagggcgcggctcccgttctcagcttcacaaggagcgacttccctgaagatttcgtcttcggatccgccacctcggcttatcaggtaacggatgaacccgtccgggactcccgtgttcatggggctttctaggcaactaatttttctagttatttttgaaatgaatcgctgctgcagtatgagggtgctgttgctgaggatggtaggagcccaagcatctgggataccttcacccacgcaggttcgcgcgtcactcgtcagttggatttctgccaccgatgaaaaaacaaaaactggatactagtgacggtgattcatgtttaataatcatgcattgatttagttaccgagcagcctgagtacctgactggagtattactgtcactctttttcatccttgataacaggaaacatgccggacaaaagcaatggtgatatagccgccgacgggtacaacaagtacaaggtgaaaaactctggctgctatcgaggtgctggtttcttttactatgcctatcaagtatcaactaaccttttgtctgatctctaaatatttttattgaaaactctgtcattaaatataaaaattgatgtccttaatctaaacatataatttgtggcattgaagtactcttactactgagatctgctcatctctgcacgctgattgtttcagcatacggaaaggagcattcttgttttgtttcttgctttgaccttaacaatctaatgtttcaggacgatgttaagctcgtaattgacagtaacctggaggcatatagattctctatctcctggtccaggcttataccaagtataaccatcttttgtgcagaaacattatcatgtacaaatcaacaaatttctaggatcttcgattaaactttcttaaattaaatacacagatggacgaggtgctattaatccaaaagggttagagtactataacaatctcatagatgagctagctacacatggtatggctattgcaaataaattttgaatggtatttatatctggtaattgtatgaacataagcaatatcagtaactattgggttcttcaggtgtccaagtccatgttatgattagccagctcgatccccctcagatcctggaagacgaatatggtggatggttaagcccaaagattgtgtaagatccagtgactttagctggtaacgatatttttcccaaaatgaatttatcttgatcatccatgctaccacaaaatgcagggaggatttcacggcatatgcagatgtgtgcttcagggagtttggtgacagggtttcacactggaccactctggatgaagtcaatgtggctgcacttgggtcctatgatattgggcaaattgcaccaggaagatgttctgatccgtttggatttggaacaaaaaaatgtacagtggggaactcaagtgtggaaccatatatagcagctcataacatgctactggcacatgcgtcagctaccagactgtacagagaaaaataccaagtgagtaatcttgtacctgaaaacatcacaggtctcttaacattagtcctgtattgtttcttttttctcgaacacgcaggagagctaagcatcattccattagaagaagaaatgcacatagtgtacaaacacacccacccaaacacctgtaaaatcagaatcttatatcgtgacatctgaaattgatccttataaagatcttacatttgaatacgttttgctcatgagccaaggcatcagtttctcttctaactacaccaacaacattccctttggtttcttaaaatgtttatcagtcatatatttacacgagcataaaatgactgacttgtaggctgtacaaaaaggagttgttggcataaatatatatacaatgtgggcatacccactaacaaactccactgccgatttagaagcatctcaaagatttctggacttctattgcggctggtatctttttaactcttgttgcctcacaaatatggaacatttacagagataattgaaaacaagatgtatcaattgtaggatactagaaccattggtgtttggagattatccaagtgtagtgaagaagaatgttggttctcgccttccgtcattcagaaaagttcaatctgaagccattcgtggcactatagatttcattggaataaaccactatctttctgtctatgtgaatgaccaccctttagaaaaaggcatccgtgacttcgtactggacgtcgctgctgactatagaggtaaagcaatttgtcacttgatacaggattatccttttactgcttgcaattctttagatacatccctgggacttttgattcattcatctagtgtcacatacacaatggcctacgaaaattcaacatggtatcacatggaccaaataatttgctgatgcttctgaagcatattttgcaatgttacgaaacctacaagctaaatgctgcatctaaccaaaagattatttgaagcagtttcgagaacggatccgccagtaggtcaggtaaggtttttcatcgaccttgtacataaatttctttcgtcttaattgagcagcagagctctttgtttaaaaaaaagggttttcatcaacaatttttcagaaatgctgatgacttgaaacttttcagacattaagctgtgcaattaggaattcctgtctaacatgggaagttagataaaaacacactgaatggtcctcttatttgagtgagtaatatttggaacttttcaatgctgtgacacatacagcctcttcattttactgcagcatgccccaacatctattccggctgatcccagaggattgcaacttatggtagagtacctgagtgaagcttatgggaaccttcccatttatatccaagagacaggaaagtctatttccgagctgca

SEQ ID NO: 4367 - DNA, 6300 bp, Sorghum bicolor
ggtggtgggcgcagagctggcatgtgtccacgggtccgtgggaagtgcgaaccccacctaacatccgcacccgccaccaccgatctttggctgctggtcaacgacacagtcggggcgcccgtccgtccaccaagagcttttggtgatttctgatttgtgtgtatctcgtacgtgcatggagcaacgctgcgctgtcggatgcgcgcctcttgctcagtgctctcctctagctagggatggctggcctggacggacgtacacgtacgtacaatacaagtaggcatgcatggcgggcggcgttgtgcattgcgaaccaactgtgacgcagcagttggctcggttaggtatttgggtgcacgcccactcgataaaatacgtacagcactgatcatgcatcaaacaagtcccaatttgcatcgcaggtagctagtagtgtacgagcacacggcaggattcctccctccgacccgatcctcggtacgtagcgcgcggacgggaaatgtaaaaggagatcacatcgtgcgtggaaacgagagtgaacacggaagatagtgtgtaatccactgcgggtgcgggatcccacgtacgttccgcgtcttttttcccacggcgcagtgcatgtacctaacctaggccttgtttagttcattgccgaaattttttcggtacactgtagcactttcgtttgtttgtggtaattattatctaatcatagactaactaggcttaaaagattcgtctcgtaaatttcgaccaaactgtgcaattaatttttaatttcgtttatatttagtactccatacatatgtctaaagattcgatgtgacggagaattttgaaaagtttttagattttgggtggaagtaaacaaggcgctagtaacctagctcccccgatcgacatcttggtcgggatagaaagaatacgcttttcctcgctgcaaggcacgcacgcagctcctcagcgaggatgcagtggtcatcaacaccccgtgacagccgacacgttttaacggaacaatcttttgggcccgttattcgacgagagcccatgaaagtaccacgaacggatctagtagtagtacgtagtaccatcctgaggggcctgacacctcggcgactttgaactcgtgaattgacatcacatcggccggattccgctcagactcacctttggacgagcgtacggtacgggcagcacgtacgtagtacgtggacgacaccgcggaccgcacattctcttcttgaagtcgcggatccggatcgtgtcgtggtggaggacggttggtcaatccccgcccggatcctggcgagcgcattggccaccgcgccaaaagctatctgaaaagaatgcaatgcagcgcctttccccttttttcgcacgttatcgctgacctcgtttcatttccacaaggggcagtcgggtgtggacgtcccttgcctcgctcaaaattcttttaacctacccaaagagatcagctttggatccccatatccatccatgtgctaaccattctacactcgtaccacgagcttatttgcgggtcattgtttttattttttatctttaatttatttgattgataataatactttttcagtagtagtattatttgcactctctgtttactacttttgagtggctgggccctgttttgatccacattactaatggagtagctagcaactcataattaggaagtctagatctcaacaggccaccagctaatttgtgtgctaactagtaatgtggttgctttttaggcccactaagcatgagttagatgggctgtaatcctataaacagtgacctgggactagaactactgtacatcccacaggcccaaggaccagcctagaactagaacttcagcccacaggccgaacggccagcacgaaccatcccctcaccggcgacaacagaaacagaatactagccgtccgatcacagcgagatattatctctccaagctccgtccgccgtccgccgcccgccgcaccgtgctgccgttcggctaaacccggccgcccgcctgcggcactgcactgcaccccatcccgaagccgggagcggaggcgcaaaaccctctctctgctgctgctccggcaccatgggctgcgcctccaagctgctctcctccctcctcctcacctcctccccgctccgcctccgacccaccactactgccgccgccgccgcgctcttcctctccccgcccgcggcggcctcgcgccgcctgctcctgctctcctcgccctccccgccccgcaccctctccacctcgtccgctgctgccgcgtcctcctcccttccgcacggctccagctcggactccccggcgccaccaccccgagctcctttccccgagtggtcccgcctcgtcgaccgacttgccgccgccgggtacggctccggcgcgccctttcctgatgacgagctcgccctcgcgtccggatgcggtctgccggacggggcgcaggccgctgtctccacctgcctcgccttcgcgcttgaccggcctggcctcctcaggtgaagtaaatcgcttggctggctggctacctgactgagctttggcggggttcaagttctcttagttgctgtcttgctgactaattcgggtgtgcgtccagttcgcttccaaggaaggatgtggaggtcctggtgaccaatgcggcgccgtctctgttcaaggatggggaggcatcagcacagcggcttcggcgctaccttgctggggaagaaatcaatgtatgtcattgggcttccgttaattggtcacattgcagcattgttagtttgggctagtaaataatattagttcagtcatcggcatgttcatcagtctactggaatatgaccttgctcagctaaacacactaaacattggaaaattttgccaggtcattgtttcagagagagctgaaactgttgatattgttcgatatctgctaagttacacatacggttcttctgacagctacccagaagacaaggaactcactgattctgctgtgagaaatatcatggctgagttagtcagttttagtggtccccagtcttccacttttgcggaatcaactcccaaccaaagttgcttgagtcagcatgaacgattttccaggcctccagggcaaaatattgaaatgaagcgaggtgactggatttgcacaaggtatgccacttctaacattcttcttcttttctttaacatttgtgctccgcccaatgccttgcattaaagtataccctgttattcattttgctactagatatgatgcatctaaaaattaaaatgtgtacccagatgtttcctttttattggtaacctgataccattgtcacactaacttttaactttctacctgtttcttttatatatataatactccgtgggttctttcatctgcaactcattttttatgaaaattgctctgcaactcgcagatgtagcttcatgaactttgcaagaaatgttaggtgtcttgagtgcaatgagcagcggccaaagaagatgttgactggtggagagtgggaatgccctcagtaagatctgacatgctaattgctaaattatttgtattaagcttatataactttgacgaagctgactttgttttgtccttttgctaaggtgtgatttctataattatgggaggaatatgtcatgcttaaaatgtgattgcaagaggccagcaacaatcccactgaatcctgcatctgttggtgctggtttaggtggtgtggcgcagcttcttaatgtaacgagtgttggtaaatctgaagttgagagaaagcttgctgaaaatgatgaaaaggcagaaagatggttgagcaaagtatctcaacttaatgattcagctgacttaagtagtctagcagaagatgaggactttcctgagattatgcctatgcgcaagggggtgaataagtttgtggttagcacgcgcaaaacaccactggagagaaggcttgcaaatgcacagtacagcagcaacaatagccccacattatctgacccaaagataagtcaaactttggacaggatacttgggcgttcaactcctactgcagccccaaacaatcaatctgttactagtgacaccaccactgaagctccgaagaaatcaatagaccacctcggtggcattgatcctgttccatttgtgcccctgtctgcagatctcttcgctaaaccacagagtaataatggacagagaaatgagaatgaaaaattcagtgcagaagatgacagttccatggcaaataacacagtgcctttacctgagaggaaaagtacggaatcattagataccactgagaaatggtccgagaaagtagcagaactggacaatgtaaaggattccccaagtgcaatttctgatgaaaattttcctgagattatgccaataaggaaaggtgaaaaccgatttgttgttagtaagaaaaaagatcgctcattgacatcacaacagtacaaaaggcgtagtattcttgagcaggcagacagttctgattttgtcccatttgttccatttcctcctggctactttgcaaagaaagatacgccaataaagagtactacagacacaggagttatgtcagaaggcagtcagccaaaaggtaacctgaataatgagaactggaacagaaattactatcagcatcaatcacaatctcatggggcgcaatctaggcctagtggtactgcatatactggcactcagatcacgggcaactcccaggggaactataatggtggcagaggtgaatctacttaccatgaaactaactttgaacagcaaccttataactcaggttatagcaacagcagttattggagcagtgataacaaaaacagcaacaattcctggagtgaaaacagcagttataataacaataatgcttggagtggtaacaactcctataacagcagtactaggaacggcaatagcagcgacaacagcagtcatggttataattacaatggtacatggaatgacagcagcaacagcaacaataaccaaagtggttcatttgctgataataacagtgtcagtagcagcagtagttccatgaatgctaatcacacggttcacagttcaggttatgaagggaactcaaacagaggttatactggaaagagcttggaaggatctgctgtaaaggatcctgatcctctagacatgtctgaggaagctaaggcagagagatggtttaggagggcagctcagataaaggacatctctgagctagcaaacattcccgacgaggacttccctgagataatgccgatgaggaagggggtgaacagattcgttgtgagcaagaggaagacaccattggagaggagattaacatccccgcaatacagaaggaacctgccaatcgtcagttctgaaatggacaaagatgccagctgaaagcagaagtatgattgcccgcataccacaatcttaactgcgatgcgatgcaccatttttacaccaaggtattgctcaataacagtttgtgacgataagcgagcgatcagaaacagaaatcatgaaaaaaataatgccccaggaatggttttttgtatggtaaaattttgttcgctatgacctggggtttgctggattgtgtttgctgcatgtatactatacacatttgtgttgtactaaaaaaaacttattacatgcaacccgtggatcggtgcgtggcattacaaagttttggcttgtctgaggatacatttgtactaagtttgttcataaatccggataccataatatattctactaattggctttgatgatgcaaaacatgtcagctttttataccttctttagcaaggtttttgctagggtttccctaccggtttaatcaaaagctctatcaaacctgcacacatgagaacagcttgcaaaactaaaaccaatgaagccaaagccattttcgcctagaagtagaatccacagaaacatgaatttccttaggttgtccgttgttagtttagtctaagtcatagtttgcctcttaccggtatgcggtatatagtttgagtgaaacaagttgtatgattctgcattgatcaaaaacaccatcacggacagatctaaaacaaattgaattattacgagacgatttaaaagacaactcattataaagattgcccgtgtgaagttgtatgcatgagactaatatacacccatgtactgaccctaattgggacaatggttgcagctcacgagattacatagacagtgctgcaacactgacagaattgggcctgataagcaagcactacggtggatccta

SEQ ID NO: 4368 - DNA, 4054 bp, Sorghum bicolor
aaactgtggggcaaaacaccccagcgaataaaattcaattttgcctcttgacatgggagataataacaattaaaaaggtaaaaaagtgcaataacccaccaataggctgggaggttttttaatgaagttggtatgctactgggacataattaacgtggtaaggttgcaatgaaattttagagagcttctcctcatcagaccgaacaattttgatgactattgaatctcaccaaccaaagcaagcccaggaaccttaacaattttcctctcatccaataacttccgcgcttgttcagcatcactgaacctaccaagctcattaagcacattggacaacaccgcaaaatcacctccggattctctttctaagtctgatatcatctttattgccctcttccccatctcaacttctccatacttactgcaacaacccaacagtatcctccatacaattacattaacctccacaggcaacccttctattatttgctctgcctcacacaaacgtccagccctacctagcatgtctatgatgcacccaaaatgcttgatctctggatctatattgtactcataaaccatgcttttgaaaaacgctaacccttgctctaccagccccccatgactgcaggcattgatgacactcaagaaggtgattctgttgggcctaatccctgctcttctcatctctgcaaacagctcaagtgcctcaactgacagcccatgcattgcaaaaccagaaattattgatgtccatgacaccaagtttcttctatccagcatttcatcaaacaccttcagcgaattttgcacagaaccaatcttagcatacaagtctatgagtgaattcccaacccgggcatctgacatgatacctttcttcacacaatagccatgcagcatctcacccataaggattcctccaagattagatattgcaggaacaactgctaaaacagttatctcactcgggctaatgcctccagccatcatgtggcggaaaagagcaacagcctctgcataaagacaagcacgtgtatatccatcaatcagcccagtccatgaaacaacattcctgcagggcatctgatcaaacagaagccttgcatactcaatctcaccccatccagcaaagccagtgatcaccacattccacgaaactacattcttcatcggcatttcatcaaacgccttccgtgcttccaccaagcatctggacacaacatacacattgacaagggcggtgtgcacgtaggcatggaactcgaaccccttctggatcacgagcgcatggagctgcgcaccagctcgaggccaccccagacccgcacaagccttgagcacaaatgtgaaggcaaatgtgtcatcagccaggtgctggcgcgcatgcctgaagaggtgcagagcttccagggggaaaggaccgtgggagtaggccttgaggaaggcgcgccacggcgtgggattacggtcgaacacctggtgggcaataaactgggtgtggatttggaggagttggcgcctcctgtcttggtgcctcaggacgagagcaattaggtcgcggaggcgagggctagtggcgggacggaatggtgggcttcgttgccgcaagaggtgggagggagagagccatgtcatggaggtagtagtccccaaaccttcctctaagcaagcatcaagtgccagaaatcagtaaatcaggatcactacgcactgcaagcatggtgaattcggcgacgcagcaaagggcgcgcgcaccttgagaggcgtcgccgagggtagtagatgtcggcgtggatgacctcgctgttgcgggaactggtgccggagctggaggctcgagatcgacctcaggcctcagcttccttctccagcgccgtacaattccaaggcgggacgaaagtttagtcttggcctttggggctttgacaggcgacgttccatgacaatataacagcagcctgacacagcgggcggcggccagttcctcttcctcctcgatgttgcgcagagtcctcctcgcgagagcgatcccactctcctccgcctcctacgggttccccaaaccgctaagccctcccctccgcatcggtggaccgcgcctagccacttcttccggggaccccgtcgcggacggtggcatcggcggcgaagatgaccctttctccttcccggaccactaccacaagcagctcccgcccgatgtcgcccgaggggtggacgccctcgtagccgctgccgaggctaccggctccagtgccgcgggcgccgcgcgggccctcgacgggtgcggcgccgaggcgtccgagccgctcgtggtggccgcgctgtcgcgcctccgcaacagctgcgccgccgctcatgctgcgttccggtgggccgcggcgcagcccgggtacgcgccgggtcggcgcgcgtgccactccatgctcgccatcctcgccaagcaccgccgcttcgacgccgcgcgcgccctgctcgacgaaatgcgccgcgcgtcgatggcgtctccggccgcggtactcctcctcgtccggcgccactgcgccgcgagggacgtcgcggcagccgtcgctgccttccgagcgctcccgagcttcggattcgacactggcgtcgccgagttccatggcctcctgagcgcgctttgccggtacaagaacgtgcaggacgcggagcatttgctgatatcctgcgagaaggagttccccttcgagaccaagagcttcaacatcgtcctcaacgggtggtgtaacattgtctgcagcttgcgcgaggcgaagaggttttggagctccatggagaggaagggcattgacagggatgttgtgtcgtatgggagcatgatctcctgcttctcaaaagctgggagccttcactcagtcatgaaactctttaaccacatgaatgaggctggcgttgctccagatcggaaagtgtacaatgctattgtgtttgctctagccaagggtcggtgtgtgaaggcggcaaagatgcttgtcaggactatggaggagaagcaggttgccccagacacagccacttttaactctctcattggccccctttgtaaggctcgtcaggttcaggaggcaatggaaatgtttgatgctatgttagaaagggggctgtctccttcagtaaggacctttcacgcgttgcttaatgtggctaggaactctactgaagtgtttgatctcttggataagatgaaacagttgcagtgtgagccagagatggacacttacattatgttgatcagaaaattctgccggtggagacagcatgagagtgtggagaagttgtggagtgcaatgcctgcaaatgggctgagccctgaccggagcgcgtacattgtgttgatacatggtttattcctgaacggaagactagaggaggcagcaaagtattacggagagatgaaaagtaaaggcttttcgccagagaaaaagactgaagaaatgataacggcttggcttgaaggcagagagcttgcgaaggcgtcagttagctctaagggtggttcagtgtctctcaagcttcccaaaaagtaacaagtttaaggttagcccttatgggcaattcataaaataaatgaaacaaggtaggagggcgcttattgttattcctgaagaactgctaaaagttcaaagagatatttttactgcacaggaaatgggtgctactgtatgtttggcctagttgttttccactttattgataagttgaaaattggaattacaatggcaaggcatgtccaacttcaaacatacaagctgcatgtgattttctgtatttattcacatttacattttagtctgcaccctgcagtcctgcactgactacatgctcaattattggcatacaaaacttatcctgaagcatggagggctcatgcctgctaaatacttccattaatgtcgaaggggcactacagtttcattttgcagaaggaaatcagggaaaatgagatgaagattttgctttcatgtttcttggatgccccaaagcaaagctgcagatagcatccatcgatccattaaccggtagattc

SEQ ID NO: 4369 - DNA, 7343 bp, Sorghum bicolor
aggagaggcgatgacacaagcatggtaggagcaacatgtggtgacttagcttcgtgcgggggaggttgatggcgcaaccatggccctgtgactgcacaagcatggttgaaatagcacaaccttagtacacgacgctatatagccaatgatgcttcatatagagtcgtgggggtagtgttggcgccacacgagagtttgtggccgcaaccatctctaatgatggcatccggcatgtcgccgcaacccgcaatgacgaccacaactagggatgaatcctctccatctgtacgtgtctttgccgatgccaaacttgtcatgttgcatgtacgagctaaataggccattgagtcctcgtggccacctcatgcgccatggctgaggatgaagccacctcccttcccgcatgccttgccaagtgggatggatcgaacattgacatcatagtcacattggtggtggcggacaagagcgttaggaggccgtaagaaatgagtgaagaggagagaagagacgaaaaaaagaaaataagtaaaggaattttctcacaagtgaatctaatatattaggagaggctccctatgctctgtaaaagtatttttatccaataattaatttaaaatgtggtattgagtcatccctattttaggggatgattgagactgctcctgtccatatttttttcagattggttccatattttttaactaaaagggttcagctccatgcaattctgcttcagcaaaaaaagtgaagttgtgggagcacctaaagagatgttccataaactttattttttttatagttgctctacgatggagtttatggaataaagttcctggagtagacttgtttcattgtagagtagaaggggctttaaacaccatatcttgttgcttaaatacagtatgtgcaacaaatatacggccctccgtccgcctttggtggctaggaagaaaattaaaattttgcccttatgataagtggatttcgctaaaatgtaatgaaagttatgggctttgtcataacgcctcttcgaaatgggtgcttcaccctattttaccatttaacattttttgacaagttttaaaaactttcggcccaactttttacttgctgtgaccgttttcagggctgaaaagttagagctgaacaattttcaatgttgtctaaaaccagaaaatgacacaataggaggcattctgacaaaccccacaatttaatggcattcgacgaaacccacttgcggcaaaattttaatttctcgtggctggatctgacgctttcacgcatggccccttccaaaagtccaaatttctctcggctggttctgacgctttcacgcgcggccccttcgaaaagtccaatttcccgtggctggttctgacgctttcgcgcacgcgccccgtcgaaaagtccaaagctcacgttaaactctatgatatgatccgcagtggggccgccgtgaggtggactatgcttgttccgttgcacggcgctgatcaccagtgggcctcacctgggccgggcgatagccgcccaccatcattaccgtccgataccaggggcagaataaaactggcggatctccgccgtctggatccacaaacccggcggagccattcctcattcgaaccaaagcccatcttttccttctccctatataaataaataaaaaacttattaaaatataaaataagatatctcaccttctctacgcacctcggccgtccgatgactccatttgttcccccggagcaccgatcctgccgtccacttgttaaatcgcctgagtttaagtcgaagcaccatccttaaatatagcaattataatttttttattcgcatctcacgtcgccgtcgcgtgtccttattaataccgccgcggcgtcgcacctccctttgttccatcgcccccattgctcgccaagagttcttcttgttaggcaaggcaaaagcagaagcaaaaaggtaagaacagtctcagattcctccctcattcgcatgtctctcgatttctcgatgcgtgagatcggctaccatcatccttcgcgtctgatttgcttctcttctcgtatatttgtaacaagagatctgatctaaacctgattttaaaatactgtgctggtcgacgagtcgcaatccgccatgcgaattaactgaatagggtatttttgcattacgtgatcagatctaattgattatagcgacgccgtgtggcggattgtgaagccaggtgcagatctgtttggttatgctgcggatttgctgctcgtctaacatgttgctgactgctgtgtgttatttggtaggtctcgttggcgatggcgagctcgggagtttcgtggacgctgccagaccacccgaagctccccaaggggaagccggtggccgtcgtcgtgctggacggatggggtgaggccagccccgaccagtacaactgcatccatgtcgctcagactcctgtcatggactcgctaaagaatgtgcgtatgctttccttaacacctgcccttctgttttatccagtatcgcaaagaagaagtcattgtgggattgcatagatgctcttttttttgagtgtgtattagatatcttggttctgattgttgctagcactggttgcattattatcgtgagcctaattctaagctccagttcagtcatgacggatctaatttcaattaatactggtatgtaatggcttttagatttttctatataatcttgattaaggttaagttctacagattaaggttaaatgcttttttccataccaatactcactgttatgcatatggggctctgtgccaagcagtgaatgctgagtttttctctgaagtatggacagaagtttcatgcagccttgtttagttctcaaaaaattttgcaaaaattttcagaatcccgtcacatcgaatcttgtggcacatgtatggaacattaaatatagataaaaaaaactaattgcacagtttgcatgtaatttgcgagacgaatcttttgagcctagttagtatatgattagacagtatttgttaaatacaaacgaaagtactacagtgtccgttttgcaaaaaaaaatggaactaaacaaggccggattgtctgaaaatggttatgccctgaggttaccgatgttttgaaagtgtatccattcagttgcttgtttgtccattgtctcatacttagtgttaatgaaaaataacatggtgttgcacataacctctgcttctgcttttttctcttggatgaaagattgttctgtcggcattatttgatttgcaggtatactgtcttcatgcttttactcacctttttgtgaaatatatacattagggtgctcctgagaaatggacactagtgaaggctcatggaacagctgtgggtctcccatctgatgatgacatgggcaacagtgaagttggccacaatgcacttggtgctggtcggatttttgcccaagggtacgttagatatttatttatttatggaaatattttgttgttgttgtaataactaatgcgctgtggcttcaatattacatttgaacatgaatgcttgcaactatgtttttcctatacaggccaaacctccccgtgagataggcatgtagttgctaacaaataattttgtccatataagattcaaaatctttgaagcttggtacagtacaaagtatttgcttcataaagagaatggagcctgtaacttagtattcttattgtcatcagttactagtttcattgacacatcattgattttattaattttcttgctttgagtaattgctgaactaggacacctctcttgcatgcgctgatttgtttctcactactgcagtgtactttttggctcaacatttgaattcatatgcaataaagaacttgatcttagtgtgctattttgtctgtcatgttagtcttaaataaaacctttagtccttaagagttcataatagatgttctatgatctgagagctgcattctttctgcctatagtgctaagcttgtcgatagtgctcttgcctctggaaagatttatagtggagatgggttcaactacatcaaagaatcttttgaaagtggtactcttcaccttattgggttgttgagtgatggtggtgtccactctcgtcttgaccaactgcaggtttgctaataatctgttttcaatttgtttagttaagttacaagtttaccacaagatttacttttttttggctctatccagttacttctgaaaggtgccagtgagaggggagcaaaaaaaatccgtgtgcacatccttaccgatgggcgtgatgttttggatggcagcagtgttggtttcgtggagaccctagagaatgatctttcggagcttcgagggaagggtattgatgcacaaattgcatctggtggtggaaggatgtatgttaccatggaccgttatgaggtgaacgtttttttgtcatattcaagcatcagtgttcattgtctaacacctttgccatattcaagcatccgtgttcattgtctaacaccttggcttacagttttgttttgtttaataccttccagaatgactgggatgtggttaaacgtggctgggatgcccaggtgcttggagaagcaccctacaaattcaaaagtgcacttgaggctgtgaaaacactgagagcacagcccaatgctaatgatcagtacttgcccccatttgtgattgttgacgacagtggcaaagctgttgggcctgtattagatggtgatgcagttgtcactctcaacttccgagctgatcgcatggttatgcttgccaaagcactagaatacgcagattttgacaaatttgaccgtgttcgtgtccccaaaatccgatatgctgggatgcttcagtatgatggtgagttgaagcttccaagccgttaccttgtttccccaccagagatagatagaacatctggggagtacttggtgaagaatggcgtccgcacctttgcttgcaggcaagttctttcagcctttctcttgatactttttttttgtttacttcaatattgtaaaccacttagtttttctgagtcatctaagttcgcatggttcatttattttgaatcaacattatctagtgtagtttttacaatcttgtacatacctgtgaggggcacttgccttctggaaagatattgtcgcgagttatatccattaccatatactgcatccgtactagtatatttcatatttgtagaaacaagttttttctagggttcttgctgcagaggactatgctgacattgtgctaacttaggctgatatttggttccattgttctgtccatgatttgttccttaatactgtatattagggctgcataatgttgtttttggattgattcatttctgtatcatccttgtgcttgcaagacatttgcctatccttttttttacttattatgcggcaacattggtttgtgtggcagtgagacagtgaaattcggccatgtcacatttttctggaacggcaaccgttcaggatactttgatgaaactaaggaagagtatgtagaagttcctagtgacagtggtattacattcaatgttgcacccaagatgaaggcgcttgaaattgctgagaaagccagggatgctctcctaagtggaaagtttgaccaggtaaatagttctgaaatttctattagatgagtctttctgaaattagtttgaggagggaaatagttctgaaatttctattagatgagtttcggtttccctgttgctaagcatattgttgttataggtacgtgtcaacctgccaaatggtgacatggttggtcacactggtgatattgaggccaccgttgttgcttgcaaggcagctgatgaagctgttaaggtgagagcatcaataaaagtttgcttacatgttgtgtgttgtcttcataatctgcattgaaagtttgcttatacatcaataaaagtttgcttacagtagcagactttataggcctttgcctattttaaccaaatgctcttctgaacagattattttggatgctgtcgagcaagttggtggtatttaccttgttactgccgatcatggcaatgcagaggatatggtgaaaaggaacaaagctggcaagccattgctcgacaagaatggtggtatccagattctaacctcgcatacccttcagccagtgagtgcaataccatttgaaccccatgtctttggttgtctccaagtaaaagcgtacccatgttgattgcttgatgttgatgttaatgcctctgtaaaacttgcaggtcccggttgccattggaggccctggtcttcactccggagtgaaattccggaaggacattgaaacccctgggctcgccaacgtcgcggcgactgtgatgaacctccatggatttgtggcccctgctgactacgagcaaaccctgattgaagtggctgacaactaaagactggccagctatgcccaattttggttctatagtttgagaatggatatggccatgtcatttaataatttatgtttgcaagcacgttgctcaaactcagcaaaacattgagagatgccttttgacttgcatttagatgctctatttataccgatgacagttgtatgctgtgctggcttttggcagtttgatagctatctttatttagctatgtatactgtatctgaggccgcaaactttgtctcagtctaaaattgctcgaggttatatactgtttgtgtgagtcatcactagtgattaccttttgcctcacgccttgacgaacgagttcgttaacctgctgagaatggactcatggtactacggtaatagcttttgtgggaaggtgcagtaatactgagatggcgagctgtcagcttcagataacatctcactatcgagcgagctaactagggcattttgatgatatacatggttcaagacctgttctgaggccttgtttagatacgaaaaggttttggattttactactgtagcactttcgtttgtttgtggcaaatattgtctaatcatggactaactaggattaaaagattcgtctcgtgatttacaggtaaacttgcaattactttttatttttatctatatttaatgcttcatgcatttgacaaaaaattcgatgtgatgagaaattttgaaaactttttgagttttgaggtgaactaaacaaggcctgaatttatccatacatgtttggcttttaaactccatccgtgcttatctttgaacatcatcttgccacgcctagtagcctagtaggtaaccaaaattaatgacataacataccgggaggtgctggacggaggggcgcgcggagggaattggcgttgggggaggg

SEQ ID NO: 4370 - DNA, 5418 bp, Sorghum bicolor
ggcagcggttttcttttctgcactcgtttctttcagggcttgagaatttgcttctaagattggtatttcggctggattcagcgccgctccccatttttggtagagaatttagcaagggatgtataggttattgtaggctactgcaatgcagtttgttgtgttcactccgtttgcacaaaaatcacagtccgtaatctgataaaatgcgagcttggtttgctgcggtcgattcttcttccaaggaggacaagttgacctttttttcatttcctaagagttaggtaatttgaatcttccattaatcaaagaacaacttgatccgatcgaaaaaaaaaaccctctggaccagtacttggtactactctctggagtcattgtttgtttcattgttactttgccttttctagatgtgttagcaactccttttttttcatatggaaaaggatttatgctattcttgtgtaaatgttgtttgtgtggttgagacagtcacatcttcactttactgggtttacaatcggttgcgcggtgtgagatggattcgtgtaggaccgtgccagcctatagcccatccagcccatgagaacaacggcattaattcacctcagcccccaccaaagttccaaagctctcgtcttttctcatgccccctttgatttcttgcattgcatcagagagctttagcttttactatgtgctagcctttagtatctgtgctgtgccatcacttttgttaagcatttggttcttcagaacgtaacggcatgactgctgcgtcaggcgtatatggaaggtttggtgaggtgtaacctgtagtgcagtactatatgctggtacatgagggagaccacctccaagtaatggaatctagcagttttccctttgggagactttggcaaaacagttcttggcattatctgctattgttttcttatgatgatggttagttagtactaattccaatgcttggaggacagtttttagtgagcaacttttatagttaatatgttaagataatgagtaatgtgctttattaaaaggaggctcgtgactgatgaatgatggctactttctgatgtgatatgggtagtttgcttttgtcatatgctcctgatcccaaccccaactgccctgtttaaaaagaggaagataaactatggcaggtcagtttgatggttgtcttaggttgagattagaggaaaagacaatgagggtcatgtgtgtttccttttggagatgcgcttactactggcagttgagaaatatgaagcttttgaccatggtagctccgtttgccaaagtgaattattctggattatgcaaagtcttagcgtaggtaggtatagcttgagtgtctcccaatgccaccctgaaggcctgaaactcccgaataatttgtcatgttgtataaggtttcttatttcgtgttctaactaacgcagtattttttttgtagttttagggagtcacaattatgtttaggccataacagtagtatttcgtaatagaatatctactagtatttctttgctgactaaggattctgtctttgaaatgaactaagatttggccttgattttgaaaactagggagacatgctactggtggattgttaatacagaaaatgtcccactccctacctatctatttttgaaagatctttgtatttttgggatccaagtattgatgtactattttctgcaatattgccaacatgtgcaagatgtgctcctcacacgttttttcagatttctcaggttctcttaatcatctttatttttcttattaggaagttagtgatgaaagtatatcagagggcacgatcttatgtatcatgcttactatccttatttccttcttctatatgaactatgattttgttgttatgctctattttcactaacttttgtttcttttatatactgctagaggaatgaagttatgatggaaaagtttgtatagtagcgctgaatccagttctcttcaagcaagtgtcaaccatgcaacatcttacagtgatagcctttttggctgcttctctcctcattgcaagcattccacatgccaaaagtgctgatctgaactctgacaaacaggctcttctcgcatttgctgcatcactgcctcatggcaggaagctcaactggagctccaccacacctgtctgcacttcttgggtgggggtgacatgcacaccagataagagccgtgtacatacactgcgcctacctgctgtaggactttttggtccaataccatcagacactcttgggaagcttgatgccctggaggtattgagccttaggtcaaatcgccttactgtcgacctccctcctgatgtaggatctattcctgccctccattccctctaccttcagcataataacctgtctggaatcataccaacttccctctcttccagcttaacgttcttagacctttcatacaacactttcgatggagaaatcccattgaaagtgcaaaatcttactcaacttactgcattgcttctccagaacaactcactttctggacccattcctgacctccaacttcctaaattgagacatttgaatttgagcaacaataacctcagtgggccaataccaccttccttgcagaggtttccatcaagttccttcttagggaatgtttttctgtgtgggtttcctttggaaccatgttttggaactgcacctactccttctccagtatcaccaccatcaaccaataagaccaagaagagcttctggaaaaagatcagaactggtgtgctaattgcaattgctgctgttggaggggtattgttgcttattttgattatcacgctcttgatatgtattttcaagagaaagagacacactgaacctaccacagcttcgtccaaaggaaaggctattgctggtggcagggcagaaaaccctaaggaagactacagcagtggtgttcaggaagcagagaggaataaattggttttcttcgagggcagttcatataattttgacttggaggatttgttgagagcttctgctgaagtccttggaaaaggaagttatggaaccacctacaaagctgttcttgaggatggaaccacagttgttgtcaagagattgaaggaagtggtggttagcaagaaggattttgaacagcagatggagatagttggtagggttggccagcatcaaaatgtcattccattgcgggcttactattactccaaggatgagaagctgttggtgtttgattatgtcccatctggtagccttgctgctgttttgcatggtacgctcattattttgccactttgattattacttggtcaacactatttcttaatttctaactgttcaacttgttcctcaatattcaagctaggaaatagactaatacacacagttcaaggttattaaagatttagctagaaaatcacgaattaaaaccagaatcaatgctactagtgggtttgggacagtgaacctttaatgctttaacataattagtaaatctggaatgattcctgtagtaggtatagtagttgtttttatcatcatccaagtttttctaatcagattgtttcccaagaaagagacaatactaaacattattacacttctgtttgaattgtgctcttcaacctttaccatcagaagaaatgaactaaagtggtgttctgtaatctgtgccagacttgccactaaacctgtatcaaatctatgtgttagttcttcttttaatcatatgagaactactgttttttcttctcctaagaaagaatcgactaaacttatcaccatttatcctagctacccaccttatccttttccttttaaatccatgagttggaaaatgcatgtcattagcattcactgcgagtgtatcaataagattcaggcatttagcaccatgttttgaatttaatttatgccagaaacatcattctctattgacaggaacctgtatattttctatggcttgtgaaatgaaatgacagctgttgcatttcactgtaactactttcagggaataaagcttctggaagagctccattgaactgggagacaagagtcaagatatctctggatgtagcccgcggtattgcccatcttcatgctgagggaggagggaagttcatccatggcaacatcaaagcatcgaatgtccttctatcacagaacctcgacggctgtgtctctgagtttggcttggcacagatcatgaccactccacagactgcgccacggcttgttggataccgagcaccagaagtcctcgagactaaaaaatccactcagaagtccgacgtctacagctttggtgtcttgctccttgaaatgctaactggaaaagcccctctcagatcccctgggcgcgaggattccatagaacaccttccaagatgggtgcagtctgtggttcgtgaagagtggaccgctgaggtcttcgacgtggacttgttaaggcatcccaacgtcgaggatgagatggtccagatgctccagatcgcaatggcatgcgtggccattgcccccgagcagcggcctaagatggaggaggtgatcaggaggatcacggagatccggaattcttactcttctgggacaaggacgcccctggaggacaagccagagactgcacaagcaccatgagggggtacagcatagtttagcaagagatggtagctaggttgcatagcgaattgcttatagagcttcagcaaagttgataaccacctgcattcccgatcgtttccagtaaatctgttgtgcattttttttctgagtctagcgagctgattgataatccatgtcattgtattgttcagttaaatcagtagctcttctgattttcataggatagtgttgctctgtaatttgacataatctctgcagcgtgattaatgaattgaatttcccttctatttctgcccgtcatcagtcagatttcgcggtgcttgatgtggtctccttttcctgtccgtttttcttagggaatttttggtccgtagctcctgcttgttggaaagatccaaaccaaaggaacttgttgcttgatctggtggtagtaactgttgggacctgagtgggtgactcctagaggtcacatttgttaaccggttcgatagcttccaaccactagttggtacatcacgatgtgatcttgcccgtccgccaatggggggcactacatccacatgagaaggcagaaatggacgtgcaaaaacgactgatcgcggcggacccaactaggacttgtttagttccgaaaagatttcggatttcggtactgtagcactttcgtttgtttgtgacaaatattattcaattatagactaactaggatcaaaagattcgtctcgcgatttccagctaaactgtgtaattagtttttactttcgtctatatttaatgcttcatgcat

SEQ ID NO: 4371 - DNA, 3571 bp, Sorghum bicolor
gagtagtcgtagacggcgagaggacaattcctgtctgaagtaggctttgacctgacgtgacaacacacgtgcgacgcccataaaggcgagcgggagactggggggagccgggacgacgacgacgacgacgaacgagtggaacgtgcaggcgcagactccgggccggctattcaatgacacaatgccgccgcggcgccgcagcagcgaggcctccgattaatctccagttgatcaccatgcatgccggtggtccagttctaaatttcttctttggtctggtttagtttcaaaatttttcaagattttccgtcacattgagtcttacggctcatgcatgaagtattaaatatagataaaaaagatagttaattgtacagtttatctgtaatttgcaagacgaatcttttaaggctagttagtctataattgaataataattgccaaataaaaccaaaagtgctacagtaacgaaacccaaaaattttggcgaactaaacaagatctttgtcgttgccggccaattgccattccagtgctcgatcggaggttgtttaattagcccccaaaatattcttggtctctcgatctcgtcatcagtctcctagaaacaacacaagcagagtatcccccgaccgaccaacggcgaccatgcatccatccttcatccttgtgtgcacactgaagcaaaggggttccgtcacacagagacagagcaaggcagcactcaaatccttcgtcgcgacgacgatatgatggaaaagaaccggcaactgttcgccggggcgttgtgtgacgttgattcgatcacaaagggccccctgccggcgaccaacgaaaggggcgtgtcccgtgtccgtcacggcggcatgcatggctccatgattgtttcagcattgatgctgctgaatgctgatgctacgacgatctgatgggggaatcaatcaaggcggggacattgctacgaggcaggtcatcatggagattgcggcacctgaggtccacatgctcattcagtagtcatgctcagtggcctgcccaaatgtttttctagtgatcgctcactttcagctatcaaactgaaatacccctgccgagtcactcatcactcatcagcttgctgcttggcaagcataactgtccattaaactgaaaaggctgcatgtagtaatattcttttgatccggaaggtcaagggtagcacacgcagacgcagtgcccagcatccaggcattacgcacgagtaattggagatcctattactagtcctagattagaataaccacctagagcttaatagaagttgctttctagagctgaactcatccgagttaaaagcaaagtcaggccttctcggggctctatgtcagattgtcagtttttgcaccttgtacttatcgggagacagccaggtcaagcaaagtagataaacaaatcacgtctataattgaggtcttgatgataccattcacggtgcacatggttactttcaaggtagctaatgcaggcacctatcgagcaaagctcagactagaaacagtatcttcatgttcatgaaactgaaagtaagcatcccatgcacaaatgtccctctttcagagaatcagatacgtggacagggactatgctcaagtattttttttctttccctttttctgcgtaatcatgcaaagtgtttatgtgctccacaaatatccctctctgtaaacttcaggtaaaccagccacgcagcccggtcctcagtcaccagctccggcaatcctcttcttccagttcctgggccacacagacacagcgctgcaggcagacaacacgcagctccctcctcatgtctgaagcctgaacacacccacgtcgcactgggccagaatccccgtctcgtttcagcaggcctgccttgcaccacgtagccttgtggccaccacagaactgacgcgctgccgctgcttgtctgcgcctcaagtggtcctccatatataacggtccgatcgttgggcgagcctgcagaaaccactctcacctgaactcctgaagcaatggccatgagggctcttccgctgaccccttccaagacctcctcgtttggagctcaccaaatcaggccgagcagtggcaacctcagatcagttagagcttatgcaaagggaaatgaggaggagggcaacaagcagtccctattcggaagcatcaccgaggcgctggacttctcgcaagtccggtcggagaaggatgccgagctgctgtatgaggccagggagtccaccaaaggtggagggaggatgacgagggaacaggtatggaactggaaccactgatgcaaagcaactggggattgataatgttaccatcagtaatctgaatgtcttttcacatgcttgtttgattggcgatgaagtacggagcactgaggcggaagattggtggcacctaccaggatttcttcaagtcatatgttgatggtatctgatctatacctttctcatgagaataattaaatgccaagtgaataattgcgtgtattgtgtactgattgatattcagataaacaccgcatgactgaataagctgtatagtgtgatacactgatacgtcaaaaacagttgcagtatgatgaaaatagtgcctattgaaaatatataatcacaaacaaagttttttggttattcttttctgaataagagagagaatatcaagttgctgaatactgaccaaccaaattggtttcaaattcagtcgatgggcaatacgtggaggaaggttgggtcgataagacctgcaagatctgcaagaaggacacaaggggggagccaagacaggttgacaaactaggaagatatgctcatgtggcatgcttggagaacccaaaaccgatgaacttctttgccaaaatcttcgccagatgaactatgtaattgtttcactcatggttagatgcaataggtagcgttctggcttcaaagggccaaagtttcgttgtgcacatttttttttccaaatgaattggtatatactgagaatcagcgcattccatagttcacaatttcttcagtgtattcaagtagatcatgaacgacgccatgacccagaaagatcagaacatactactgaaaatgaaaatgtttatatagtagcataagactttacaacaagttagtactcttgagtcatctattagctcatgttcctagtcataatacaggaggagtttccaactgtaagcttatttatagaactatggagtaatttaaagctattgcattttgcttacctaatgctgtagttatatataatgtgtgtttttaggagccttttgtgttgagcatggacaggtagaccctgcacctgatgacagtgcatccaatcttaaagcccggcattactgtaaacccaacacttatcttggcttcctctgtggtcagcttagctggtacactttccatgtgcttcttctgaaactgaacgccactcttgacaaagaacatctcagcccttggtttcaagaagcgagcaactgtgagcaatgcccagacatatctagccattcctgcaaatgtctggtaaaactgtgtccttg

SEQ ID NO: 4372 - DNA, 3390 bp, Sorghum bicolor
atttggcatgtgccagagtttgtgaattttttttgtttggctactatagcatttttgtttgtatttggtaattattgttcaactatagactaactagattcaaaagattcgtgttgcaaattacaaggaaactatataattagttatttttttatctatatttaatgctccatgcatgtgctgaagattcgatgtgccgaggaatcttaaaaagttttagcaactaaacaaggcttgagctcgcatttaaacgtaggaaaagcgtggagtttgtacctaagcttggcacattggatcttggcaccaagcttggcaccagtggtgacggtgccaaagtgcctaacacgtcactgccagcgctgtgtcaacgaccacatggtctaagagcttggcgccattagcactggcgtcaagatgattcagattctaaaatcaaactaaaaaagacgtatttgtaaaaatctttaaaaaattactagaaaataaaaaagacggacagagctaagccgagtcctgagctcctacaagaaaacagtcatccgtggagccaatgttttcccgttggatacatgttactaaagtttagtgctctcatccgtggagccaatgtttccccgttggatacatgttactaaagtttagtgctctctctttttttttatagggaacaagaggggcgaagacccctactagtgctctcttttcaaaatgaattagcccgctccctatctgcaatgactttgatattcaggccaatggcctttgtattgttaaaccttcggtgtttgataccgtccgtcatcggcttgttgaaatcaatgaaaaaatcatttagggccgtttgtttttggctggaatggcctggaactatttcggacctagaaccattcaatattttgtactatgctggaaatgtttcgggccgttccagaccagaaatgcctaaccgaacatgcccttagatgtgggggtctctcaccttcggtacttgactgaaactatacttgtcagtattggacgcggcgaagattattggcaccgcgtgtttttgttttctaacaaaacgtcatcatcgatatctcagttcagattcaagaaatttagacggtcgaagagagtcaagttagagcatttccaagagcttggctaaatttagtagtcaaattctaatgtttagccattttgtaaaatagataacttcttaaaaaaaataagaggttcacaacagtcttgctatcagatagctagtgtcagtggttagctatatatggccagcgaaaatcaagagatagcaaactttctattttacaaaaccaaatagcacatctgttggaacctctttttttactatagaagttctaaaagacctccataataaaaatagcaaagctgttggagttgctcttactgcaccacagggctggttccgctgctaatggattttattaagggacaatctccttgacatgatcagaaacagcaggagggatccaaggtagggggtggagcgtgccaggccaactaataaaaacaacaaatcttttgcccgtcgccatacatatatttgcttactactaccaatttgtcggtcttcaggcccatccccctcattaatgccttgccttttaagcactctttccttgcaaactttatacacttctatatgcctcatatctctctctctctgtctgtccatcggctaacgatccctctcccctgtcttctccatctccgtctcctctgcctctcccaagcacaggagaggagagcatgcctggatgtccacagagaggtaagatttcttcctcatttgtctccatgtgtcttcctgcttgaattctgtcacagttcaacaacaaaattttcttcgagaaggaatgtcatcgctgttctttgttcgtatccttttgcttgaaaattagttaatcacgagagagaaaattcattgctcttataccatcaaaattctcaagattattattccccctctttgatcccacatgcaacaaaccctaagtgacagctctgcccgttggacttccaccagcagggagagagtcgatgagatcgggaagaagatcaagcgagagccggatacagccgccctcgccgtcgctgtcgcctccgcctccactgtaccggccgacaaccacatcccacaccgcctcggcctcggcctcggcggtgtcctcaacaccttgacaccgtgcgccgcgtgcaagctcctccgccgccgctgcgcgcaggagtgccccttcgccccctacttctcgccgcacgaaccccacaagttcgccgccgtccacaaggtcttcggcgccagcaacgtctccaagttgctcttggtaaagcctcaacatgaagaaaaattcatcctttttctagtctagttaaaaagatttcaccgtagatagattcctcgcgtataaacgtgtcgattgtgtcgtcgcaggaggtggcggaaggggagagggcggacgcagcgagcagcctggtgtacgaggcgaacctccggctgcgggatccggtgtacggctgcatgggcgccatctccatgctgcagcaacaggtgaacgcgttggaggccgagctggaggcggtgagggccgagatcctcaagcacaggtaccggcaggccggcggcggcaaccgtctcattgacgacgacgcgcatgctacggccagctttgtggctcctgcgtcggctccggtgcacgttaatgacgtggtatcggtggtggaggcaggccaggaggttgcagccaccggcggcggcgcgtcggggatgtcgacgtcgtcggcggtgtacgttgcggaagccgagcagccggcgagtactaatcactatagctcccgtaacccaagtgagcatcctgcatactttggttgacatgcatgtatttaacattttggtggtggtggtgggacgatcaaaactagaaaggttgggtgaataaactgtgtgcaagtttaattatatatactacaagttttctagaaaataggtttgtagatgtggatatatatattgggtggctaaaaggttcatctaatattttggaatgtatgtaccatttgttttcttgtaattgcccattgcgatattgttggttgattaaattagttcgaccaagcaagcgcgtcttgatccctatatataaatagtaaaccatttgcaggggtttggcactcaaagttttatgcaaatcccatagcagaaaacaccaaacgtgtgtagctcaaacacgctgtttcagtggattatgagctcacgcataggcaatgatattccttaattaatttgcttgcactgaacaaatgatttttttttgtcgacgtccaaatgaatttccatcgaggttgaaaaatgataaattgaccttttcagca

SEQ ID NO: 4373 - DNA, 6553 bp, Sorghum bicolor
taatcctgaaaggaagtactatgttcagtcaaacaatatgactgcttactgtgaagccgtccgagctttaactttctatatggtactagcataatacattgatctgtcctaacaattagcctcgactctactctgcatctttgacatcctgctaatccctcctactcctttccgcatccaattcatctaagtgagctgctgctgctgcttccgcatcttcttcttgcctttggggttccaaatcacctagctgaagtactagaggagcctcaaaggatcttccttttcaccaacatctcatctcgtttccttttgtaaaatgaatggcgagacagagttttcacacaaaccattgatacctaattaagaaattacatctagtcaaaatttgagtctgaatctaacaaaaccaatgcgtagagaaaaaaagggcaaaagattggagattgaagaaatgacgtgaagctactgctctcggcagtgctcctgcagtccactgcacagcgtgggctattgggcatcctttgcatgggctgaaaagtacatgcgaatttcgttttgggcaagggggagcccagttttgccaccgctggactccgcccctgttgacagcaaaatagggtcgaaacacatttaaactggaataattaaaatttgaaataaattagacttaaattggtggatttgggcaaggctgattttgaaaccggccctttaagctggttttgaaatcggcatgagccggttttagttgtctgagtcagttttaaatctaattgatggaaacttgttcgatttcatgaataacttacaaattttttgtggaatggggttttctacactcgctctacatgtaccagaggatcacaatagatcgaggtaatcacacataatcgataaaaaacaatttacaatcctcttctcacttctcatgcctcaaacgttttccaaccctatgatgtccaacgcatctcttgatgagatttgacaatgttctaagttgccttactgcattgttggtcctacggtatctccactatacatcttcacgatagatctccccgagagttgttcatgggtcttttggacgaagagcgagtgtcaaaactaaatagttgactttgttggtcggcctcactgtctgggcctctttccactttgtgtcttggtctttttgagcccctggggatctagtatttgttgataagtgcataatttatgtcaacacactacaatgtaggcaaaggggacatgataaagtttgtgaaactccctctatcggtgtgcacacatagattgctcaaaagcataaaatgtgtgagcccatagtattccggaccaggttcaggccaagaaaaaattttctaggcaatgagatttgtgtccaggctctgtccagtaaggtttgtgggcgagtcaaaatccgtcaggctccaatttgctcaggtatagcccgagaaccatggtatgtgacaagtgatggttagtggcttcttacgatggatgtatcttacgcataaacagcccatgtattttgctatgtggcgatagcagcatctctaaagtagttttcttaaattcattgtctaaatctttattgagagagctattgtaataaaaatcgctgcatcaccgttcgataactcaacttctatatcttatttggaatctagatagaaaacacagttctctattttttagagaacgagaaatcgagaatagtggatgatataatatataaagatctacttgaaagaactaaaatatttttttatatcaatacgaaaaactccatttgctctaattttggaggttcctcacattcgtcatgcgtgcagcgtgctgcgtgcaggtgcacgaggctacaagcgctagcaccgttggatttgagaagatcacgaaaccaacggcggaggagaaaccatcattcggatagcacgagcgcacccgccggccggcgaaaccccgccgcatactcgcgcccgttctcgccgcgcacaatgcttcgtctccccaccctcaccgcccttaaaccctcaacccccagcgccagctggaaccctgtcggctgcagccatggccgccgccgcaagctcatcttcgcctcatccgctcctccgccgtcttcttcgtcttcacggcctccgaagccgacctcgaatcccgaaccaccaaagcccacacatgaggcccgcagccggaacccggatgactccaccgaggcggggttccccaggactaaaccccggaagccgcgccgtggccgccgcagcgaagcggtggccgtggaggacttcgtccgcggccgcctcgagcaggtcttcgcctccatccgggagcgcaaccccgacgtcctcgagggcaaaggcgacatcctgaagccaaaggccgaggaggagcaagtaccagacgaggaggagggagagggagagggagaacagaagcctgtggtggaagaagaggacccgagctggccgctggatgctgatgtcgggtgggggatccgggcgtcagagtacttcgacaagcactcgatcagaaatgtcacggtggacggggtggagatcgattgggaaggggaggtcgacgaggggtgggtcaaggaaatcaattgcttggagtgggagagcttcgcattccaccccagccccttagtcgtcctagtcttcgagcgctacaacaggtaaaaatcatccatccctatctaattttgattcgtaaactgttggcattatgtttggagtgcggcttgtgctattcaaccaccatttaagcttgcatttgttaatccggatgtctgtgaagtctgaatcaaacaagcctagaaaattcagaactgtcctgttactgacaaataaacggcaaaacaggcttcactttctggaattcctcacaatctttagggtgaaatttattagtttatttgcaggaggctttgattgtttagtattgaaccctgcatgatgctgtggtttgcagggctgctgacaattggaagtttcttcaagaattggaaaaggctgctaaggtatactggaatgctaaagatcgcttacctcctcgggtaagtttgaatagcatctttgattatttggccgggttactctggtctttgttcaggtcctaagttttgatttgtttaacagacagtcaaagttgatataaatattgagagagatttggcatatgcacttcaagtaagagaatgtccacaattattgttccttaggggaaacaagatcttatacagagaaaaaggtacgtcaaactaataccctaacctagccaccccttatatttttaatagtttgaattgtcctcgtgagaattctgtaaagttttactgaggattacctttcttcttatgggaaattaattgggaaacaaaatagagaggtagaggtgagacagacttagcatctgtgacatttgggaggaagagaaaactccggttagaagtttggagagaaaaggagatctgtcacttgatcctcttcacaatagagcaaaggacacatttccagcccaatttatacgcccatgtggctcatacgggtgagctcctgaacagggtttccgttggaattcctccattttcttctacctccaaaggtctcatctcctgcagaaaggtccatccagttctgttccagccccagcgtcactgcaccagcgacatcagcctgcagtgctgatcaggggagcacctctttgtttaaaaggcaaaataatagaggaaattcctactgttgtaaaaaaacatataaacataaaaatagaggtgaaaaattgttacacaattgaagaagagaaaatgatctatacaggaaacataggactgaaacaactacaacctacagaaagagaggaaattcaagaacaaaaggacaattctaaaggcccttgaatcctgtgtaacggcagtgaaagttcaggcgtgtttggttctgctttctgtgcccaggcaggtttgcctgtcaggcaacaatcctaggccgttggatttgggtatgtttgctttgtggactcccaggcaggacgtgcccgaaatcggacggttggggacaactctcatgccaggaagacttgcctgggatgcaagcaaacacgcccggttgcctggtggccaggatcactgcctggcaggctgcctgccaggtcatgaaccaaacagacccgggtgtcttgcagccttgaagaatgagacttcgctgaaaaatgagagttcttttgcttccaatccaaatgatccatcctgctatgcaaaagacttctatgaagaaagttgcttgaaactcatgcttggttttctgcgccatgttagggagcacctcttaacatattcactctctagcagcactacttgtgtgtcctgattggctggttgctctaccagtacagtgttgtggacaaatgttagtgaatttgatttggctggattggtttgcattgatttcaatccagttggcttgtggaccgctttctttgttggtgtgaccagtcctgattactcttctctgagatgtgtggacttggctggcacgtgcgtcctatctcccggtcctcaaccttgtcggatgtcttgttacagattgtaggaaaatggtgtcctatctccgggaatagatgttgggaacttactgcatccattgggatgcatttgttgagacagcaagttctcacttaacaactttttgtgccattgcactgtcagctaaacaccattctgccttatttaattactgctactgttctgatttaccaataatatgcattatatactaattggtgtccactagttcctagtgcaacatcatcgataagcaaaaaggatggagtttagtctcacagtcaaagtcagcagatggtgaagcatgattatcactgtgccagagaacagttacactcccattgttgctgcaggatcccggtattttatcttggagatacaacaccactcttctgccctgtggcaggctgccagacaagcttgatacctaggagatgtaacacaacaccaccatggatacacaacgaccagctattgcgtacaccttaagaggagcagtgatcaattcaatctgtgcaaggtcacactgatgcacaaaacagtcagtgatcgaaatgatgacaagtttagaaccaacacacaggaccaatccaacccaattgaaatccaccaaacaccagtccttgacattgaacagatgcaggccaatggctctgcatgggctgcaacaccagtgcttggaaggatgctgttgggcttctggcccatcctgctggagcagcactcatctggaattctggatgaaggttacttggcagacaccttgagatacagagaagagttgaggaactcagatggggatggttttcgtatgttcttgatcaggcagaggagcttttcacatagcgggcgtgacaggcatggatggagtcctttcctctctaactccctccacgtcatctccagcgctattctctgggtccgtttggtagggatccagtttcttgaaaaacagttttttttttgttacaaattatccacgaaatgtttctttggtagggtttttgtttcttggataatcgtttggctaactggttcttggagtaatttatcctgtacttgcaatgtaaaaaggagaaacatttcagcctatttctgttttgaaacgcctagatttggatcctttggcagggttttttgtggtttctaccagccaaacaggcccttcctcaccagtgtcaagatgacaaggagacccctcctgtatttctctattttgttctcaatttgttttccatgaaaagtcctcaaaaacaggaaactttaataaatttcacaaggaaaatttgaataaattgccaccatttgtgatccttgaagtttcagttgccaagagttctactaataagtcacaacgtgattgtctttcacatattcaacagagataaggactgcagatgagctggttcaaatgattgcccatttctactacaatgcaaggaggccatcttgcgttaatcctgaagccgttgcttctttctagttcttgtataaaattgttgacatagtgtctttatcctcaaccggtggattggtgcttgtttttactggtaagcatttaatccgaaagtttactctatcgccaattgtaaacagcaatagtaccggttattcttattcatctacttagcatctgagtctatctatctgatgcaggaagaagaagctcctttattcgatcattttccaggacatggtgctcgtaatagtgtggaattgatatacctaaaagaaaaccaagaaaaaaaaacatctcaatgctggtagggaaggtctgaactaaatcatgtatcattctgatatagtatagtctaacaaaatataactttcagttgtcattgatgttctggatagtacagggagagtgcttaattcattttctccgtagctacattagatgattacaaagttgactgcaaactttggtatggggcaaaacttgggtagttcggttccctcttatagctgagagcatacaagttg

SEQ ID NO: 4374 - DNA, 2686 bp, Sorghum bicolor
acattataatagagctgcagtaggtggtcactggaagaaatagatggagaacaaaaataaaccacatcaaaatgtgaagttgcgagctggaaggacagatgatgtcaggtggctgaactcgttgcccaaaccaacttgagaactgttgctcgacgatgacggactacggcggcgaagtcgaatgggctctgtagagacctggagcaaatcgcttcgccgatgaaagggcaacacccagatgcgaggttcggcggaggctgaccaccacagtcgaagaactagccgcctccaacaacgagcacaacgtcaaaagtccaggcattggcaacttcctcgtttcgtgatcattagttcaagttccatacattaaaaccgattccaaagcaagggcctcgtcttaattattgagcttccaatgaccactatgatttacatgctcgtcagcataaaacgtaacaattggctgtgtaacacagtaatctttaccggtaccaacaacattaaattagtctccctaagttctatcaagatgagcaatgctgcaaggcaattacatggtaggaacagaaaaaaaaaatgctaccgaatttggcctctaaaacaagcaatcacaagtgccaggtaaccagaaaagagcattatagcatctcaagctaggcgaatagaactcatgatagtactcaacagaagcagtgtgtttaaagaaatcgttttcacaaacaaaatcttaggttaacaattgcatgagtgcactgtaaacatagcaagcaaccattcttcttaaacatctaacaccctccaatttagactccatgcttgctgattttgagtgcaagagcaatctaagaccttggcttctctttcttctccttgaaaagggcaagcagagacacacccgagaccttgacaaccttgaaccggacaccaggaatatctcccacagcgtgacccttacgaccaaatccagcaatcaacacctcgtcctggacaggagatgagacaagttaagtttgtgctgcaccataggctgcaagacaatagtacgagtttgggataagagtatacattttcctcgatgtagttcaagcaaccatcatttggcacgaaggcagcaatcttcttgccattcttcacaagctgaacacgagcacacttacggatagcagaatttggctgcttggcctcaataccactgcaatatgatcaacatttatttgctcagtttagttaaaagcaaagtgtccaagaaaaaaaacgtatacttgtagcatctgcttacatcttctccagaacaatgcccttggcatgggatgaccccgcgaagggtttcttccactcattgcccaaatggctcttcttgtatgccttgtcagcccaccgctggttccttcggtgggtcttgagcttgcgcccagctcccataccacgtgtcttcctgtatcagacaacttaaaatgtttaccgaagacagaaaaaaaaaaggatcatgttggaacattttaatgtggtagtctatcaaaatgtgatagactaccacattaaacttgacaaatgcattgaacccaaagcctttttaacaaagtgttagaaagaaagcatcaataccacaacagttagaaaagagcagctagatataatcaatgaaatctctatcagaaatttatctagtatacaatgtgaaccaagtgacagttggacattacataaacaaaacagataattgcgtctagattgaagtcgaaactactgacacacttaaatacagtctacctagttctaataaatttttcgtcaccttaatgtatactagaatattcatctaaaatgcttgagaaaacaaaaaataacgaccactacacctgcagtaattgaatagcttaattgctgactcttaaatggattaaaatgtcagtcgcttcaaggcttcaaatcaggactttcgcagaacttcaaataaaattttacaaaaacaaaggcgactctttgaaacgtaaagaagaatgaaggtgtgtatgctaccacgcataacttcccacatccaagtaactggatcaagaaagatatcgctacacagcagcaacggattaatgtcgcttatgaatatgtttagcgctgacgttgtagaatctgatcagcactggaccgtcaataagcttcacgcggatactgagacgaaatccgaataaatcacgtagtgtacttcacaccagcgcaaacaaaactgcgcatcacgcaaccaaatgcacttatgtagtcacaccaaaccacactcataatcgctatgaccagaaaacagatgctcacaagaagagattggataactgcaacagaagagagtgaaataccccatgttgacggaagttctctggagcgcttcgctgcggcggcggcgcggctaggagcggaacacgggcttggagcagcggcggcgacggcggcggcggcaggagaggggaaaagaatggaggggaaggaatttatatgcggggctctggtgtttagggtttggcggggctgctgcttgctttgtgatccgtgcttctggatagagcctacggtcgtgatgctggcgagatagttggcctaggattggaatggtggacttggtctaccatgtggatatatagaaaggctttggatttgtagggtgagttttgagacaattatctatttgacattaaaaaat

SEQ ID NO: 4375 - DNA, 4538 bp, Sorghum bicolor
cgagaaagcatcgagcaaggacaaaaccttcaagctctaccctgggatgtggcatgcgctgacagctgaactccctgacgacgttgagcgtgtgtacgctgacattatcacttggctagaggaaagagcgatttgtacagctagtgtttcaagtgccacatcacatgtcagagtctaagagatgttttgacctgtgtccaaaatcacaattccattcatacggtcgttcgctagttttcaatctagtgaacgatccacgtcggtcgcccacccttctccccccactttcctttccttaacgttatcataaaaaaagcaaaatatttatttcaaattactataacttttaaatgatgtatctatttttaattccatctatatcggtgtgttcaacatgacgagacgaacaaaactagatcccacttctatatgtttcgaagatttttatttctctagtagcaatttatgtatattaacttataacatataagttatattgctaacttattctgcaagttatgctgctaacctattctgctaacttgtattgtataacttttgtttgtgtataataactgcataactttctatatacactagtgtatcagttgtgtaacttatgtacataagttgtattgtgtaatttatgcctccctttatttcaaattataaaatattttgatttttctacatatattgattttgctatgtgtatagatatacagttgtgtctagatgcatggtaaattcaatttagaaaagtcaattacatttttcatggctatgcagcgtaacttagttcattagatttattgtactgagttatatatctaattcctatttttacgtataggctactaacttacgagattaagttagtgtacaaagttatataagtatcttgtgtttttcatgtgctgcatgctagctaacttatttgtctaagttactattaacagtaatgcatctaacttgtgttttgtatttgttattttaaattttataatttaattattttacagatctacgaattgaagaaacagatgttgaaattatcactgcacaagtttaaaaagcaattattttatcttggttttccaagggtgcatcatcatttctatggaatgtattatgtagtataagttgtaaaagttacttttatttcatccctccacccttttataaaccctcttcccattttccaaatgtttagttttccaaaaaagagagaaaaaaacgactcttcaaacctaaaagagaatgcaggagaacgactaagttagcaatgttgagctattcctcgaacttatgttgtctagaagcacttctaagttagtactgttaagtttaccgtgaagttatgctttttaattccgtttataagttatgagcacatgcttcttaaaaattttaaaatatttaagaacgagtgatccaacaaaaaaaaagtgaaaagagaatcaaatgcctcgaaacagaaagagaaacaatttcctgttctgtccataaatagaaagtaacatatgcattgtccaaaaaagaaaagagaatggatgtcggaaattgaccgttgctttcatttccaatgaacgttcgtagaatagtgacgtcggtccaaaatacttttctgtatcatatctgaaatcaccttttctaattcacacctgacgatgtcgaagatcagaaacatgcgacacctgttcccgtcttatcatttcccagcgctttcaccaattttctcctgcatgggaagcttccaccatcgctttcaccaatttgagtttgattcctgtaaggtgttcgctagaccgattttttctgcgaaggtggtaagaggagaaagctatacgtttccttagtgctgaagactgatttttctctgacatttagagaccagtgaccagtcctcgttgacatcttctgctgactagtaattgtcttcagacaggtgtagtatatatatgctgcagcatcccctcttgtgctgttgtgcacattgatcgctaggtcataatcatacggcattcagaaaaaaatatttcgcatggtatcttcagaaacaatctgctcttgtttcttcatgtttcttttgcctccatgactcttagcaattggttttctgatttctgcaggctcagtacagagacaatatcaagtatgaagaggttagtcctactgcaactctcttgggcagttcagtttgtaacaaggatcctttattttgattccatcggacattggtgtagcagtatttgctaacatatttctgcacaatctgggcaggacttctttgtgaattcacgaggaaacaggctgttcacctgcagttggacgccgaggaaatcacagagcagagctctgatctttatctgccatggtacagacgtcccctccttattaatcattcactttgccccctggttatggtttgatgaaaacaaagagtaaaacttctttttgtgtttgtggctgaattttgctagggtacggaggtgagtgcagcatatccatgggaggtataccttcagtttcattcactttcatgttcttttcatcaatgaaaaccatgaactcttgacatggctgttaggatgtatactcacaaacttccataaaaatacagatacggccgctcgattagtacaccgtggctatgctgttcacggaatcgaccacgagggccacggcaaatcttcaggctcgaaaggctacatatcgagcttcagcgacatcgtcagagactgctctgaccatttcaagagtgtctgtggtgagaatgaagctgtgaattccagtagttatgtatgcaaatcatagctcagcatgggatctccactatttatgtgttaacatgcacattgcatttccagagaaacaggagaacgggctaaagaagaggttcctctacggcttctccatgggaggaaccgtggtgcttcagctgcatcggaaggaccctctctattgggacggtgccgtgttgcttgcccctttttgcaaggtattcaactcatttcaatggactaagtctcctgcctagaattttccccatctgactatagtctaaagactgatgcttaatttgtttcacatgatatcgatcagatgttcgataacatgcgtcctcacccgatcatcgtcagcacactgaagatgatcagcaccgttgcgcctagctggagagtcatccctgccatagacatgattgacaaagtctgcaaagatccccagttcaagaaagaggtaacgaagaacaaacatgcgagaataataatctgacactttagattgtgaaattcatgctcctctttatggcatttttcatttctccatgaggaaagcatgttgaaagcatacactcttgagatgttgaacacgtattcaacgctcttccctgcctgaattagtgaattcgtgtgcagatccgttccaacccgtacatgtacaaaggaaacctcgcactgcaaacaggccgcgaactcctctccgtcggcctagacaccgagaagaacctgcacgaggtgagttcctcgccatctgttagagttaggccaccacacaccacatgcagcattgattgatagcatgaataatcttgccgctgaatcgttgatcatgcgatttctgctatactacttttcagccatccaaggcaacatctcacaactgatcattgcctggcaggtctcgttgccgttcttggtcctgcacggcactgacgacgtcgtcgctgatccttgtgggagcaagctgctgcacgagagggcgtcgagcagggacaagacactgaagctgtatcccgggatgtggcacgtgctcatgggcgaactgccggaggacgtcgagcgcgtcttcgccgacgtgatctcgtggctcgacgacagggtgggcggtacagctaccgttcccggcggcatggcagatcgtcatgagctagtagagtgtagagatgcagtagaatagaacacaggccggttgtaaataagttacaaggatgtattgagcctttcaagcatttttttgaacacaataggctaaatattctattcgttcccaaagttcaaataaaaaaagttgtaaacgtggccgagctctagtgctatacaatttcatataatctgtttatcttcatctagcctgaaatgaaaaggttacgtttttaagataacctgcacaaagggaatttttgccaactaaattaacgaaattttagagcccatttgtttgggcgttttggaagcttttggacctttgacggcgctaaccaacagcagtatccacagaccacagccgctggtgggtcgataaaagggaaggaaaagggtggcggcagtttgcacgattttgcttcagtctgacggaaagacgttatgttatggccggtgccgggacagcgacatgccgtcttcgtctcgcaaatcatgcacgctaattgtcactcacggccttggtttagcttgtaatataatcctgaaggttttcagatccaaatctgcaagggcgcactgacgtccgagtacgtccgaggaacacgtata

SEQ ID NO: 4376 - DNA, 12224 bp, Sorghum bicolor
tctcctccatgcatgcagcgcttccaaaaacctgatacgctccctaccccgtgcagggacgtgaggagacgtaggcttcggagcctgctctcccgacaccgatgacacatcggcggcgggatggggaagacggcggcatcgcatagtgtggcgaggataattgcttaccaaataagccagcgcaatctcctccatgcatgcaaaaacccaccgaggcgaggcgagcgcatgcgcacgtgtggttcttcattttcctctctccaattgcttcaacacgataaagatagctcaactttttaagttgccctcactccacttgaagtaacaaggtgagactaaagttcccccacctttctatatatacatgcatgtatgagtgagcctttgggattttttggaattgtttggcctaaagcccaaaacatctaacacttttatcacatcacagttttataaagacccggtaacctggtcacaaattccacgaggaaccagcttcgctgcgtgttttgcatgggaaatgtttcccagggtgtcgcagctggaggagaaatgctaggaaaaattaacaagaaatctcactgaaccaccagttgacgcaacaagctgcagataatgtatcaaatttttacttacaacaaatgaattgcaatggaatgacagctttacttcaaagagcaaacgctaagcttattttgatatttatcttttccttctttacaatcgttgttactaattttcaatatgtatacagaggacagagagaccattactattttaataattttcaatcttttccttatttgagattgttgcagagaggaccatttcacttaatttgctgtatgtcttctcaaattataatttggggttaactgcttcctatacaattcatgcaaggttcggggtgaatgactacttctataatgtatctacctaatttatgaacgaatcttatgtagctttacatttttatgaggtacacttttttataacttacgttcgtaaaaaagaatgaagcttttggttgaataattttatatgtctgagtttattttcttttggtaacaaagctataagccaaatctgtcagtcatttagtagtgtttttctctcacaataaattaatgaacagtactttctgccatgacttatcaaccaaacgaacaaggcgagtctgaagctaaaaagaggtaaatcttcaaacaacgccataagattattctcctattatttctcaaaaacaaaactgatgacattcagcaaatcatctgggttgaagtacttttgtgatgctccatctataaaatcacatccatcacctcttctcccgtaaagagtggtgcaagcaaatcattattgatataacttacttcctcaaaaatcattgatataatttacttgaagggtgtcattaacttgtgattccatcaacgattattactgattcccctttggtagtaccaacaattatttataataatggttgaaatgagatttgagagctccatccccatccaccaattgagcatcgacgcaacaaggaggtagataatacgtactatatatattcacaattttacctacaaacaaatgaatttagccgaccaatagctttacaaaggaaaaggaaaaaaactaaatccaggaacaacctgtgaaactaaactaagctagtcatcgaagaattccgtttcatgttcaagttccaaaatttaggtcaccaatcatttacaactccgaatcaccacgcaagcacccgtttgcgcacgctacgctatacaagcagattaagcagctgaggctccgagccgcgatcataatccgactgttgtggaccttggccatcgccgctaccgccgccgctgccgtcgtccagcggcggcaagttgaggtccggcatgtcccggtccggctgcgcctgcgcggggtcgtcgtcgtgcgcggctggcggcgcctcgcccctgtggcggcgcatgtgcccgccgagcgcctggcccatggagaactcgaggccgcagacggcgcactcgtgcacccgcgccctgtccctctcggccgcggccgcggccgccgctgggtcgctgagcatcctcgcctgcagccgcgtgtggctggtgcggtgcccgccgagcgcctggaacgacgggaagcgcttgctgcacgtcttgcactcgaacacgccctcggccgccatggccctgcgggccgcggccgaggacggcgccggcggcgtgccgccggtgcccaacgacgacgacgacgcgggcgccgacagcgtgagcagcgcctcggcgtgcgcccggaggccctccatctccttgctctcctccgcttcgtgtctcgtaagcgtcatgaccatcgagggagatcaaccgacgtttgccgattctccagctttatattattgtaataagcagccaactaaaaattccacacttacgcgcacgtacgtgttcatatataaaccggcccgagcgcgcttgcttgtgtgtgtgtgtgtgatgatgactggacaggggtatctgtgtgagatgatagaggcgttcacgtcagggcttgcgaactggaaggccagcaggccaagcggccgcttggatgtgatgagacttggacacgaagaaacgtgacgcggtcgcactcgtactcgtacgtatcacacttggtcgtcgccacccgtggcgcgcgcctcggatcggaacacatggttaattagggcttgtttagttcccaaaaaattttacaaaatttttcagattccctgtcacatcaaatctttagacgcatgcatgaagtattaaatatagataaaaataaaaacttattgcacagtttaatcggaattgacgagatgaatcttttaagtctagttaatacatgattggataatatttatcaaatacaaacgaaagtggtactattcctattttgcaaaattttttgaaactaaacaaggcctaggagttgcgtgctttgccacgcgcccacaagcttttcgttgcacaatagtagggccttatttagttccgaaaaaatttgaatttcgctactgtaacacttttgtttttatttgacaaatattattcaattataaactaactaggatcaaaagattcgtctcgcgatttatagacaaactgtgtaattaatttttattttcgtctatatttaatgctttatgcatgtgtcgcaagattcgatgtgacggagaatcttgaaatttttttgaatttcggattgaactaaacaagacctagctcgttcagactttggctccatcttcctgggcatggcggcgtcgcaggccaggaactcgatcctacgcgaccggctgactctggacccgcccgcagtctcctttatctgcgcactttaggcactgtttattttctcacccaaaaatttttcatccatcccatcgaatctttggacacatgcatagaacattaaatgtacataaaaaataaactaattacacagtttggttggaaatcgtgagacgaatcttttaagcctagttactccatgattagccttaagtgccacagtaacccacatgtgctaatgacagattaattatacttaatagatttgtcttgcagtttgctgacgagctatgtaatttgtttttttattagtttctaaaaacccctcctgacatccttccgacacatccgatgtgacataaaaaaatttcatcttcaatctaaacatggcctatagagcagggtgatctaggccttgtttagtttcgaaaaattttcggatttcgctactataacactttcgtttttatttaacaaatattgtctaatcatgaactaactaagatcaaaagattcgtctcgcgatttacagacaaactgtataattagtttttgttttcgtctatatttaatgcttcatacatgtgccgaaagattcgatgtgacgaagaatcttgaaaactttttggatttcgggtgaactaaacaaggccctatacgtgcacggccgggaacgtattacatgtgacgtcaccttacccgcctggcagtttcgtgaagaagaggcatatatcagtcggcattcgcgtatggttagttaagagtacttgttcaccatcgaccaacttgtgtcactgtgtctacgtacatacgcgtacgtcgcttgcacacatgcatatccagtcttgactattcattccgtgagtgtacgtgcatatcttgacgaatcgaaagtgcggcgaccatttcttcacggcaggagacggtacggtgctatgagcatggagctctcggccaggacgaaccgcgaggcgacctaatccatgtccatccaatccatcggcgtttaccagtccagtccggtccagaacaccgcttggtttggttagttccgtgcgcggcgggcgcgcgcgcggaccacgtcggccgcgggccacccgcgagtcgatccacacgggcagtcgggcacgccgcggcggcggaggtaacgttacgtaagctgtgatgcacggatgcgcgaagcaggcgatcgaggcgacgaggccaagcaacaggcgccgacgagccgtcacttgcattggcctgtgcgtgcggcagccgacaggcagattttgtaaaaaaccgacgcggaattctagctccgtggctgacgtttcgctgggctatatcgtgtgcgcttttcttgggccggaagcagagtacgagtccgcgaagcgagttccttggagtgctctctctggctcctccagtcctccgagaggtttcttggcccttgtttagttcatccaagtaaccaaaaacttttaaattttttttattatattaaatcttgcgacacatacataaaatattaaatgcgacgaaaataaaaattaattatatagtttgtttgtaaataataagatgaatcttttaagtctacttaatctatgattgaacaatatttgtcaaataataataaaaaatgctacaatattcaaaatcaaaaaaaaaaatcagaactaaataagatgttgtcagaaactcagaattactgtacacacaagtcacaggatcccgattctagaagatagcagatcagctagacactggcacgagtcaacttgggctctttcatgtatacagtagatttgatgtggatgtgcatgtcgtcatgcatgcggcttgccgatgcgatgcgaggatgatccggacgggcctgacgagaggctggtggtaccggactagtggtagcgacatacagtacttgggtcttgtttagttgctgtctaaaaaaattcggaatagtatagcactttcgtttgtatttgataaatattgtcctatcataaatcagctagttttaaaagattcgtatcgtaaattataagtgtgcaattagttttaattttcatctatattatgaatgtgtctaaagattcgatgtgacaaaaaattttaaaaagttttttggtttttaggaaagtaaacaagttcttggaaagtactacagagctgctcatagagtagttggctgttttgttgctcatagagtagttggctgttttgttgcgattggagggaggggttactggagcaagtagccaagtgttaccgtcacatcgagaagcagcaggtggttacaactcgggaataattgtggagcaaaagcaagagcctaactacgacatgtaagcggatttgacttctaacttttcaaggatttttttatatatattgtctgttatacgtgttccgaaaggcacagagctagagtagaaggtagaggaccggggtggggtatcgccggaagtagaattttcaccgggcttcccatgcctttttttttttttttgcgaattaacggttttcatgtcatgcgttgattttgacagcacccaaacgtgtgagtgtgatcgtcggtgggttcaacgctctacacgggcgaaatgaaaagctggggtaggaattcaatagcacgggtaggaagatgaacgcggatctcgtcattttctattatccaccatggcttgatgccgtctttgaacgcctcctttccatgagaggatcacacatgttgaatatctagtttgcaaccattcagactttttcctttttattaaggccttgcttagatctaaaaactttttggattttaacactatagtattttcgtttgttattattgtctaatcatagactaactagacataaaagattcgtctcgcaaattacagacaacctgtgtaattagttatttttatctatatgtaatgctccatgcatgtaccgtaaaattcgatgtgatggagaattttgaatttttttttttggatttcgggtgacctaaacaaggtctaattcgatcgttcagctggacgttggatcaggccgaaagaagacgcgttaatgatggggccgtctatctggaggcccacgacgtgtcgggcctcttcgagacatggatctaatcctgcattgagttcccactagtacgacttgacctgaatgctttggcgacgtcgccactcgccaggatccatccactacaagcctaagcttggatgcaaaaacatgacccatgactcgagagtagcagccacgcacacaaaaagtagtagccatatttccatttgtcatcttggtgaagggagcagaaatgtgcaggactcgaggaggaaagacggttgtatccatccgtttcttgtgaggccggtgcacgggaacgagtactccggaaggagcacaaaacatgtggataatcactactgtttgaccggagccatccaggttcgttccagttccacacgtgggtggtccagctaccacaccagcgcgacagcgccacgttttcaggggtctatgcggctagatttgtggtgataaacgcgattgggatttctgcgacgcatgttttgatggcacgaccacgattaagttgtcatccgcatcgttgcaaagattaaggcatgtgttatagcaaaaactttatactaaagcataccatattatatgtttactgtgtagatctacttatgtcgagtcaaaaaaaattagattttctattttatgttttttttttgatttattatgacttttctaagattcaaccaagataacaaaaaaaaagacaaaatcgttgtcactgtagcaaatccaccattcattgtagcaaaaccgccttcgaaactgctctaagcagataaaatgtacggtttaaaaagttaagaggatggttttgtaaaagagatggcaaccgtgactcctatcttggcttgtcacgtcttcatgttgatatatatatatacaatacaacttgagttacaaggcattcggttgagatagattctatcgtaacaaaccaggctaactagattatatctactctaaccgaatgcagctaccttggtacacacggtcaagtcatatgccgtgttacaatccaagtttgttacatatcttgtttcctaacacccccactcaatctatacttgtcttttctacaagattaagattgttcttgaactcttcaaacttcacatgaggcagcgctttggtaaaaccatcggctacttgatctttggttggtagaaacctcacaactagttgtttccttgtaaccctctctcgcacaaagtgaaaatcaatttcaatgtgcttagctctagcgtgaaataccgaatttgcagcaagatatgttgcccccaaattatcacaccagagccgaggcgtaactttaagttttactcccaattcaccaagtagttgctcaacccaaatcatttcagctgttgcatttgccatggacttatattctgcctcagtacttgatctagaaactgtgggttgttttctggcactccatgagattatatttgagccaagaaagacaacgaatccaccggttgacctcctgtcatctcgacaaccagcccaatcagcatctgaaaacgcactcacaatagtaggagacctttttcgaatcaataggccaatattcattgaacacttcagatatcttatgatgcgctttactgctgaccaatgaacagttgtgggagaatgtaagtattggcaaaccttgtttactgcaaaagctaaatcaggtcatgtgagagtgatgtattgcaatgctccaacaacacttctataccttgtactatctccaactcctaatatatcaccatcacgttgtgacaacttctcagtagatgacaagggagtagaaacaggtttacaattcagcataccgactcgggccaaaatatcatttgcatattttctctgagttagaagaagatcaccattctgctttctctctacttcaatacccagaaaataatgtaagtctcctagatccttcaaggcaaagtcttgcttaagagcttgcagcaataccctaactgcttcatgagatgaactggtaacaataatatcatcaacatagatcaacatatatatctccacgctgccttttctatagatgaagagggaggtgtctgacttagacatcacaaacccaagatcaaggagttttgaactcaatctagagtaccatgccctcggagcttgtttaaggccatagattgctttcttaagtttgcatacaaaggagggacacttcttattctcaaaccccgggggctgcttcatgtaaacctcctcttccagaacaccatgaagaaacgcgttctgcacatccagctgtcgcaagcaccaccccctggttactgccaatgagagtactagtctgacagttgcaattttgaccacaggactgaatgtgtcctcatagtctataccatacctctgcgaaaatccctttgccactaacctcgccttatatcgatctatctgtccatcagctctcttcttgattttgaagatccacttgcaatcgatcagatttttcccccgtggtggtggtaccaaggtccacgtgccatttctttgcagagcactatactcttcttgcatggcacacttccactcgggacaattcagggcttcaggaacagactttggttcaccatctgcaacaatatttgcatacctgacagtcccgtcagtgtagattttgggcttaacaatcccgctttgaagccgagtgtgtggtcgaagccgctgagaatcaggcactggagctgcatcagacgattctgatggttcttttgcagagtccggtggcgggaggacacgctgcgatcccgagaacgatcctgccccccacgcggcgacgttggagtggcgccggcgtcttcggagatttgcgcaggcggagacgcggcttctggtggtacattatcatcagatcttgtgtcctgattttctgtgacagcctgattcgtagcctcatctggtggtatatcatcaacaacctgtacatcaccgtgttcctgtatttgaactgaatcgctagtaacaacagcatcagtaacattaggtgcgtgacaagttacatccccacaattaacaggagcaagagagttaggcaaaagggttgtttcttctcgaaggcgagcgcccgcattagaatgaagtgttgcaaagggaaacacttcttcatcgaacactacatctcttgagacataaacacgtcccgtttttggctcaaggcatttgaagcctttatgaacggaactgtaacccagaaacacacactgtgtggatcgaaaggcaagttttctggtattatatggtctcaaatttggccaacatgcacacccaaacacccgaagagagttatagtttggtttttccttgagtaggaactcaacaggagttttattgtcaagaatcttggccggtagaatattgatcagataagtagcagtgaggaaagcttgatcccaatacttcaaaggcatggaagcttgggcaagcagagatagacctacttctactatatgacgatgtttgcgctctgctctaccattctgttgatgagtatggggacaggatacccgatgggagatcccaagcgttttgaagaaggaatttagtcgctcgtactcaccaccccagtctgtctgcatatgcacaattttttcggttaaacttcctctcaacaaagttttggaagtttttaaagatactgaacacctcagatttgtgtttaagtaggtagatccatgtgtacctactataatcatcgataaaagaaacatagtatgcatagcttccaacagaaataggtgcaggaccccagacatcagaatggatcaaatcaagaggagcacaacttttattatctgatctggtatagggaaattgtttactctttgctttttggcaagagtcacacaccgactcgacatcatgactaactgaacaaggaagcaaattctctctaatgactctctcaaccacgggaagggacgcatgaccaagacgactatgccatctccatgtagatggtcgactcacacgacaagcttgcctagggtgttgtgctccagtctctttcagtgggtagagaccaccctcacacttgccgtgatggagaattttcttcgtggctcgatccttgatgagaaaataatgaggatgaaattcgatgtaagagttattatcagatgtgaatcgatgaactgaaatcaggcttttgttagcactgggaacatgcaaaatatttcttagatggaaagaactttgtggggtatgtaaaattgtacgaccaacattactgatttgcatacctgaaccactagcagtgtgaacttgatccacacccttgtacttgtcccggacggtcagcttctccacctctgctgtgatgtggtcagtagccccactgtccgcataccagttggtgtcgatgccgtagtttgtgtgcgctgcgccagcagtcttgatgtcgggctggaaatcctcctcgaaacgatgccagcaatcgaccacctcgtggcctttcttcttgcagagctggcacgttggcctaggcgctccttgtcctccagccttagactggttggacgagttcccagtcccgcgaccgccaccactacggccgaagccaccgcggttgcgcccacgggcaccgccgcgtccacgtgcagcagcgttgacggaggagttgttgccgctgttgtgattctcttgcagcatgtggaggcgcatgtcgtaggtgaccatctgagcatagagatcgctcagggagatcggagttgcgcgccccagcactgaggacaccagcggattgtagtcgaggtcgagtccggccaggatgaacgtcaccagttcctcatcaggaaccggccgtccagcagcagcaagctcgtctctgatagccttcaccttggcgtagtacgcaggagcagtttggccacccttcttgcagttagccaactgcatgcgcagattggtcacacgagcctgggactgcgcagagaacatgtccccgagcgttgcctagaccgccgccgacgtggtcttggtggccacttgcgcaagtatctcccttgatagggagttgttgagatgagcgagaagttgttggtcttccttgagccacttctcgtactcggggttgacggcgaccgtcttggtcttgtcttccaacaccggatcaatggtcttggcgggagcaacgcgagttccatcaagatatccctcgaactgtgttgcccggatgctcggcatgatctgcgccttccataggatgaagttgtcacgtgtgagcttctcagagatggagggcccaaagggtgaatggtggctatggttggcggaggaagacgacgacgccattgctggatgaatctatggaagaggtgctctgattaccatgtaaaagagatggcaaccgtgattcctatcttggcttgtcacgtcttcatgttgatatatatatatatatatatatatatatatatatacaatacaacttgagttacaaggcattcggttgagatagattctatcgtaacaaaccaggctaactagattatatctactctaaccgaatgcagctaccttggtacacacggtcaagtcatatgccgtgttacaatccaagtttgttacatatcttgtttcataacaggtttgcctgttttttttgagttgagagagagaaaagcgaattttcattaggggaggaaaagtataccttttcctttttgttgtatttgtgctgggatttgattcgccacacattcttgtaatagagcacttcgcttgtatgtgttgttcttccccatctatatctatatttgtatataccttataattatgaaatgaatctctactattagtcta

SEQ ID NO: 4377 - DNA, 3977 bp, Sorghum bicolor
cggatctatgcttattttcaactccccgaagcatttcgtcgcttgctacgcccttcctcgtctctgggtgtctaggtatccaccgcaagcctttcctcttttgaacctcgctccctccaagccgtacatacgactttcatcgaatacggctttccacagaattctatagggatctatgagatcgagtatggaattctgtttactcactttaaattgagtatctgtttccctccttttcccgctaggaccggaaatcctgtattttccatatccatacgatcgagtccttaggtttctgaaatagtgtaatggaaaaagaagtgcttcgaatcattgctatttgactcggacctgttctgaaaaagtcgaggtatttcgaatttcgttctatttacattacagaatacagcgaaattcaaacatcaagaatcctaattctcgctatttggaatggatccaattctattgagtctgacccatagtgatcatttctctttagcaaagaatgaccttggttatcaaaggattgaacaaccgagatccatttatgcattgtattatttggtctacgtaccggaactgataacattcgagattatgcaggattatacacgaaagatccttttttggctcagcaattttaacttctggttccgacggacgaataatcattaagtcctcctctttccggacaagacatacaaagagacccgccaatgaagaaattgtcatacacaattttgtagcaagacgaatattgcttattttggcttaactttttaaatcaattctcaactataccttgtaccccatgtacattgctcaactatgatttgtcctgttttctgttaaatatttaatgtattccttgcttttactttttttttaacttgccttttgctgttacttggttggacactaagcaatcactatctgttcgaagatggaaaccgccgaaaaataaggggtatactagattcttgttcttgatgttattactggagaaacaaacatgtgatattgccagaatgatagtgtaccatgggaaaggtaatctggtctcttcatgcctttgtgctcgttggttgagtttattgtgtgggaaccacaacattgttaactacggtgatctgaagcaggttttacaggttttacgatcagggctggtcttcaatcttcttacacgccatccaccagcacttgaaaaagaaaggtggtgagctgtgaacattttcttttttttttctcgtgaaatcacttgcgtatgaagttgagttcctcgcttgcttatttgtgcttgcttgtgatgatccgttttttgccaggtgcttttacgattggatcaaagtttcattcttaactaaagtactctctctatagctatactcgcaccacctttacagttcatttggccaatttggacaatatgggcatatggcatgcctatgaaagcggcagaaaaattctagataaacgggatataaggttggttcctattcctatgtagtagtagtagtaacattttgctttttagattgtatcagcatatctaaaggatgatataagcatcaaaagagtgttggagagtactggtccctaacatgacgactcggtgagagccaatttgccgaagagaagaaccaaggcacacgtgacgagaccaacatcatggtacaaacttcgcaaacgcctggcgggctgggagctggcgcagttgctacggtccaaggcacctacacacccacgccattaatttccaccgctctaccctcaacctcgagtcaccaccccatacacattcgtcattcatcagacagcaaagaaagttgaggcctcaagcagcgaaaccgtaaaccaccgaagaggaaaggtggagggagaaaataccaaaatattcccctctcatcaggcaaccgcgtccctctccccgtcgtcatctatctgcctgctcctcactccccagtccccactccccgctccactgctcctccactggcgagatggggagaggcttgagcgccgctcccgtctcgccgcgcctcgtgctcggggcagcggcgctggtgctgctcgcggcggcggcgctgccttctccagcagctggggtcaacgtgacggccgtgctctcggcgttccccaacttcgccgacttcgcgcggctgctggcatccacctccgtggccggggagctgtccgggaggtcgtccctgacgctcctggccgtgccgaatgccaacctgccgcagtcaccctcggctttcgtagctggcgccggcgccgacatcgccgacgtgctgaggtaccacgtccttctggagtacctctccccgtccgacctcgcccacctctccccctccgggaagctcgtgacgacgctgtttcagaccacgggccgcgcaccctccgacttcggcgccgtcaacctcaccctgggggccaactccactgtcgtggtccgctcgccggcgccgacaccgggatcgaatgccacggtcctcggcgccgtgaccgcggttccgtacaatctcagcgtgctcgcggtgggtggccttatcctaccctccggattcgacctcgcggcctctgaaacccgcccgccaccgccggtgaacatcacccgggttctcaccgacgcgcgggggttcaacgtggcggcctccatgctgcaggcttccggtgtggcgagtgagtttgaggccgacgagcacggtgctggaatcaccgtcttcgtccccaccgacgacgcctttgccggcctccctgccaccgaccgcctccagtccctacccgctgagcgcaaggccgtcgtgctccgcttccatgtgctgcactcttactacccgctgggttcccttgagtccatcgtgaaccctgtccagcccactctcgcgacagagcacactgaggctggccacttcaccctaaacataacccgtgtcaatggctccattgccattgacacaggcatcgtgcaggcatccatcacccgcacagtgttcgaccaaaatcctgtggcagtctttgccgtctccaaggttctactgcccaaggaaatgttcagtcggggggattccggcagcactgccattgtgccaccttcggttgcgatggcgcccggcgacaccagcagcgagcagacaccacagacgaggctctcatccccgcctgacctccacggcgaagatagcgagtcgtcggctgctttggcgacagcaaagggggcttcttggtggcgtataggactcatgtatctacagctgcatctattatttctatctctggtatgagattctggtcgtgcttgttgcttgcttctttgtgctcagtttttgtacttcttactgtctagaatgtctacaccgggaaagtaatggattggggagagaattccgtagatgcaaagtagcaaaaaaaattagttgcttcacctgattattctattttgttttcattttgtcatgtggcaaagggaaataatatcatgtgtacaaatctatggagcccttttgctccacaatgaatagtattttctattttgatcatccttctctttttatttgtgcttgaactcaactttggaggttaaagtggggggattttgcatcagattagatctgaaggagtgaattcgatagagctggattaatagggtgaggggatatatcaccatggaatgtataggcagttgctatccaagctgagcttttcatgatcttgcaatgctgttatggtatgaatactcataatagaactaagttactctactgtgttagaattagatcatttgacgattttgactctagtggcagaatgacaagctggttgtcagctgagatccaaagtgtaaaagcttttttatgggagcttattggcagcagacacatctgcctactaaagaaatttggtgggggtaaatttacatacacctgttgagcactctaggtggatttactgaattcatctcaagatccagcact

SEQ ID NO: 4378 - DNA, 3416 bp, Sorghum bicolor
  misc_feature (1626)..(2102): n is a, c, g, or t
cgaatctttagacgtatgcatagagtattaaataacgaaaataaaaactaattgtacagtttggtcagaaatgacgagacgaatcttgtaagcttagttagttcataattggacaatatttgtcaaatacaaacgaaagtgctacagtgtcgatttaccaaaaaattctgtaactaaacaaggccttaaagttggggcaaagtttaggcacaagataaaccaaaagtgaaagaacatacacggctcgttcatatattacaagcgtaaacacaacggacgattatcttgtgcaggtctgttcgagctgtgcagatctgttcaacgccggtctgttcgagctgtgcaggctgccgcagtcatggagatgatgtaggaaaggagttgactgatgctcgccggtcaatagctgggggcgtccgtccattgacgtcgcctacagatgtgcacagtgcacggttatctcgagctctttgctttctcaacaaatcgggcgaacgatggttaattgtggttaattattgtgtttggatgctgtcagatcgcgtgatgcgtgctgacatctacaacgactcgctaacacacatggttccttctttgagaaaaaaaaaaagagagaaaaaaaaaaaaaaaaaaaagaaaaaaaaaaaaaaaaagaggctacgcacggttggcccagacggcaggcgtgacaactacgcgcggctcggtacaaccggactgtacgtcacccatgcgatacggcgtggccggacgccgccgcacaaccacacgagcacgcaaaataaatagagcccgcaccgccacctgcccgctcccatccaagccgtcggcacacctcgagagcgccacgcacagcacaggcaggacgcacccacgtgacctcagccgcgcccaccacggctgccgagtcctgggtggctggttcggcaccacggaatgcgggtggattcaatcaaaattcaaatgtcccctgttgagtgttgacgttttgtcacggtcgccgtccgtgtccggcccaacttttgaacgtttcaaaggatctcatcagagcccgagcgcaacagcacaggtattcgcagtgctctccccaccaattaagctcgtccagtgagcctcgtccgtcgtcctcgtcccattcccacccatcccaccccaccccccattggccattgctctgactgctccgccgtgcgtgcgtcacccgcgctcgagaggggtgtgtgtgtgtgtgtggtttggttgcgcacccaacggctcgcccggcatcctaccgcttgttcgcttgcgagattgtgcggagtggttgctggccggcagccgcgaggacgggcggggcggggcggggcgggcataccgataaaggcgagagatcgaacgaaggcgttgttgtctcatccgtgctagcgtccgtctcgatcgctcgttgtctcagtctcggcttcgacggcggacatcgatcgggacatagaaaggggaaggcggacgatacgcgagccgcgagcgttgtgcgctgccatggacgcgcccttcttccacgagctcaggcgccaggcctcctcctacctcaccggcaagatccgctccgcgcgggtggcgctcaccgacgtcaccccgacgcagctgtannnnnnnnnnnnnnnnnnnnnnnnnnnnnnnnnnnnnnnnnnnnnnnnnnnnnnnnnnnnnnnnnnnnnnnnnnnnnnnnnnnnnnnnnnnnnnnnnnnnnnnnnnnnnnnnnnnnnnnnnnnnnnnnnnnnnnnnnnnnnnnnnnnnnnnnnnnnnnnnnnnnnnnnnnnnnnnnnnnnnnnnnnnnnnnnnnnnnnnnnnnnnnnnnnnnnnnnnnnnnnnnnnnnnnnnnnnnnnnnnnnnnnnnnnnnnnnnnnnnnnnnnnnnnnnnnnnnnnnnnnnnnnnnnnnnnnnnnnnnnnnnnnnnnnnnnnnnnnnnnnnnnnnnnnnnnnnnnnnnnnnnnnnnnnnnnnnnnnnnnnnnnnnnnnnnnnnnnnnnnnnnnnnnnnnnnnnnnnnnnnnnnnnnnnnnnnnnnnnnnnnnnnnnnnnnnnnnnnnnnnnnnnnnnnnnnnnnnnnnnnnnnnnnnnnnnnnnnacgcggcccgttcctggaggaggagcgcgagcgggcgcgcaagatcgcgcgcgagatcaagggattcggcagcttcaacctcagcagcgcctcccactcccacgccatgtcgcagccacaacccggtgacggtgacgacggaagccgcggctacggccggagcaactcgcagtacaaggagcggtggaggcacgacgacgacgacggcggccgtttcgggcggagcaactcgcggatggaggagcggtggaggcacaaggatggcaacgacggcgacaaggagaatctgatacagagcccggagccgacgccacgggtcgcgcgggaagtggaggcggaggtggaggagctgcaccaccaccacccgttccacgggttcgggcaacagcggccggaggcgatgctgctcctgagccagtgatgggatcagccggttcgtgtcatgatggtgtgaaaagaaccgtgtgctcgactagcttttctcccttcctcttcctcgaaggctgcagggtcagtattttactgacactgctatgttgggtgcatcatgcatgaggacttcgatgttctcatggtttctgttcgccatgcgccatgaatggctgcttggccttgtaaatttctatcctttcagttctgaattctgataccaggatgtacaacgagagacaacatacaggcaagtctcaaggttccagcaaagctctggaaaccacgtattctaggagtgagagaatgagatcctcctgcccaagtgcatctgggcaaatcttttagtctgaaccatatactgaaataaagcaaaaggcagaagtattcctaatccagttcctacggacaatcctccgtcggtaaagctagggaaagtatgataatacagtccacagtatccattcaggggcactaaatgtaacattccaagattatcacaatggaagcacagccagtaaaattgtaagataaaaatgcctaaagccgatctttgtgtagtgtttttacataccatttggttgtcattattgcactgtttaccatcacaggattccagctattttctgcactatgaccatgtcaatacttgctaggggtggagtaaaagcacgatggtcctttgctgtagcacaaaggctctcaagttctggtctaggacaagcacatgtgttgcatagcagtatgatatgaatagattcctcaggcaacataaaaaccacgatgtggctgtggaccagtggcacacctttttttgactctgctatcaagcttgtataatcatctgtcccctaccagagtatagcataattgcctgtaaaatta

SEQ ID NO: 4379 - DNA, 6084 bp, Sorghum bicolor
gaaaagaaaacgtgataaagcaacacctgcttcaggtaatgagttgaagacgggtggagtaagcaatgatagcttttacactcctaatggaactaatgggaaggacactactccacgatcatttaaaactgctgcatcctttttgtcgctgggttctgttgatgggttattgacttctgtaaggagctttgattcttcaccaccctatcagaaaaggtcaaaaagaatggctatcatcaaatcagttgagaaacagctggatttttcagcagatggactggatacttctggttctgagatgaagaactctccttgccataattcccaaggcgcaaattctaacaggacgtaacacatacagctgatttgaatgaatctaattccataatgtgcaggtatggtatcttgaacatcatcaactgtgcattcctcactttaggtgcatatttgtgtagaacagtagatggcttgatgtgttttgtaccagcatggagaatttaagtttcacaatcgaactcactgagcagttagttctgcttatgtgtactttttttcaattataatttattcttcctcacctttcaggaaccttacgaagccggacaggacttatggaatcccctccgaactaaccagcctcatgcaaatgtcccggttcaagccaaaatccaaaatcaacaccttcagtggagataagagcctcccgcaatggaaatgacgtatggagcacaggccaacagtaccctgtcatctcatgtaatcagggtgtacaaaatactgtctaaatcgaaagcacattccatagaagattacattgtttgctgcattttgtgaacttacagctaggagttcagattgtagaagcccacagctgtgtacaaagaagaaaacatagctttagaaacatatatagctgaataagagcttcccagtggaatgtcaaattgtcttcttagtttcttttattctgtgcgtcccaaatgttgcgaaacagcaagggtctactcattttgtaacaataaaagcctgatttgtgggctaaaccaatcctgcaagggtttgtcaagaaactagttatggctgcggcttggtttcatggttgactgaatcaactgtttgctatagttctctgattttgtttgaatgcgcaaaaccaatccttcgttagcctgttcgcttgagcttagtgtttttctcaacaaattagtaaattagtaaatagtactttcagctatggctgaaacggggttagggttctttggaacacagtaatttcacacgaattggctactttggaacatagtaatttcatatgaatcacaaaaagtaattttataaaatccgttttttttttcattggaaaaacggattgtagcttgtttattgggcccgcggtgcttatctgtttaggctctgtttagatcgctgataaaaattttctgggtgtgtcggaaggatgtcgggaggggtttttagaaactaataaaaaataaattacatagctcgtcaggaaactgcaagacaaatctattaagcataattaatctatcattagcacatatgggttactgtagcacttaaggctaatcacggagtaactaggcttaaaagattcgtctcgcgattttcaaccaaactgtgtaattagtttatttttttatgtatatttaatgtttcatgtatgtgtctaaagattcgatgggttggatgaaaaaattttgggagggccttaaacttaagcttgcgtgctgctgcctggtcactgggcccgaggctcggaggtgcctgctgctgcttgcgccctgccatcgtcgctgggcccgcggttcgagccgaaacccggcggcgtgtgctccaaaccggctggctccgctgcttccgccctgccatcggcgcacgcagcatatccaaagttctttcttccgccgcaagaagcccagccggcgccacctgtttgtctgcctcgatataaccgcccatctcgattcgatcgcgaagtcaccattcaccaaccaaagtccagtgtctccatcgcggctgccacgcctctcgcgcacgcgcaggacgaccaatggcttccaggaagttcttcgtgggcggcaactggaaatgcgtaagttcccccagggcccaggcaccatcgtttttctcgatttgaattccgcgttacgccggagtttcggtttggctctgatggcatccgcatccgctcccccgtgggcagaacggcaccggcgaggacgtgaagaagatcgtcaccgtcctcaacgaagccgaggtgcccactgaggacgtcgtcggtgagtcctctcaactggttcacatggcctcatctccccgcgcctgcaattgcggggccgtttcggctgtggtttgggttttgactggatcgatctatgtgctgatctcctggttggtttaaactcgggggtggtgcgcagaggtggtggtgagcccgcctttcgtttttctgcagcaggtcaaggggctgctgcggctggacttcgctgtcgcagcgcagaactgctgggtgcgcaagggcggcgccttcaccggcgagatcaggttgcttttcctactcttgttatgatctgtcatggttcagtgttgtggtagaagcaatagaactgagtgcttgcccattcgctcagattggttcagtagcatctctcggaggagttggtacgaatttcatgtccctctagctttagctgcactggtttttgttctttgaaattgaaatgtggcttgattatgtcagcaaggttctagaattgttcactgggcaagatttgacatgctttattaaacctccagatgattttgagtgtcaagatctgaaatgctttcgcatttgagtcggccctttgagtcaagatcttcaatgctttcgtatttgagtcgacattctgattctctgtatttggtcatggattggatcctgtaatgtccagagtgatccattttgttgatccaagtcaccaattgaatagtttctggagtttttcttccaattggctaatatgtgtcagttttcttgtttcagtgctgagatgctggtgaacctgcaggtgccctgggtcattttggggcattctgagcgcagagctctgttgggtgaatccagtgatgtgagtaccttttaaactctaagttgctgttgatttattttagctgacgtggtctgatttatcttctctattaacaactcacattcctgtgttattttgcttgatgcttggaagaatctggtgtcttgtatacattcatatgttattctgctagatggttggaagaaactgtcatgaaagctaatggcattgtttgaaatgatctgtgcttttcatgccacatttgattctctacttaacagttgacatcaatttactatcatatcagcatttaggttcaaaaacttgtggccactggaaccagatttttccttggtgacacaatgttgttagacatgtttaagattgaatttgtaacactttgacctgagtaggccatatgatcagattttgatcttttcacatttgtgcagtgctgtgaaatcatgcgagtatattcagattctgcactaaccctatgtagattctccctaaactagcatactaactaggttgataactactatgccaattgccagatataactgtatccgagttgtcatgctatagattattcattatgttctttcgccaagccatctaaacctgtacctgctgctgctaagtcttctgtatttcttcatgacttctttatttcaattcatgacagtttgttgctgataaagttgcatatgcactcacccaaggtctcaaggtaattgcttgcattggtgagacccttgagcagagagaggcaggaacgacaatggatgttgttgctgcacaaacaaaggctatttctggtaacttttacttgctgttatattatttaagcagattatatggaacaggaatttgctactctgctttctgaccattttatgtttttggctgattcatgcttctatgctctttcattctttttttttacattaaatagtaaaaatcatggccgccatttctttttttgtgaatgggacacaaataattctgaaagttgttgtcattttaaaaaagaactatatgttatgcatggcacaggtattaaaatatttcaatgttttttatacctaagtaaacacaatttttaacacttcactcctttttagcttcatctgttcattctggctgctgctttgaattttatgccttcatgcaaaaatgaaggacttatgaatttctccaattcactgtttactgcctcttcttttgtttcccagaaaaaatatcagattggacaaatgttgtgttggcgtatgaaccagtttgggctattgggaccggcaaggttgcaacccctgctcaggctcaggaggtatataacttcttaaataggagcaataactgcatgatttttttttcgcacggtatatagtggtttccatctgtgtcacacagtattcttgatttacatatcgatatgaatgttcttaattctgttttatatgacatttgagatgtgcatggtattgtaggttcatgatggtctaagaaagtggcttcactccaatgttagcccagcagttgctgaatcgaccaggataatttatggaggtagtactactgccaatatttttaattggggttgcatcccagttgctttacaatatgttgaaagtcgtcttacgacttggacatggagccgggaaactaagcataaccttttttttaatgtctctaattgttgcatacacagttcagagttagcttatcattactctgaactagggcttgccactttgtattacaacctcttgtgttatctctccagggtctgtaaatggagctaactgcaaagaacttgcagctcaagcagatgttgatgggttccttgttggtggagcctcattgaaggtatgatccttgtctcatcctcatgaaaaaaaatatatataattgagcccttttccggtccattagaaactaggaggtaccaacatttataactttaatttggtacctagatactggaaaatagtagcacatgcaccaaaatttggtaccactattgtaatcactaatcaatggtaccttgtagtatgtttaagtagtcaacttaaacaaaacaatgcatgtgcagagctatttttgtggagtagctggtaatgtgtgaaatatttcataaagtcggctgaaggcatcatgcctcatatttaaacttcactattatgacgtcaattttttatttttttacagcctgagttcgtggacatcatcaagtctgccactgtcaaatcttcatgtgcctagtgttttgactttgaatgcacccggaggcttgtagtacataatgctgctgcacttttaaagttattgccattttaccatcttgttttggtactctagctccagtgcatcgtttgtgtatcatgccaatgctcatctgatgcgtatgtgctgtatcacccttatgtactcttggaacggcataatgaaccgtgctattctaatctgttttctcatggttacttgaatttatagtgtgtttggtttgaggaatcaatttctcaaatttggtggaatgattttatttcttatactactattaattattgacttgtggggaatgatgtgatgatgcatcagatatactgcaaaacaaagaaaggtgaggagtgagaagatggattactttattcctcaaaccaggtgtcttgtttgctccatcactctatggttccatatgttgcagtagttagaaataaagggcttacatttgaagcggggtacagttgtttgaatatgcaacttgctactctttccatgacgtgttttatgtttgtcctaaccttgtacaaaaattttgtttcgtcctaagtttattcaaatctacaaggaaaaagcataacaacacttccagcaccaaagaaatcataccatgtaatcatggtaagttcaatgaaactaatttggtgacaatgttggtttttttagaagttcagctaaatctaagaagtttgactatagacagagc

SEQ ID NO: 4380 - DNA, 8528 bp, Sorghum bicolor
catttagtcgggcacatggttaattggaggtttccttcctgctggactgaaaaatcagaaacacttacagtatctggaaaaattcagaaacattcacagttcctgcagaactgaaaattcaaagacattcagtcttgctaaccggaaaatttagagacttcacagctcaggccttgtttagttcctgaaaaattatgcaaaatttttcagatttcccgtcacatcgaatctttaaacatatgcatggagtattaaatatagatgaaaattaaaactaattgcacagtttgatcgaaattgacgagacgaatcttttaagcctagttagtctataattggataatatttgttaaatacaaacgaaagtgctactatttttattttacaaaaaattttggaagtaaagaaggcctcactctaaactgaaaacttagagacttcgcggaccacacaaaactgaattggtgatgagtctattcatgctgatttgtcagggtgtgcatatatcatcaaaccagagacaatcagatgctgcagaatgcaagccatggatcatgtataaatagttcccacatcgtcagatcagatacagtactactgcagcaaagcagtagagaggatcgttgaaccgaacattgacgatgaggtccggtggatccatcggtggcacccttgctgagagcacgaataatggagtcggccgccgccgccgcacccttgacgacagcaccggtgaagccgtgaaggggacatggatttgctgcacagaaaaatccccctggcgcgaaccagattacgcgagcgcccacgcgggatccgagtcatcgaaacgaagcctacaacgctgccgtgctcgtcagttccacctcggaccacgggcccttgccgtcgtctcgtgaggcgacggggcgagcgtctgcaaggccagctgagggtttttgtgcaaaaagaccatctccgactccgagacgggatagacaagcgaacaaactcgatcgaagagcatggcactcaagcttgtgaagaaatgcatgctaggtgacaaacaaatctaagctgccgcttattatagtgttagaaaacgttaattggtaatgggaatcgattgccaaatattcaaaacaccatataaattgacttatcttcaaacttagttctgcactctccttcggttgaactttgatttggtttgttcagtttaattcaatgttgttttggtttgttataagtagcgtttaaaaaaaaattcgactcttatgttccccaaaataattaatttcttgaatcccataaagtcaaactatcctaagtctggaaatttcatagaaacatgtaatgttatttatgataccaaataaatacattatgcaaaaatttaatgatgtatctagtgataatattttgatattcactctgtccctaaaagcttcaactcctagaatctatatcagtcaaactttttttaagtttgaccaactttatagaaaaaaatcaatatctatgacataaaataagtatcttataaaaatatattctataataatctaatagtattaattagtactattaaacttagtgtttttttctaaaaattcaatcaaagttttaaaagtttaaaagaacaactctaaaagttgaagctggcaccaacttttttttcttctataaacttggttgcctttaaaatattttgacttagaacaagtctaaaagttaatctattttggtacggagaatattttaagaaaaaaagatttgcatcttgatcttcctgtggtaaaaagaaaaaaaaggatcaacgtttgttttggctgatcgtctctacagaggtggctccgacaactcgacaagctttctctccatgtgttcttccccctttcctcaaaatgacgtgcgcacaaatacaatctcacgctgactcggcctatattcttatcatcattggctcgatttctcgtttttttttagtacgcgacgacttcgtcgtcatcactcatctcatcgcctcgcctcgtttacctcaatcgaggttgttttatttgctgaatgatgcttcctcgctgacccgctctcaccagttgccccgccgatcatccagagtcccagacctccacggcaccgctgcgtctcctccattccaacttccgagccgcaaaccccccgaacccttccgtgcgtgatggaccccacctcgccgtcgcccgcggcccgccgcgccgccgccgtcgcgcgccacctcgctggcgccaccgcccccttcccggcgagcactcccctggaaccttcctgctgcctgagctacgtcccgccggagtccaccgaacggccggcggcgttcgcgccgggcgacctcaggcttctgctggacgggcacgacctgcccgcgcgcgattggctcttccgcgccatggaggagagcccccttttccgcagcccgagcgcgcggacgggctccagggtgttcgtgggggcggacttgaacgacggcaaggaagggcagcgggaggccaccatgcggcggatcgcgtacctgaagcagcgcggcgtgttccgcgggtggctcaccaaggacggcgctgacgccgagctccgcaaactagcgctccttgactgcatcgccatctatgaccactctctcgccatcaagattggcgtccacttcttcctctggtaatttttgctgcaactatttgcagcgttattggctgggtcattcgtgcatacggcataattgagtgcttatatgcttattacttcctattcccaggcttggttcatgacaaattggtaaatttatatttcactttgccttcaatttaagttccatccagtgttttcgatacactatgaacttctgattcttttgggtggcttgtgttgttatattttaagaaagcagcaggagctaaacaacagaacacaaagttttgccttaacagtagacgtacctcaagaggctacaagaaatctccaggcccttgagatagacaaaccccaaagaaacggaaacaaaatgcacacgaaaggcctccaatactagttttgaagcacgttgtccttgttcaattttcctcttttgtacgtagtgcaatagatagaggcatggcttgtgttgtgccattgtataaaatcccttccttttccgtgcttttgatttgcccttcgcttgtgctggattggcaatagtactagcaaaaacctattggtacactccctatatcgaagccttttgtcccaaattataagctattataggtgaattaactcccccaaagcaacaatcacatgcatacctgccactagtgtgtaccacctggttcaaaatatagtaggcacaaaatctctctatagttaagggagtgttattcgtcatttgttttactctataatctgtcctaagttttctaggataccttgtatttcaggatggagggagtaactaatagtgatggcgctggcattgaccagctggaggctgcggtttatgtcagcaccaggatgcctttcagtatcattatgctactactccctccatcccaaattataagtcattccaacttttttagagactcaaagcaactcaaatttgaccaaatttatattataaaataataacatttatgataccaactaagtatcgtagattcttcattaattttattttcttagtaatacctatttgatgtcataaatctttgtaattttctctataattttggtcaaacttgagatgttttgactctttaaaaatgttggaatgacttataatttggaatggaaggagtagagtttaacatctatccgcacgcaagtaaatttggacgcctgggattgctgcctgggcctggtagcctttccagggtccaaaccgaacaagcttgtgtctgaggttaaccgttttacggaggtcatttctaagagtttcttgtggctctttagattaagtttatctaaagcgaatgtttagaaattgtactacaggaatggtctcgaagaagccaccctgtttgtttgttttttgtaagatttatttcctttggtgagaatgtgcttatagtacagcagtaagccacctagttgttggtactaccaatcagggcttggactctggttctcacaaaacaaggggacattttttgtgagaactagaaccacattctcgcccaaggtcttaggtgccatgtgcttgtagtgcagtgataagtcaccgaaaggcctttaaggccttttctcatggttagatgcaatgatttagtgtttgtcttccatcgagggctgagctcttctttttatttcttttggcaattaatttactaaattttatttcctcatatggaatatctagaatcttagctaaaagaaactgatactgtcatttgttacatcatttaccacatactgttgtatggagttcttttgtttgcaatcttctcatgtttagtttgttaaatttctgtatgtattccaggggcagtgccatcaagtttcttggaacaaagcgccaccatgacaagtggttggttgccacagaaaattatgatatcatgggttgttttgcaatgacagaactaggccatggaagcaatgtacgtgcggggatttgtgctaagcatctttattatggtattacttagtaactgtgctgattaagttctgctgctgcttctttgttacaaaaggtacgaggaatagaaacaatagcaacttatgattcagaaacaagagagttcatcataaatactccatgtgaatcagctcagaagtactggattggtggagctgctaatgtaagaaaacatttcgcttgcctcaccatgtgcatctgccctgtgcatatggttacaacttactaaagatttccatgcccttttgcagcatgcaacacatacaatagtcttttgtcaacttcatataaatgggagaaatgaaggagtccatgcttttgtagctcaaattagggatgaagatggaactgtgttgcctaatatccgtatagctgactgtggccataagattggactgaatggcgttgataatgggcggatttggtgagtacttgtatttaccttttttgtattattatatacgtcgctcagtgtatatcatttcttactttttacctctataacaggtttcagaatatacgtgttcctcgtgagaacttgcttaatttggttgctgacgttttgccagatgggcaatatgttagcatgatagatgatccagatcaggtctctctctctctctcacacacacacacacacacacacacacacgcagtatgtgacaaggatttcttattcttctttttcttaagaagttgcaatgttgatttgcagaggtttgcagctttcctctctccgcttacacttggtcgagtaaacattgcagttgactcagtctacatttcaaaggtgtattgcaaggcattttcttctcttgtaaacacagaaaaagttttgctgatgaatttaacaaatataatagcccccaacctcgcagtaatttgcttttagaatttaaacagttaatcaaatttgtcccagtaaaaggtaaccggccagcttgaccgaaatggaacatcactcattttggcaagggaaagataacaagttgaattgtttctcacaaaaacctagttgtagagaataggaaaaacaccacacacacccttacggttggtgatgagtatagtggagctggcttgtgttacaagaatgggtacaatacaagatatacaactctatctctaacactagcacatttgaacaagcaatgaaattatctgtgacttgattgtttatttgaaggaactgattcaactttctgccagcaaacataggttgatttgttaaataactaacttggcaagtttgatgaggaatgtgccttgttcagtgttgaagcatggatacaatcgtattacaaaataatgacatgccttttactttccatgcatacaggtcagcctagcgattgctgtgagatacagtttgtcaaggagagccttttcaattacaccagatggccctgaaacgttgttgcttgattatcccagtcaccagcgacgccttctaccacttctagcaaaagtgtatgctactaacttgctgtatctacagttaatatttaataacagtcataatacaagttcttactctcggctatttttgtgctaatctagttgctaagctgtgcattatattaccttcttgtgcaaagcttccatactacagttcaactaatccatagcacttcttcctaacagttatcatttcactatacttcctggtgcagatgtctgatgagtagtgctgctaattttatgaaaaatatgtatgtaaagagaactcctgaaatgagcaaagccatacatatttactctagtgctctgaaggcaacactaacttggcagaatatgatgactcttcaggtattattgagtgttgaaagagctattattatgtttctttattccagtcactatttctcacaggactttcttttaaatgtattaggagtgtcgtgaggcctgtggcggtcaaggtctaaagactgagaaccgcgtaggagttttcaaagctgaatttgatgtccagtccacatttgagggtgataataatgttctaatgcagcaggttattgttgttttcagtcatgcatctgtttttatcaaaggtgcttcgtgtggttgtaacaatttaaccttgtttaggtaagcaaagcactttatgctgaatttttgggtgcacaaaagaagaagcggccattcaagggattgggtttggaacacttaaatggctcaacccctgttattcctgataagctgacaagtaacatattaaggagctccaagttccaggtaaagaatcataatttagtttgtcacttctaatatatccctggcatgacataaactcaatcattgagtgtggatttgttcacatgaatagatggacctattctgcttaagggagagagatttactgaagcagtttgcagaggaggtttctctccatcttgcacaaggcgaaagcagagaaaaggctttgatgctggtaaaaatcagatttcagtgtgcactattgtccactgttatataatttctttgtcattgatacaagtgatattttcccagagttaccaacttgctgaagacttagctagagcgtttactgagcgtacaatcctccaaatatttctggaggatgagaggaatgtcccttctggttccctaaaggtatattcacactactgtttttagtcctcaattgtatcatttgctagctactacagttgaataacaaaatctttcctttgatcttttcatttctgggtgaaatcacgcaaaatatttcattgtaatccttctataaccttttgctatcatttccaggaggtactgggtttgctgaggtctctatatgttatggtgaacatagatgaatccacatcttttctaagatacgggtatctatcacgtgacaatgtagcccttgtgcggaaagaagtcttgaaaatgtgcagtgaactcaggccccatgcgcttgctgttgtcagttctttcggaatccctgatgccttccttagtccacttgcttttgactggattgaggcaaatacactgtcaaccgggagccactgatctcaagtttcacatacgagccaggttacccagtgaaagtactgaatattgatggcggagcatacaaaccatatactgtaatataataactacaggagcacttgatgcctcacaacaattgttgtgaagtgtatagctggagaggcagatgctggtccgagatgcaggtggtgattcgtgaaatcctgttttgtataatagttttcttgaatataaagcgaacgtagccttaggctgcggtccatgtaatggggtttaaccgagttgttcaacagtaaataaagtctttagtgctgctacaggatgttcaagtgcccctgaaagggaatcaaataagcttgtgtcgatccatgttcaaattcatgttgatattattcttagtgatattttgctgaagtgaataacctgagacatacaaatccagatcatgacatactgacataataagcgaaataaagccaatgattctgaccattcttctgaaaaaatatctcctacacttttgcaaggtttccatgacaattatacaacaaaaaatggcatctcaggaattacaccgatcatcattgtacaaatggatgatcaatcaaatcattacaaattagaccttgacctaccctatctacagaacgaatgtcagtctcgacagcagctcttgtcagttccaaaaagtgcctgaaaattacccctgcttagcaattcgaaattccaaaggtgtcatcataccttcccctgatcgcctaacgccccataggcttgtcacacatcaaaaccttcctactggcgtatgcaccttcggcagtgtcacgtatagtaccacgccaccccatggcgtttgttatttctttgatctcctgtataacttctttccggtcacgaatat

SEQ ID NO: 4381 - DNA, 5385 bp, Sorghum bicolor
cgagcgccaccgcgacgagagggacgacggccggcagctccgcccgacgtccgtggactccgaggccgtcaccacctgcaccgcgagaccctctccacttcgatgctcgacgctgcgccggcgagcctaggatggtggattctgcaggttcggtaacaccgagcgatgcctcgcaagatataagttttggtgggtgtgattatgtgcaaatggtgagaaacagtacgcgttgagatttgagaacaaacatactagtttcaagttctgtatgcatctttttagcttttgtgcctttttttcttacgctgtgatgtgaaaggagctttgtatgcctaggcacgagtctcaaaggaggcttcgtaagtgcgcaacagcacgaggcatgtaacatggttgcaagaaccgttgtgctacttccattccatacgatttctactgtacctgtacaggatgttacttctgtcatcttcttctgtttgggtggaaattctgttattttgacattaataaaaaaaatctgtcattttatctttctgtcccacgacacatatttgctggcccaattgaaagcatgtttcggagtacgtcctaacgcgtaacaaaactaagcccaatgggccatgagtcatcagagattaaacggagctgtttctgagtccatgatacagcgagaaaaaagaagaagaagatgcagtctctgcacatcaagacgtgtgaaaaaaaaaactcattgttgcaaaatctttctttcatataactaactttgttttctgacaatatatttttacaccactgctttattaactgtctaagagcgtttttcaaaccctcaaaatttcaccacatgagacctagccgagtgaaacaaaaaccgcggcggcacacctaatttatttgtacagcagcaaagtaacaaaattaaattgaaactgtaagagccggtcaaactagtagctaaccatatccgatatccttcttccatttacaccaagacatgccatacttctgcatattcactcgtgatcccagcacattcaggttcgtctgacagagctagtagaagagaagaaggaacactgaaactacaggattcagctaagtagttcagagctcagggctcggcctatggcccgattcagagctcaggcatgaaatcgtcggtcgcagatcgtgcttgcaatctgcaaggaacccgggcggttccttggattcaccgacactgcagcaaggttgacctcaaaaggcccgagatctgccgggtttcgcgacgcatcgcaaggtgcgtcagtgcgtgcatggcgctactgcgagctgcacgggataagataatcacaaccccaaacaggtggtcgctgtcagtggcgtcgtcgaggaatcagctgttagaatatgctgcggcgcaaaccattggtggactcgtagtacttcgttgtcatcagaaaaagaaaaaaaaaaacggaaaagggccgcggcgctttgttcagcacttcagctcggcttcactctagctagcttttacacatgcacagacagacaggcgactcggtgccttgggctcgggaaagtggccatggcaagcgcctgctttcccatcgatgaaggaatatgtgtgatgcctccggctgaccggccggagtccggagaaacacgctagtactgtacagtacagtagagtatttctgatggacatgcgtgcctttgcttcggcgcaaagccggcgatgtctcctcgacggcccaggtcagctgcgaatggcagccacggaagatcagcagcatggatgtgagccagtggggaaagaaaaatgacagcgttgcaggcggtgatggcatcgatccaacgtgcgacgagcggagagggtaatgccagcgctacaccgcgctgacgtggccgccccggcccctggccctgagtgaggtcaaaagggtgggggcaaccgtgggccctatatagcggaccctctcgctggagatgggcctccgagcccaaccattgaggaagagaagccaatccaatcgccagaagcggcagcgggagggagtctggtctctggtgggtgcccctacagaggagtcctctgctcgtcgtcgtcctcggtgctcgccgtgttccgctcgagaacgtcccgggcatcgccggcggccacgggtataacaccgatctcctccatccgctcgccgcgccgcaatccggagaggagactacgctaggtcgagcaccacctggggctcagcgttctcgcgaccagttccggcgcggcgtccgccctctgaagccactcgcccccgcgaccgtcgctgttgtccttcttcgccactcgccaccttgtccggcgacgagcaccaccaggacagcaggtattccctcaccttggtcctcccttcctgctgtgcgaagccgtacgcccaaaccttaacgtaattcgtgggtaaaaccgtgcgcccaaaccctaacatactgttcgtaatcggatctgaatctaattacaggtgtatatgtatatgcctactaacttcgattgctttgcaaaaaaaaaggtgtacatgtgtacacccatgtcctttaatgggtccgcccttgcctttcttgtgatgtgtggctacagggattgagggagggagtaaaggaggtgcttcaccatgaaggcgctcattcttgttgggggtttcggaacccgccttcggcctttgactcttagcttcccgaagccccttgtggattttgcaaacaagcccatgattctgcatcaggtaaagttactcgttattaagctgatacagcatgagcattctagagaggtaatgaacattgtgataccatatcactgtacgtactacttgtattggcatgagcaccaattttctttgtatagtatgttatcagtgtccttaaaagtaatgcggggctcaatatgagtatatgtggtttacgtatttatagttgctttggtgtttttttttaacccaattccactgctgatatcatgtcagcatccatcatcagtagcttttgattgttgctgtgccaggagttagcttagaaacactttagccattcaactattactttctttatttagtaatcactgcttttcttatatataagatctatcatcaacttggagaaatcattgtgaattatcatgtgacttcctctcttcattttttttccataaaaaaaaatgcaaaacagatatctaggaattttgctttgtgtccaagtacatatttaaacatcaaccaagtgctcttttttatgtgtgactgtggcttgaagaaataaaacttactcattctctgcagatcgaagctttgaaagaagttggggtcacagaggtggttttggccatcaactaccgccctgaggtagaaataacagaccaatcatcctttctattgtggcacttgggtctggcttctatgatctaattggtgtgtcatatatcttccaggtaatgattaatttcttgaaggactttgaggataagcttggcatcacaatcacatgctcccaagagacggagcccttaggaactgctggtcctcttgctctagcaagggacaagcttgcggatgggtcgggcgagccattctttgtcctcaacagtgatgtcataagcgaatacccatttgctgaactcatcaaatttcacaaatgtcatggtggtgaggcaacaattatggtcactaaggtaaatccttttggacattttcttgtggaatcagcccgcatatctgaactgacttttcttttcatataggtggatgaaccatcaaaatatggtgttgtggttatggaggaggcaactggcagggtggaaagatttgttgagaagccaaaagtatttgtgggcaacaagatcaatgctgggatttacttactgaacccatctgtccttgaccgcattgaactgaggccaacttcaattgagaaagaggtcttccctcaaattgcagctgatcagaagctctatgcaatggtccttccaggtttttggatggatgttggtcagccaagggactacattactggcttgcgtctttatctagactcacttaggaagaaatcagctgccaggctagctactggaacacatgttgttggcaatgtgctggtgcatgagagcgccaagattggagaaggttgtctgattggtcctgatgtcgccattggacctggatgtgttgtggaggatggcgtgaggctttcccgctgcactgtcatgcgtggtgtgcgcatcaagaagcatgcttgcatctcaaacagcattatcgggtggcactcaactgttggaaaatgggcacggatagagaatatgactatcctgggggaggatgttcatgtgtgtgatgaggtatacagcaatggcggtgttgttctcccacataaagagatcaagtcaagcattctgaagcctgagatcgtcatgtgagctctccagttttagccacagtacattcttaagttctttgacaaagggaggatttgatatccccttttgtaaacgatattgcctggtatcttcgacctaatgcaaacagcttcatacatgttctcttgactcttgttaaactattgacaatgtatccttgttctttgttgaaaagtttagtactttagtgtcaaccatattccacaagtgattgtgatatactgagcttggaggttttggacccttgatctgcagaagttcaatgcaatagcaagagtaagttaaaaaaatgtggtccaaggtaactttcagtagtaatgtttgtgtgccaaatgctcttccggagaaatgtacacacataagaccatgtgtaatgtaaccctaatatggttcgtatttaatcttgtaccaataaatatactgtcggtctcttaccaatgaattactgtcggtatgctatcttgtccatgtctccctactctacgttgaaccctatctgaacaattgcgttttcagtttgaataaaatgttggaatcattttttttaaatgccggaaccatggcattaatgcattatatgcatgggatgttgtacgatgtcttagaaagccatatactcctttggtattttccccctctatattggcgactgtttctatcatcgtcgtcatcttccctttaaaacatttctaatatagtctggcgttattgtaccgaaagagtgatggattactggttctcagtcgtgcaactgtagccaacaaaatgaggaacaagacttaggggtttcatatcgtgctacttgtccatctttgaacctcagagaaattgtgtggattggaactggccttctccaattattttccagatataatccagaattggttatagacatataaataataatatggcctggaaacgtccgtccgtgcagtggactgagtacgaaaagc

SEQ ID NO: 4382 - DNA, 2962 bp, Sorghum bicolor
cttattaaggccttgtttagatcattttttattttgacactgtagcactttcgtttttatttgacaaatattatccaatcatggagtaactaggcttaaaagattcgtcccgtgatttacaggtaattgtgcaattagttatcttttttatctatatttaatattttatgcatgtgtcgaaagattcgatgtgatgaggaatcttataaagttttgggtttttgagtgtacgtaacaaggcctaaactactcaaggggctgcgagtgactgtgagcaggggcccagccgcacacgtaacaaaaaggcggctttaggaaactgcagtcttcaccactttcggccttgttgatgggaattttttttgatttcgctactgtagtattttcgtttgtttatagtaaatattgtctaatcatagactaactagggtcaaaaaaattcgtctcgtaatttacagacaaattgtgtaataagtttttattttcatctatatttaatgcttcatacatgtgccgcaagattcgatgtgacggagaattttgaaaacttttagatttttggggtaaactaaacaaggctttagaacaactgcagtcttcacttggaagcctgggagaagcgcatctgatgcgcatttttttttgcatctggtccttgtcagcatttcgctaaggtcttgtttagttgcctcaaaaatcaaaaaaattttaagattctctatcacatcgaattttacgacacatacatagagcattgaatataaataaaaataaaaattaattgaacagtttttctgtaaatcgcgagagaaatcttttgagtttagttagcccatgattgaacaataattgccaaataaaaataaaaatgctataatatatccgaaaccaaaaaaaaaattgataactgaacaaggcctaagtgcccagtagggcagtaggcagtagcccgctgttcaagtgggaccatttacccgccatgtccccgtggtcagtgaccaacctccgcttgatggagctctgaactgaaggcccaaggaggcaggggctccagacgacagtaatccacgactaatcacaataagtgctagtactatctgtgcaacaagattgagcttccgtgtcccgtcgttactcgtgtttggtaacgatgaaagcgtgaggacattcatgggctattgggagcttggataggcatgcggcatgcccccattcaatcaagagagtccaaacagcagccctcatggacgtcacacgccagatgtgaagcgagaagctccggaacgtcatacgacaaggcacgcgtatgggctggccaccggccgtggtgcaaaaacagcaatcctgaagcaacacctcacatgccgcggacaccgactcggggggccaacagtttttcctgctgaaagcaaaatgatgggacacaggaggatttctatgtgttgctcgcaaatacactgctaaaaaaactttactgaactgagtttcagcctgtaaactctcatacgcgcatgtgaatagctgtagaaaaacttgaacttcagaaattttcagttagctgtaaaaactttactgaactgagttttagttttggtagttagcctaaattccgatcacgtcgtccacaaactcttctgtctgaattgttcgattctttaggaaaagtcacactcacacccatgcctctaatcaatctcctcccacccaaatactacagtgaacactatccgccgacggccgtgctatccttgccgagacacgataggccccaactaatcccaccgcaaaaggccccgttttcgtgctcaaaagtttcgattcggcgttatgatgacgcctcctcaaacctcaatcaatcagccgtccactgattccctcgtcgacagccgtagtgtgctcggtgcccgatgccatgctttccctccatctttctgtctaaatcttccgtgcccgtcttaaacatgcgtgtacctggcctattgacctgccttccacttccactggttcacttctccggttctccttctccggctcggccttcttggctgctctgcttggcagctgaacagaggcccgtgcctgcactgcgcagcagcgatgagggactgggcgccggcgatcatcgcgacggcgctgttcgcgctcctgtgcccgggcggcgtccttcagatgccaggccggcagcggcccgtcgacctcatgaacatgaagaccagcttcccgtccatgctcgtccatgccatcatctacttcctgctgctcatgctcttcatcgtcatcctgcagcctcatctctacatctgatgtgagcgtacgtgtgtttcccgccttgcagaggctcctagcatgttttaatttcttggggatgtagtttgggcctttattagctttgtaactttacggatcagaggattatagtatgtaatatgcctcctgaaaacttttaatttggttcagagtttcagacttcagagtgtcaatctatgcggaccaaagtttagtgtcaatttttcgtctcctgcagcatggcgtgcatggttttcgagaaatctctgacagaacatagcacaatatggcaacagcgtagattttcagtgtctgattctaatttttgacaggagcaattcgaaattcataagagtgaccagcgcaaatctgtgcacctgccacctgttagtgttctgctatgtgtccccttatctgatctcatatagcactactaaccgtaactcaagaaatccttaggacggcaaagcgagctattagattagtttgcggacgtgtaggtagaaaagatacagatttagaccacaagcagaatcatcctctgttaaatggtttagccatgatgctgtccacagagactttctcctgtattgatacaagctgagcagtttcgccacaaagaaaaaacaaaacatgtccagttacaacaactagagatcaaacaaattgtggagtg

SEQ ID NO: 4383 - DNA, 4390 bp, Sorghum bicolor
ttatgtgagtagagagagtttcatagatgatgagactcttctgtattatttttaaaatataaatgttttgaaaataacaacacgaaattcccactaagactagtcttatatatcattttctagagcacatgtataacaactctacttcagtgccttagaaaatgacatgggccgtgatgctagaactcagttaggaaaggcctatctagaaaagtgggcaggttttcatcagaatggaaagccggcccagtataggacactgacaatgcctacccatttagtctagtttgttagagctgcttctactgcatcacctgactgaggttccaatgcgtgagcaagtttttagtttgggcttattacggtttgtttgtttgcttgcttggttaaatctcagcacggccaggaattaggctaacaaagtatagagataacaggttatattctatggtatggtgttcagtgttcagtgttcagtgtttctactccttgtgtttttctaagacgtgtaggcttttgtttgtttcagcttgggtcaatttacggtacaaaaatcaaaagcagaagcgctttgttttgtcctcaaactcatctaactttgaacaggtctaacgaagctgagtaaacacactacgaaagcatttgatactagatctaaagttaaaatatttgatttaaacacatttatcgtggaacagagggcagcaccaataatgacttccatgcataaggcaggtaggaagagttaaacaaacgttttttttctccttctatataatctaggagtatatctatctattctataataataaaagaaaaatagttgtgaaacacggttggaaggagactgacatgaacttacgcccatttggatactatatagggggctaaactttagtcccattacattagatgtttggatgctaattagaagtattaaatataggttaattataaaactaattgcataaatgagagctaattcgcgagagcgaattcattgaatctaattagcccataatttgacaatgtggtgttacaatagacatatgctaatgataaattaattagacttaatatatatattcatctcgctaattagccacaacttatgcaattagttttataattagatcatgtttagtttttctaattagcgtccgaacctgtgaagtgaaggggcgaaactttagcccaaggatcaaacacccccttaattttatcctaaaactatgggcagcagaaataaccagttgccaacttgccatttgcaaccaaacagatagcatcacttgatcggacaatgcgacggaacaatcgatggaaccattcgccatcaaattttgtggcagcccgatatatgaacgatcgagctccagtagacgttgagtatacgaagaattatcttaacaacgagcttgctagttctgtttagttaatggcagacgattaatttccaaatggcacctgactgtgaggtgcccatccatcactccatctataagaatcctccagatggcgttcccttattacagagcaagctacgaaccatctgacctagcaaatgcgattaatttcagtttcttgtctctgttgtcatctatacgcctgtttgatactctccctatgtattgtccatttggactacatgcatgtatatatttatgccaaagcaaaagcatacgaatgcactatacaaagagctactcctctttctctaacaacaaaaagaagaagtgctacaccaactttagaaaggaaactggcctgatatatctagcctgctgggcgacgctgctcgctgctgctggagctcatgcagctataaactccgatcagaaatcgatctgtaagtagctagcgtacgatgaaattaatttggttgcatatactgatttaatttggctgtccggttgccacaacacatttcatctgatgatcaatcaccctgcttctgtcagttcgtgattcggcacctgagactgagactccgcagagacatgaccggcggcgtacggaagaggacggggttcagtaagctgctggtggtcttgctgttctttgtgtgcgccatcgtcatcgtggcgctgcttgtccgcggcaacggctgctgcgtcgtcgtccaagtggcagtactgccacggataacttcagttggatcctcttgggatgcttctcctactgctacaactcaaagtggcaaaaccatcatccctgcaacgtctacgaggggagcatcatcaccagctcatgatcttcaggaggactcagaggcagtatcagcctcggaggaagaggaggcccctgcagctgcagctgccccgtacgcggcagacagcaggtggaacatccagtgggagagcgtcgccagtgtcctttcatcattcagcagtaatggcactgggcggcgtggcatcgccagagtgggcttgctcaacttcaactcgtcggaggttgctcgctggacgagcacgttgcctgccgccgacgttcgggcggtgagcctggcgccggccgcggacgctgtcacctggcaagccctctacccgaactggatcgacgaggagagcaacagaagcagctgccccaccctccccaatccggatgccgcccctcatcatcacaattttgacctcgtcgccgtcaagcttccctgccgcggacaagactggtccagggacgtgcgcaggctccacctccagctcgccgccgccaagctcactctccatggcagcagcagcagcagcagtaaggctggcatggtgttgatcctgagcgagtcagggtgtctccccctgcccaacctcttcccctgcaagcacctcttcgcgcgccgcggccacgcctttctctaccgccccgaggccacctacctccgccaccgcctcaacctgcccgtcgggtcctgccagctcgccgttccttttctccggccttcgcctactaaactaccaagtgcaacgccgccaggtacaagcaggaccagcaggcaggcctacgccaccgtgctgcactccgccgacgcctacgtctgcggcgccatcgcgctggcgcagagcatccggcagtcagggtccacgcgcgacctggtggccctggtggacgcgcacaatgtgggcgccgagcaccgcgccgccctcgccgcggcaggctggcaagtccgcctagcgccgcgcatccgcaacccgcacgcggaggccaacgcctataacgagtggaactacagcaagttccggctgtggcagctgaccgactacgagaaggtggtgttcctggacgccgacctgctggtgctgcgcaacatggacttcctgttcgaggaggcgccggagctgagcgcgacggtcaacagcggcgcgcgcttcaactcgggggtgatggtgctggaaccgtgcagctgcaccttcgacctgctcatgtcgggcatccacgacatcgaatcctacaacggcggcgaccaggggtacctgaacgaggttttcacgtggtggcaccgcctgccgcgccacgtcaacttcctcaagtacgtctgggccgaaggggaccgggcggcacaggcgcggatgcttaccgcggagccggcggaggtgcacgccgtgcactacctgggcatgaagccgtggctgtgctatcgtgactacgactgcaactggaacgtggcggagctccggcggttcgcgagcgacgaggcgcacgcgcggtggtgggcggtgcacgaccggatagagcccgcggaactgagggacaggttttgcgcgctgccgacgagccacatggaggtgctggagcagcaaaggagggaggcggcgacggtcaacgcgccagacggccactggaaccgcaccatcaccgacccgcgccgccgcatcaaagcccattaccaccactagtacagtcttcgtacggccttggcctggctgagagagattaagagctagatggccattgggtacaggatgggctggttcgcccgattttgttcgtttggttgaacactttggactgggcctcagccctcgatctttttttttgaacaagggcctcagccctcgatcttgaacaatgctcctgctcctacgcatctaaaaagagataaaatttccacgtttgccactaaaaggttattgctgttgaaacttgaaaatcaaaaactttaaatgatagtcaaattaatgaggaagaagaggatttcaaaggattcaaacatcataaaagtcttgtatccattcactgtgttccactataaaatgaggagtcactttcacttgtaacatccatcagaaagtgaaactgtgaaacatagaaacaactctctcctcctcctatctcactgtgtctgtgatttttgtgtgcttgtgagctaaaagggtaagatataagaagatatata

SEQ ID NO: 4384 - DNA, 9694 bp, Sorghum bicolor
tcaatgattcactgaagagtctggcacggcacatgaacaggtaagccttttctagctagacttgaccgagcccggtcgaacaaagatttgctatcgagagaaacaggtgataaagaaactactagtagtgagagaaaccaaaaagattttttttctagagaaaaatgagcttggtttggcttttgcggctcatgcatggattattaagcaatttggtgaagtgacctgaggagttggccagcgagtataaatgcaacttctttttggggtagtttatgatgcgcttgaggccctacttaggcaaaggattaggcactaatgaccggtcagcaacttggccacaactcacacaaatgtgtttagtgtgatccctatctgcattttatccacgataacctcaggattcaggacgggggatgccaaccaagaggccagagtgaggacgtctcgaagaattaatttctccgaggaaataacctttttaatatctggtgcatgacaatgcactgatgttgacccatgcagacagggataatcccaaacaaacccatttccaagcacctactagaattatgtatgttccatacccctaggattttatatatttttttcacactgtaggttgtatccatatcatatatttttgtggtgctttggttagagtcgcttcagacttaactaagccatagttgcttgtggcaattatagatgcctgcatgtattatggagtgagggcatagagtttgacgaatccaatcaactccccttgtctcaactcctagagtcctagtcctagctacgcttcctccttctctgatccgctcttcttaattaacatgcatgatactatgataggagaagaggagatggatggaagtgtagaacaacttctcaatctcttttctttttaagcttgtgttcctttctccctctattctcttttcttttcccccctttttcccctgcctatcttctctctattcaatgctccttttgttgagtacttgccgtctcagaggaggaggggccagagggcggccaataagaggtgaaaggtggttacaaggagtggagtaggagacagaaatgctgacagaaaagccctaccacaccccctctctctctgtgtgcatctcttctcccctccttccccaacaccaacagctcccccagctagctgttacaagcctgtgaaaaaaaaaagagacggcaggacgtgttcaaaaggacaagatcttctttgcagtacagtggatgaaactccaaggctgattcttcaattcgccagtgtgctgcttcaaacaaggcaaagcacaaagcagtgtgtgagaggagaggagagctgagaagagaaacaaacagacaaacaaacaaagaggaggcctcttcccccctctcctctgtgcttgttgcatgcttttgctacaaggatggtattgcctctctcccagtctgccgcctcccttgttctctttttatagggaaggccatcgccaacgctcacagctcttcctgctggcctcttgttcgtcgtcgtagagctagctagcagtggccatggtgcacggcgaggagagttcttggaggatggagagggcagcgctgcctctcaaccaggcgttcgcgtatggagcccaagcccacgccgccgccgcaccgccgacctgcttcctgtactgcctctctctctctctctctctctctctctctctctccttgttacttcgtcgcggtttgtctttgatccctctgccagtcgtcttcaacctcgcctcacccaacccaattccaagaggccgcatgcaagaccaccagagctctgccgctgcctgcaaccgcaaccttttcgtgtttttcaactagctctcctgactcctcccagcagcacttgccgtgtttttcaaatgcttgagtgcgcaagttctttaaagtttttttttcgccctccttttatccgtctttataacagaccgacgattccacaagcttatgccgtgccactttggttggattacacctctgcccacgcaccaaattttttcttaatgctcaagaccggccggcctgaataatcccgcgagtagctagtgcgagtgatttgtttgggcaccgagatcgatctcatcggcaccatcttttggccgccttctcatccttatctgctgcccccagcagccacatccacagctacaactacaagcctcgtcgtgcttaggcagtctcggcctttccattcttgaaaagcttttatctgctatagtagcttcgccttcgccttcgcctcgcctgtcgcgggctggcgatgactgatgggctctgtgtgcgctaactgcttgggctgcagggacttccagcctgcggcggcagccgctgcctacttcgggttcggggagctggaggaggccctcatccatggcggcggcggcgctggcaacgcccacggcgtcgatcccggcgtgatcatcaagaacgacgtcgcgcaggcaaagtgtaagttttttttttttatttcaatctccgttctgtctctggagtccggacctgggctctacttacttgccaaaaaggcgcgttcgtttcatgctcggctgcgcacgggcacagcgccgcacagggcgagacatgcctcgccttttgtgttcctgccggtttccattcctatgcaaacagtgtgcatatgcagctgcggcacctgcatactccaatagtggtgcgatgccccgatgctgataccacaatcatggaaatctctcgtttactctccctcgcctactgtttgcattcctctagccttagctcctctcctctctctctctctctctctctctctctctctctctctttctctctgtgcaaggtcatggagagagatatgcatatgcatgaacagggaaggaatcgacactcggtagctcccccgtgttaattctctttgtatgtatgcatgcagcggcggcagcggcaggatatctcgcgggcgctggcaggccccccacgctggagatcttcccttcgtggcctgaggcatcaacagcagctacacagtgtaaaggccccgcctcctcctcctcctcctcacaatgtcccatgatcactgtgattcatgcatgcatgcacgcattcatcgcctcgcttgtctctcgtcgtctcctctcgctcccctcctctgggctctgctgctggctcgtcatcgtcgctgaacccaagaaaagatgtggctgtttctttgccgattcgcttggtggtctgcacctgcagtctgcagccagccacgaggaggcgaggggcgagccgactgcccgagccaggggtgggtggtaaaagaggggaggatgaagacgagcgagagacagagagagcgagcgacgccacgttaattgttggctgccgatcggttttgtttttgattttaccgcagcaaaagcataagcagctgcgagcagacatggcataataaatccttttacccgccgctcactgttgctgtgtaattggtgaacaggggaattcgcagtcagtagggagcaccactgactcgagctcagctcagaacacaatgtctcagatggagttggtgtccccagcctcctctgcgccgaggcaggaggtcatgatggtgaccactgatgattacagctacaagccaggcctcgccgctgcgcccgctgctgctgccgccccgccaccgagctttcagcagcaccacccgctcccgctgcagctgcacggaggagacggaggaggaggagggggagaccatgacaaggtactactgctgcgtcctcccctctgccctctggcccctggcctgccgcaccagtgtgtccagtgcaccacagcacagcacagcacagcgcagcgcagcgccacaccttcatcttttcctggcacagcatgcacccgtccgtagtactggcatccccctcctacagtcctactactagggccttgtttagttggcaaaaactttagtttttggctactgtagcactttcgtttttatttaacaaacattgtctaatcatggagtaattaggctcaaaagattcatctcacaaattacaggtaaattgtgcaattaatttttatttttatctatatttaatgctccatgcatgcgaccaaagattcgatttgacggggaattttgaaaatttttgcgaactaaacaaggcctaggtatagtagacggctagttgcagtacaccagctcagccccgaccccgagagagaagagagctcatccgttcacaagtctcttcagaatattgctgtcgaatcgttgaaaaactcggtcgtgaatcgtgcggtatgcactgtggtacgtaacatgctgttctttcatgtcacaccaacgccggccgaggcaaatgcacgtacgtacggcaaaagccagcactgtggtgtaccctccagccactctgcagcttacctcatggccctaatggtatcttacagtaataatagttaagggccacactgggccaggcctgcctctaaacacaacggcatgtccattccatgcatgcgtgttccttgtgcgggagatgtcatgtggcctctcaagaatagaaagccagcaatgtccattgattgatgctaacttgggaggaaaccagacagtcctggatgattggactaatgacaaatctggtcaatcctattcctactgagaggacgctaaacgatggccagggtcatccctaataacctcccttttgtctctccaacatctgggtggatggatagcataaccccatccatcttatctccctgcaccttgttgccgcaacagagccgtggctgccaacagcgtctcactgagctttcggggacagctacagccaaaagctaggatttgtgtttggagaagatggacagtgccacagtggcacagtgctgctgcatccatgcatccacggtgatcacgacaggagctttatttcgctccaatgtgcacgcaccggcttgtttctttctgtgtgccggccctgtagttgccttttagttggatgcatggcgagatggtgtgcagtgtgcactgtgttgatgtgtaggagaagagaacggatagggatactactataccagtacatgcatgctctaactccgctggctttttcgtggtgtcctttgcacagaggaagcatggatccacaagaaaagatggcaagttggtagatgccaaggtagggtatatagctttaccacccttgttttggcttgttgcatgcatggccactccatcactttgcatggacctgcatctgtttcgttttgctgccgccactccatcaccattgatgagtattttgagttgaatcgctgtgaatccttgcttgcttgcagacggaacggcggctggcgcagaacagagaggctgcgaggaagagcaggctgaggaagaaggtgcatgaccagcagtgccacccatgattttgttttgtttcaatcaatcagcaaaaagaacgcatggatggtcctgggtttgctgagatgaatggtcctgggattgcatgctgagagtaatctactcgtcctttcactgcatgcaggcttacgtgcagcagctcgagactagcaggatcaggcttcagcaggtcgagcatgagctccagagagcacggtcacaggttcgttcccagtcccaactcccaaacacgtctgatgatgatgacctgcctgtgaatgcatcggatccgagttcgtatcattcagagctttgatgtgacatgggatttaccgtggtccagggcctgttcgttggagggtgcagcgccgccggggacatgagctctggtaatgcccagcaccggcccggccgtccgctttctttctccattcatagtaccactgctccaaagcttcgagcttttttaaccgcgccatgcagcagccgtggcctgtagctgccgccgccgcaggccacggcgcaggcgcagttaccgagatgatgcatggccggccggccggcctcgtttggcgtgaaaaaaaaaactgtgtcctccccgcaaacggattagcagcggaattaactccgttttttcaccgtacgcacgtacggaccccatgcatgcaggcgccgccatgttcgacatggagtacgcgcggtggctggacgacgacagcaagcggctggcggagctccgagctgggctgcaggcgcagctgctggacggcaacctggggctcatcgtggaggagtgcatgcagcactacgacgagctgttccagctcaaggcggcgctcgcgcgctccgatgtcttccacctcctcaccggcgcctgggccaccgccgccgagcgctgcttcttctggatgggcggcttccgcccgtctgagctgctcaaggtatgtacggaaccactgcgtgccattgcggccagccggccatggcgtccgcgcccgtgcacccccactctaatcgaggcggcgcgccgtactgagcctctcattctcattttctttggcatgcagatcctgataccgcagctggacccgctgacggagcagcagctgctggggatctgcaacctgcagcagtcgtcggagcaggcggaggaggcgctcgcccagggcctgcaccagctgcaccagtccctggccgacacagtcgccaccggcacgctcaacgacggcgccgccacccccaactacatgaacatcatggccgtcgcaattgataagctcgcctgcctagaaaacttctatcaacaggtcaccatctttttactctccatttcctgcatcattgaccgccatccttaagatcttactatggatcatactagtcagtaaactttttttaccaaaaaaagaattaactcggcgacgaaaaagctagcttaaactttcaagtacactagtccttccctgtcagaattgcacagcaacgtaacagtaacaatgcagctggtcctcgtcctacaagctacagggtcctgtcctgctttctccatggcaggggcaggccaaccttttgtcagaaagctagcttaaacctacagataaacggataagcatcattaccactttccagaacgcataattagcttgtaattaaacaccaaataacaggctagctaatgctgctggcgacaattattgtatgtttgtgtgttggtagggcaaggctttgatccctttttttaagtgaagatttggcgaggcattgttcctggccacacatgtgtactggcagtacatacacgtacacacctgtatctttctacagaaagtcaatggccggatacttacagttggcactgtgcataaataatgccttttgtgtgtcttctctgggccggctatctcctttttattccattttttagaaaaaaaaaagtcctttttattctctcccttctctgtttgctggtgcctctgcagaacagagggcccacaatccatgcatagtggtcaggaaaaggacacagacacctaaaattcagccccatggccaaacaagaagcctaaataaagatggtagatgggggcttgcagttcaatcagaagttgttaaagaaatgatcatgcctttctatggattatcttctctcggggtaaaagctgattgcgacctccattttgttagtttgttttcaactttcctgagctttgattccttttgtggacagaactttgctagaaggcagatgtaaaataagtatactttcagcagataattttttttctagaataagtgcacttcagatcgtagaccactagttttaataggttttactactctatttctaaagtgcaattattacatattgaaatattgtttgatatattacttcatactctcagcagtagttatataattttatagtagcaccattgatgtctccaaaacagtatagaaatgcacttaattttagggtgggggactatatttccaagattgatgattggagcaatcatttcacacaaagccttgcaataaatgtgcagacttgcaataaactcgaccacagatgatacaccaccctctggctgcttattgctaatacttgcattagatttcttttcatgcccccgaagtatataaagctacaaggaaatgataaggacaatacaccatcagtatgaaaaaaaaaattgctaccctatctaaagtccaaacttgctgaaaacaacatttcattagattaagcttaagcagcagctgggaactttcagcaattgtccaggctagaatatatctgggacaggacagaaagatacgagtagaatagatgcacctgcatgatccgagaatgccctgtcattcaagatattggaagcgccaatgtgcagcatagccaagacaagaaacaacactaatgtgacatctcatctttcttttcatgtgtttgtgctgttccaactgcaggccgacaatctaaggcagcagacgttgcatcagatgcgccggatcctgaccactcggcaggctgcacggtgcttcctctccattggggagtactacagccgcctcagagctctcagcaacctctgggcttcccgtccccgcgagtaagattcagacttgatcaactgcaaaaactgttataaaaaaaaactgcaaaaactggactcaattgttgtcatgttgatcaactgcactattgctgttcccaaccatctctgaatcacatgtattcgttggcttttgaaagacagaatcacttgttttctgatttcattattatacaaaaagtcagaaatggacatggctgacaatggcatgcatttctcgtgtaacagcaacttcatcgggacagagagcctcagccccacagcaacggaactgcaagccctgcaccaccagcagcagaaccagttcactggattttgaggcctcacctggtgctggagggtaactttggcggcgagggtgatgttacaaagattagaggttttgagagggagatgcattgtaatgttcttatcattaaagtactgagaaagcaacatcactaggcgaaaagggcggggagaaggaattgctgtggtgcgatgttgggtggctcacctgttcatatggctcttgaactgatcgaagggttagcaccgcagaatttttgtgcgtagcaggagaaaacaatgcagtggcagaagattctggctgctcacttgccagagaggactaattgcaattagagtgacagagtaaccattaaatacctttccaaatcaagtattttggcacacattttcggtagtagactatctccaaggataataccgcattcgtggacagataataatccatcatctgtagttcaacaaaaggcaatgcacagctaccggtggtagccggtttcctgtcctagattctgctgagcactgatggaaaagaaagaaactgtgacacggtaatctgtctgaaaccaataatacagtaaaaaaaatggcattaaagaaacgtgggtagtgaaacaagaagaaaacgttgtaccccctccgttctaaattgtaagttgttttggcttttcgagatacagagatcgcaagaaatatcaatattgcgcaacacatgtagaaacagcattaggaatcttacataaactgaccagcaaattgtaagatgcaagaccagaactatcgatggacagatgaaggaaaggagaagcagctttcacatgatgtgagatcacttatcagttgactcaattccaaaatcaccatgaacacttgaattaggcgg

SEQ ID NO: 4385 - DNA, 4190 bp, Sorghum bicolor
atctcctggtgggtgacagctagtcaactaatagatccccaaaggagtactagttactaaagtttacagctcaccgtgagaatcgattcaaacatgaagatgacctctgcatttttaacatgaagatgaccttagtggtgtgatttgtttgtttgactttttggtggcaattttcatgtttgcacattgttcctacaggaaatttgcatgatatactcatctttgagttatcagacgtatttcgttttcgttttgttaggataatatattgactaccaattattattattattattctataactagcaagattttattgtattcaaatagcgtgggtaatcctttcttatttgagaatatatttttatacataacgttttttcttttttatcataacttttctctcaccatttggctcatttgcgtccacctacatgaattctatataattataacattgagcaattctttaaaaactacatctatcttttctcttcttttttccccacttctactccgtggatacgcaactttctactaagactaagagagtgtttgaaactgctccataaactctgttctatagactctatcatgaaacatatataaaaaaatgaagtttatgaagcatcactttaggtgctctcacaatgctactcttttttctagaataaagtgcatgaaattgaaatcatttgactagaaaacgtggatagacgccctttaggttctcttggtgagttgtacctcgataaaactaccatccaagcctctcacaaattatccaattctcttacatatttaaattttggttcatcttttatatcatcttgtgaattcatagtcagctcttttatcgctaaaccatcatctaatttatcataatcatgcacagccactggccagccctattatcattcctatatccatgggcacacatcaagacttttcaaacgtgatatgcaaccacaaagctagtgaaatactatatatctcaaacatgctagcagtgtcgtcgctctactttgatattggtcatgctatacttttctacttgtgacaagcttctcacaaagaattgaagattgatttgtgctgcttgccaactccacatgcatgagccacctatttgagtttgagagccacatatagtcaaaatcttaagcacgactaagactttaatacatctaacatttaatatgggtcttatgattttgaattaattgaattaaaaataaacaaagaccaattaaaatccaacatattataagtaaatatgtttcattatgaatctataagatcaatttaattaaaaatcatatatattactataaaaatttcttggacaaagatttgtcttccggctctgtttattctacctcactaactactacaataaagtgtttaattctacctatatattactgaagtacgaggataaataggtaataaataaataaataaataaataaataaaggtgcaaacaaaggaaaaaagaaatatgcaatttgcataactagctgacccggtcgtccccactaaatcgcagtgccactgccacccctctccctctccccccgcgctctcctgttttttccaccgggcaggcagcagcccgtcccaccacgccatgagaaaattcgccccaagaagcgggcagctctgcgctgctcagcagctgcgtcatccatgtcaaccatgaaccacctcgtgcttctccatatatacgtcatgcgcaaacgcttccacaccaccttaattagcttgcttcacctcacctcatcacctgatcaccagcacagcagcaagtatacacacaccacaagggcacgcggttcttccggcgcatcatcatatgcattctttgctcccggcagcgtagccaagcatctcctcatcagctccggccggtctgagcggcggcgcaagcagtggctatatatatatctagctgctgctatcttggtgtggtccgcgatcgagcggatcgactggtggcatggcgggcggcctgcccccagggtaccgcttctacccgacggaagaggagctgatatccttctacctgcgcaacaagctggacaacctccgccgcgacgacatcgagcgcgtcatccccgtcgtcgacgtctactccgtcgacccctggcagctcccaggtgcaacgcggtagctaggctgctaataaccattcatttcacgcacaggcacacagcccaccaattgagatatgaccgaagcggtgcattgcgctaaccgcgcggccggggtacggtgcgccatgatgatgcatgcagggatccacgagatgctgcgcggcggcggcgctgccggggagggggagccgtggttctacttctgcccgcggcaggagcgggaggcgcggggcgggcggcccagccggacgacgccgtcggggtactggaaggccgcgggcacgcccggggtcgtctactcctcctcggcggcgccggccgaccgccgcgccatcgggatgaagaagaccatggtcttctaccgcggccgcgcgccgtcggggaccaagaccaactggaagatgaacgagtacagggcgctccagtacgacgaagcccccgccggccccgccgccgtcggaaccgacgggtcctcgtcgtcgtcgtctaccgcccaccaccaccacgccgtacccgtaccaccaccaccaccaaacgttgccccgcaggtgaggtgatgcacaaatgattaaatggaggttgctttctctgccgttgtggacattggcacgtagcttatatagcttccaaaataagatccacacaagaagctgcggcgcacgcatgtcgatcgatctccatatatcacccacatatatatatatatatatattgctttggcgccagggcaactcgatcgatggtgcgtgtcgttttttttttgcgccggttaagtgtccaaaatccacgtgatgttgtttgtgttgtagcgaactttagtttatgagactcgattgatgctcctgcaaaagttctttttttaaaaaaaataaaataaaatactcaatgcgtggttctcgccttgtgccaatctatcaatcacggcatcacgatcgatctcatcatcattcgattcttcggtttggcaacttggggctcatgttgcatgttatagctagctagaacgtacgtagtatagtgattctgtatattgaactgagagaaaacaaaaaccgtacgtatatcctcatgtagctttgtaataattaaggggaaaaatacttattgcactctgatctctgggttttgttttgctaacttgctgtacgactacgtacgtatatgcatggtacggtgttgcagctaaggagcgagtttagcctgtgtcgactctacaccaaatctgggagcctgagacagtttgaccggcggccgctcggagctgcgggaggcgtcgtcgtcgtccctggcgaggacccggcggggccatccacggcaggagtcgccgcgtcgccgccggacgatgacgatggctccggcagcagctccatgcaacaacagcagcggcagcaggtgacggaggagagagctgccaacgatccatacggtgacgacatggtggtgacgacggagagagaagatgcccacggccacgatcctttcggtgacgacgtggccatcttggatgcccttttatactggcccggagactagacgtagtggacttgcaagaccctgtagtagcgcgtgcgtcggtgtgacatgcatgccatccacacacgcgactactgatttcctcaaatcaaagcatactccaagtctggagagttagacgatgtacatgtactggtacacagtagctactggtttcaaattacgtactactacttaccattttaatttgttgcatgaaccaacaaggctaattaaggccgcctgtccgtttggacacatgtaatagtactagttcgttgtagtcgttcgttgtatcaacagtttattatacagttttgcgatgtttgcacttggttggatttttgggcagagtcatcttgtagatattccctgttttatttgctatatatacatatatacttccaaaagttgggaaggtatttgtccaacaatttctaaaatctcgatcctaaaatatacttcctccgtcctaaattataagtcattccaagaatattggagagtcaaagttttttaag

SEQ ID NO: 4386 - DNA, 3943 bp, Sorghum bicolor
gacaggtgatggccgctcagcttctatgcttctttctactccgcggtgctgggttctatatatacaaattcagtatttccttcaagcactgagttcagcaacattttctattttcttcatccgaatcagcttgatgtgatctgttcggtaatcggcgcggaagcatgggtggagaagctcaagtgagagagtttgttttctcccttccggatgtcatcattcattcagagtttcagactgtgtctttgaattcctcgcttatcatttgttttcaggtgggatgggctgacgagcttcttgagcctgccaaggctgccgctctactgtggcccaacaaaagccaccaaggcctttgtcagatcctacaggaacttgcacttctactagattcttggagctgggcatttagtaagtagtactagccatttttttgttacaaaagccactaaatttaggatatcaatatccgtagcaggtgccaaattatcttttcttgcgcccctgtgtcgtgcaggttcccgttgattaaccatgcattactcagtatgattggtaccataactcaatctccagcttcataaacgaccaggaggcggaattatatacttcaaaattgtaaaaagcaaacctttgaaatatgcaatacagccaatactatcttagggcctgtttagttggtgaaaatttttacaaagtactactgtagcacttttgtttgtatttgacaattattgtccaatcatagactaattaggttcaaaagattcgcctcgcaaattccaggcgaactatacaattagttatatttttatctatatttaatgcttcatgcatgtgccacaagattcgatgtgacgaaaaatcttgaaaattttacaaaatatttcaggaattaaacaaggccttagtaactcgccagtgtttttagtttgaatgatgccttatttggctggacggattgggagagaaaaaaaatcccaaaatatgaaatggggtggatacaagtgcaaccaagtaagatctagaaagaattatttcaaacatcatatatccccccgtcctgtaatactccatctattccaaattacaagacatttcatgaattttgaaaaaaacaaaacatattaagtttgaccaaaattatagaaaaaatttaaaaaaattataacaacaaataagtatattacgaaaatataattaataaagaatctaatgatagttagttggtatataaatactattatcttatcatataaacttggtcaaacttgaggtcttttgacccttcaagattcttagaatgtcttataatttgggatggaggaagtacaatacatttcaaaaagttacaatttaagtgccgaatggcctaatagaaagatgaattggattcaaattttaaaacaacatccttggcctattcaagattctaaccctctttccaccttggcacctaaagtttcctacaaaagcacactagatagtctacaaaagcacctaagtggctaagttttctaaaaaaaaaacacactcacacttatgtaccatcttcggatggtggacgttgatgaacctatcgattatttatctttaaaaaagagaggttattagctgttgaaaaaaaagatgcatatgcaggcatactttatgatccgctggcctccaccgccgacgatcatgtcgcccggggttgttgaattgaaagggctgcttctgtccccactccaagtcatgcgcgacatcgctgttggatcatattggcctccctgattagccaggatcgtcagtggcaaaaatggatccgtgtaatccatgactcagcctgactgactgactggttctatttttatatgcccactgctcgagtgctttgcttgacttggctttagcagcctgccagcctagcaggataggagaattttacgttctcaaactgaaaagtcttcatatctgcacgcctgcataccaaaaaaactgcacctactccctcagtctcctacaaacaactcaaagcctgaataatgggggacgccaacggcggcagtatgcacgtcgtgctgctgccatggctggcgttcggccacatcctccccttcacggagctcgccaagcgcatagctcggcagggccaccgggtcacgctcttctccacgccaagaaacacccggcggttaatccgcatccctccagaactcgcggggcaaatccgcgtcgtggacatcgcactgccgcgcgtggagcgcctgccggaggacgccgaggcgagcatcgacctcccgtccgacgacctccgcccgtacctccgcgtagcctacgacgccgcctttgccgacaacctctcggccatcctgcaggagccggggccggagcggcccgactgggtggtcatcgactacgccgcgtactgggcgcccgcggccgcggcgaggcacggcgtgccgtgcgcgttcctgagcctgttcggcgccgcgacgctcagtttctatggcccccccgaggggctcatgggacgcggcaagtacgccaggacgaagccggaggacctcaccgtggtgcctgactacgtgccgttcccgaccaccgtcgcgcaccgcgtcttcgaggcgcgcgagttgttcaacggcttggttccggacgactccggcgtgtcggaaggccaccggttcgccgtgtccatcggagagagccaggtcgtaggcatccggagcagaccggagtttgagtcggagtggttgcaggtgcttgacaagctctaccagaagccggtgatcccggtcggcctgttccctccgccgccgacacaagacatcgccggccacgaggcgactttgcggtggctggacagacaggctcggggatccgtcgtgtacgcggccttcggcagcgaggcgaagctgacaagcgcgcagctccaaacaatcgcgctgggtttggaggcgtccggcctgccattcatctgggcgttcaggccgccagccgacggcgacgccgaacccggacaaggcacaggcgggttgccggaaggcttcgaggagcgtgtcaatggccggggattggtctgccgcggctgggtgcctcaacccaggctgctggcccatgaatcggttggtgggtttctgacccacgccggctggaactccatctccgagggcctctcgcggggcgtcaggatggtgctgctgccgctgatgttcgatcagggcctcaacgccaggcttcttgtggagaagaagatcggcatcgaggtggagagggacgaagacgacggcacgttcgctcccaaagacatcgcggatgctctgaggacggccatggcggagaaccaaggcgggactagggtcaaggaactggccgaggtgtttggaaatgatgaggcgaatgatcagtgcctgcgagatttcctccggtatctgtcggaatacagcaggcaacatcaagggtagctcactaagttccattccatttcgaggctagtaatgttggtgcagaaaagggcaaagaaatggaagcgagccatgctatcgaaaaaaaatgctaataaacaatattcaacgttaataaaatataaaaatttccatttgcttatttacaatttactatatactcataaatatcaatattatttctgttacttaaaacaaatgttgtactagccagtgtcccacgacgggaaggcatatgaagtcaacaaaaataaaaaatttaaaagggagagaaattgtgaaccaaaacaaaaaattcgaaagaaaagtgtgaaacaagacggcccagaagaaggcccatgtgggtgctttttttttttaactccgttgctgcataacgtgcattcccattccgtccgctgcatccctactcgtgcgttctgttctgtctgctctcgccccctctcgctctccgacgactggcgggccgctgcctccgccctaggccaggtgctgaggct

SEQ ID NO: 4387 - DNA, 3910 bp, Sorghum bicolor
ctatctatagaaatacatagcccaacacataacaatatatgtaccaaaaaaatcaaaatgtcttatagtttatgacgaagggaatatttgtttgtgcacttatttcctcagtctgtctaacttacaccttaaacttcaatggcaaattacttcaaccaatgatacatacaaattatgttcctaggttatatttctttttttgagacggttgataacaagcttagtatggggataagcatgataaaataaaaaggttgaatcaaatagtttaagggaattgtgttttgtagtgctgtgtaagattggaaacgaccaatggtaaagacggatattgacatcgattagagccacacactagcaagggatagcacatccgattcaggccttacatgttctagaacacagctgagataggttaaacaatgaggtctaccatcaaatcgatgatgcgatgtaggtgcagtgagaagtaaaaaccacggatcaaccagtccactccaaactcgaactataatcaacaataaatacaatgggtcttctctaaagcatctagaggtttacaacaacagtaataaatttatcaaattgcaaactttacatcagctacaaccacaactgtctaataagatgcatgacaatgccaaatggagagagtcacaggtttttcctccttaataatcaattcatatcttacaaactatagctctattatgcaaaaattttggtaggcatgtagatccttgagtcctccaatcactgaccaagttttagctcaatcggacaccgttttacaacccaaatgatttatctaccaaaactactatgttctaaaactatagtaacttgaactgacaaagcccctctcgaatatgatgctctactcaaccaatcctcaaaccaattgaatatatcgaagcaagtgtagaatgagctcaccaagtttaattcctatccaaacatgtttgattgagccttacatgactggttcagaggcaccaaatttggatagatttgtttctcctttttcttctctcttctctcacgttgtgttctatatgtgttctgctctctcactctccaagtgcagcagtaggtgaaaaggaggctaggtttttgtgttcctcaccccatctcaagagatgatctcaatcactgattccaaccgaaatcaatggtgcatgcatgccgagtttcaacactgggtttgtggactgtcaactgtttttggctccgaatcatccttcctgtggagggatagtccgacactctaccccgcagacaagcctcaggagttcaatacaaggctaacctctctaaagaaattggccgcaagcccataaaggttgactggataaatcaagttgatgatggataaaaaaggtttctgttccaaagtccttgcaactggaaggaggaagttaccacttgctgatcacctaactcatttgaggaagctgctgctaaatatggcggctttgggcttcacttattcacaatgatgtaagggttggttatagagggactaagtctgttttgctgtttctcttcgaatgtgttttatacaggatgtaacccaactgaatgttgtatgaatgttttggtctttgcgatgctaagacaagggctttgccctttaactctaaagaaagataatggaaacaatcggttatcgtttatgagcaatgttgcatactctacttccgctgtggtgattgagtcagctgtggcgtagtacgcgcgtagtgcatcatccatgacataagctgactgtgagtctgtgactgattgtttggctctatctttctatgctccctgcttacatatttgaacagaaatcctgggcagtcaaagtgaggacgtcctcaaactgaacttttcatcatatctgaatgtgcgactgtacacacctactataagaacagggagagtagcacagtggcagaccatctccctcaattctcataaaaaaacctctgccttgcgttgacaaagcctcgcgaatggacgccagcagcgggagcatgcacgttgtgatgctgccatggctggctttcggccacatcctcccgttcaccgagctcgccaaacgcatagctcggcagggccaccaggtcaccatcctttccacgccaagaaacactcgacggcttatccacatcccaccggacctggctggccttgtccgcgtcgtggacgtacagctgccgcgcgtggagcgcctgccggaggacgccgaggctagcatcgacctaccctccgacgacctccgaccgtacctgcgccgggcctacgacgcggccttcgccgacaagctttcggacatcctgcaggagccggggccgcggaagccggactgggtgatcatcgactacgccgcgcactgggcgcccgcggccgcggcgaggcatggcgtgccatgcgcgttcctgagcctgttcggcgccgcggcggtcactttctacggccccgcggaggcgctcatgggacgcgggaagcacgcaaggacgaagccagagcagctaaccatggtccccgactacgtgccgttcccgaccaccgtcgcgtaccgcggcttcgaggcgcgcgagtttttcacgccggtgttggtccctgacgaatctggcgtgtcggaaggctaccggttcgccaagtgcatcgaaggcagccagctcgtgggcatcaggagcagcgcggagttcgagccggagtggctgcaggtgctcggcgggctataccggaagccggtcatcccagtcggcctattccctccaccacccacacaagacatcggcggccacaaggcagcgctgcaatggctggacaggcaggcgcggggctccgttgtgtactcggcgttcggcagcgaggcgaagctgacgagtgcacagctgcagaccatagcgctcggtctcgaggcttctggcctgccgttcctgtgggcattcaggcaaccggtcgatgccaacgaaggcgaaagcggattgccggaaggtttcgaggagcgcgtcgacggccgcggactcgtctgccgcggctgggtgccacaggccaggttcttggcccacgaatctgtcggagggttcttgacccacgccggctggaactccatcattgaaggcctcgcccgcggcgtcaggctggtgctgctaccgctgatgttcgatcaaggcctcaacgcgaggcatctgacggagaagaagataagcgtcgaggtgccgcgagacgaggaagatggctcgttcgcgcccaaagacattgcagctgctttgaggagggtcgtggtggaggaagaatgcgaggtgttcggggataaggccaaagagctcgccaagttgtttggaaatgacgagatgaatgatcagtgcgtgcgagattttctcaagtgcctatcggaatacaacaggcagtgacagtcagtagttggattatagggggctggtaatgtcaaattttggataagggtccttttctcaaaggttcactacgactgagtgagaactagaacacaccctcggataataaacaaaaaaaaagtaatacaaatgcttgctttatttttttcctaaagaatagaacaagtatatatacatccttatttttatgtatatcttgttaccgataacaataatgtctccaacagacgtacacgtagatttgagattgatgaagttttttttttttttttggtgaatgcctgtctccattcattcaattggagcaggattacaatctcggatcatcaggttcgtgacacaagctggggcacatgaccaccacccagaccgtgtatcgcctgtgacttgcttggctatagtatgtgctacctcattacaagagtgagctatataggtaaatttgaagtctacaaaaacactactcaattctctaatctccgccataattacctcaa

SEQ ID NO: 4388 - DNA, 14290 bp, Sorghum bicolor
cgtggacgggaccgggggtatgccggcgtcgtggaagctcgcgctctcgggccacacctcggtgttgatcatgccgatgtttacgccctcgccgaatttgaatgcctgccacaacccactagcagagttgagattagggcttgcttggttgacacccaaaagttttaccatgctaaaaaattggcaagctaaaagttgagcaaaaacatcgatatagatttggtaagccaaatgtgaaatgttaacaagtctgaatagcaaaccaaatactagtcaatattatggcttgccaaaagccaaatcacaattaggagaaactccatggaatgcgtggtgtcgtgaagcgtcgtcgctcggtggtccgggcaggctctaggctgagacgaagcccggcgtgctttgcggagggtgcgtagcttggaggccgagagtgtcgccgcgaagccgtgaagcgcctcgtggtaataagtgtataggagctgcggcttggtgtggacgacgtccgctgacgcgtccgccgcagacgcgacggtggcggcgtaccagtcgcggcggtcggaatgccggaatggtaccgcggcatggcggacttgtccatgtggataatgtaccccgtccccgtggctcgcgcggccaccggaccgtagaggaggacgcacgcattgatgagaagtagcaataagggtagtgacgagcgaggagccgacgctggacgcgatgcatcctgcgccatacggacagcttctctgcaacctcaattggtgattgttctttatacctgcaatgccaacttttatactaaatccgtgtctgtgcacatttgtttgactgtcatggctgcaaccgaaatgcaggtctggcacatcgtggtaaccatatactacataacattattcatcgtgttgtgtccaagatgtagtgctacccgtactcgaggccttgttcacttctctcctctaaaatttactctctatctcatctaatatttgagcatatgtataaagtattaaatatagactaaaaaaacttaattgtacagattataactattttgtgagacaaatctagtccatgatccgataatgtggtactatattaaaactacagtaacatgtgctaatgccgaataataccaataactttatctctacctcaatttattagacttaataaatttatcttgcagagtacaaataacttctgtaatttatttttttattatttgaccactccgcgtccatgtgacattgtgacttaaacaagggctcagacaaaaagaagattctaacatgaaacacagtcgccagatggtctgtgacacctaggctttgtttagatcttttttttcgaaacgatagcattttcatttttatttgacaaacattgtctaatcatagaggcttaaaagatttgtctcgcgatttacaaacaaactatccaattagtttttatttttatctatatttaatgttccatgtatgtgccgcaagattcgatgtgacgaggaatgttgaaaaggttttagtttatgggggtgaactaggccttgtttagttccaaaaaaatttgtaattttttcagatttcctgtcacatcgaatcttacggcacatgcatgattagataatattaattaattttataattgttttaactaaacaaggcctaaacaaggccggccctagaaagatggcggaaggcggcgggggaaaggctagggcctcctgatatgtgggccattgggaagggagacaacagcctattccggcgcatccatttgaaagcccacggaagtggttgtactcgtcttccactcggatccatggaaaaaccctagagcttgacgcgcaccaaattctgcgcgccaaatgctcgaacaccttcccgccaaagctacccgctggcatttgcaatatagatctccacacaccaacacctaatttgtgcgcgcgcctgccgtcacaaaagagagagaagagagagaaacagagagggagtcgcatggaagactcacccgccgatgccgccggctccggccgccgcacgcgcacgcgcacgcggggcgcggaggcgtcggggcgggccgccaggctccagcagctccgcgccgtccgcaacggtgagatccgcgcttccgacgtcatccaggtgaaggttgacgccccgatctacgacaccgtcccggaggaggagtacaacgtgctcgtcgctcgccgcaagaaggaagccggcgagttcatcatcgacgacgacgggctcggttacgtcgatgacggccgcgaggaggactggagccaccgcgctctcccttcctcctccgatgaaggatcagatgacgaggacggcgccccccgcaagcggaagcagccgcgccctccccaggcgaagcgccagccgcagcagtccgccaaggcggcggcgtctttctccgccgctgccgcaaagacgggccagcagatctcctctttgttcacatcctcggtatttaagaggaccggcagcgaccgcaccaagagcttggcgctggccgccgacagcatcgtggacgacatcatcgccgagttcgcgcccgacgagaacgaccgtgaggagaggcgtcggcgggttggtagggtttctgcgccgcagccgcctcctccaacagtttcctacgtcaagcctcaaaaggtaattgtcgatgctgaaatggttagatcggacaatggaaatgatatggcggtggaattgaagaacgatactgagatggaaaccaatttggaggaaattcctggttctagtgctgaattggtggttgataatctggaagaaattcctggttctagtgctgaattggtgtttgataataagagtttggaggaaccaaagcaggaggctaatggggaagtaaaggtagaaaagacacaccgcctcaatgcaaagattaaggcggaggagagcagaaataatgatgtgacgagtgcaacagcaggatggatgaagatatgtgggaatgggcagaatgcagtaggtgaagaaggagtgacagttgatggtaacaccaatgtggatgaaagttcagagtttgagctgaaagatggagcactgccattctacatacttgatgcatacgaggaaccatttggtgctaattcaggcacagtgtatttatttgggaaggtaaatagcactacactgaagtttcaagtacaattctggtaaattatcctaagaatacagttttactttctgatgtctgacaagcaacttttctttaattgattattggacactgtaaagcccggggccaattcatagcactgcttttgtaggataattcgtacactatacatgtcttagaaattttgtgtcctttttcccaaggattcaaaaatggaaataaaaactttctatgctgtagtctttgaaagatgtttcattaagtactaggcagtcagtggattggtctgtaaatcctagtcaggagggtgatgcctaattcattggcgatggatcttcgtaaattgtgtctgaggcatatgctttcatcactaaatactagtatattctttttctgacaacctgctttcctgttctaggttgaagttggcaagcggttccatagttgctgcgtcattgtgaaaaatattcaaagatgcatatatgctattccaaaccattcagtgtttccaagggactccatatcagggatagaaagaaaccccacaagtgctgatcttttgccatcacttcgagcaactctacatgtgagaatgattttttattcttagaacatagcactactgtgaaatatgcataacacatcctatattaccaggagttggcgtcaggattaaagagtgaaatagctgacaaattgtcagacctcaatgtgtcaaatttcgtaatgactccagtcaaggttagtagctgcacatgcacacatacaagcatgctcccccattcccctctactgtgctaaatggttatatttgtcatgccttagaggaactatgcatttgagaggactgatctaccaaatggagagcagtatgtcctgaaaattaattatccttacaaggtatgtgtcttgtcaatacatcttttactgctattttactttcctagtttataatggccttcaaggggtcttaggtacttttgtttgtctaaatgttattgtggtagcatatttcgctgccatggagtgaaatgcaatgataacatttgagaaacaaaagtgtagtatctagcaagctggttaatcagtcctttatttgggaaatgatggtatgttgaattgtgaactaatagcacaaatgatttattatgttatatagcataaaaaacactgggtatttctatcctagaagtttctgtcatttttatatttaatcttgtattcttacagaaggaacctaggaaattaaaaataaaaaacctacagtcttacaagatattatgagtcatttcttaagtgtggctgctagtctgggaattgtagagttgtatgctgattcgatatttgtcggctatactcatcaactaacttgaacagtgaatacattctggatgtttgtaggcttgtagcagagaaaaaacaacctactaatcaggcttattttcaaccattggcttttgaatattcatttttcatgtcatgatctcttggtttgaataccataatcattttaaatgaaaatggtttctgtgctaattttggttaaatggtatactcaagccttacaagttgggttgggagctgctgaagggtaggattgatctaggaatattcatgatttaatgcctaaggagatgccccatgtagtaccgaagctcatgggttcaggactaaactatgttctttctgattggtttctttcagtgtaaaccgaaaactgcatctatctctcactcaatctttccaatttgtattacttatgtgatacatattttcttaggatcctgctctaccagcagacctcaggggtgaacattttcatgcactgcttgggacaaacaataggtacaatgcatacaccttgcattatatggcatatggtatacaatatagtcttgatgtttttatgcccattttcttcctgatggatgctgatctttttacctttccagtgctcttgaattatttcttatcaagaggaaggtcaaggggccttcatggctgtcggtttccaaatttgtgacacggccatccactcagcgggtatatccttgactttagtctgtcctgttactattggtggtgtttcatatcaagctagttagtatttgaatagctccttcctgattcttttgccatgctatattgatggtggtgccttttgactctacgacaggtcagctggtgtaaatttgaagttacagttgattgcccaaaggatatatctgttttgacgacaagtacaaatctagaagttcctactgttgtagttgcagcagttaatctcaaaactatcataaatgagaaacacaatgtgcatgagattgtgtcagcatctctcatatgctgtcatggggtgaaggtatgctgtttatttgttgttgaaatatattttctagcatttggtttactagtttatgtactttggcaatgaggtggcagaaatggttcatatatatttgaaacaattgttttgagacaagctggcacacttccgtgttccatttcaacacttcacatttctcaaaggttcacacaagaaggaaacactcatgttcttcaaactaaacctttcctttttgggccaattttcagattgatagtccaatgcgtccagaagattggcagaaacggggaatgctcagccattttactgttatgcgcaaacttgaaggtagcatatttcctataggccttgctaagggtgcttctgataggaacgagcaggctggtagcaatgtgctggcactagaaagcaggtgggttctgccttttcttgtgtatatattattactctggccacaaaaaagaagttgtttaggtctttaggaccagatttggtcaaatcttagaaactaaaacaacaataactattatattatttagtttgaaaacaagttgcatgtgaagatttgtattcaaagtttttacaaaatcccttaaatttgaaggattttaagaatatattctagataaaattaatggtcaaagatacacattgaagactgcgcaaaatcaaatgtcaactatttttttatcagagtagtgcccacttatttgatgagttccattgttgaatgcattgattaattggtttactcccttttccagtgaacgtgcattattaaatcgcttgatgattgagcttagcaaacttgactgcgacgtacttgtgggacacaatatttcaggattcgatttggatgtgcttctacaccgtgctcaggtctttttaatcattatgtgctctgttgcttcctatattcaacctgtttactcttcttgagtttataaatttgtatgggttctgtttataaattatttagggtttattctaggtagtttcaagggaacttgcattatatatttctgactaccatttcttatttaatgattctgctagacatgcaaagtgctaagcagcatgtggtccaagattggtcgtctcaggcgatcgtcaatgcccaggcttaccaaaggaagtacactctatggttctggagcaagtccaggaattatgtcctgtattgctggccgtcttctctgtgacacctatttatgctctcgtgaccttctgaaggaggtaacctgcagtgtgtttgtttttttataagggcaactaaacatacaatttttaaatataatttcggttaccaaattcagcagttaattctgttccatgcaggtgagttattccttgacacaacttgcagaaacacaattaaaaaaggtcaggagagaggtttctccacatgatatacctctgatgttccagtcttcgactgaactgctcaaactggtaatttcttcaaacaaaacatggtgctgcttttctcttaacagaagatcttctatttttctcagaagttatgaatctaattgcaaaattgtgacactcaactaggttgaatatggtgagacagatgcatggctttctttggagctcatgtttcacttgagtgttctcccactgacacggcaactgaccaacattagtggtaacctgtgggggaaaactcttcaggtaatattcattattatcgtgcattttgtgtagctaactatgaagccgtgcattcttgatgtcatatctcaaatgaaattcctgtagggtgctagggctcagagagtagaatatctactactgcattcatttcatgcaagaaaatttattgtaccggataaatttgcacgcaacaaagagctgaactccacaaaaagaaaaatgaatgctgatactgagggtgcaaatgctgatgatggtgctgctgatccttccgttgatgatgaagtgcataatggtgatcaaggtaaagccagaaaaggaccttcatatgctggtggattagttttggagcctaagaagggtctatatgacaagtatgttctacttcttgacttcaacagcctttatccttcaataattcaggtaaatgatcagtactcacagcttctattggctcgctttaaagtttaagataaacaaataatagacgtatcgatagtgcctttattattatttatccacaggaatacaacatctgctttaccaccgttgagcgttcttctgatggcagtgtacctaatttgccagcatcaaaagctactggtgttttacctgaggtaattgcctatggatgtgccattgagatttagagctgtcaatagttttcggtgatcaagattttgtatggacatgtatttttctcatgtgtttgcaatcatggcttacaaatcagttgctgaggagtttggtggagaggagaaggatggttaaatcatggttgaagactgcttctggtcttaaaaggcagcagtttgatattcaacaacaagcattgaaactcactgcaaataggtaagaatttctataataaacatcagtacgtccgcttgcactccactagtatgattaatgagtttctgactcaatttttaatgcttgtgctccagcatgtatggttgcttgggcttttccaattccaggttttatgcaaagccacttgctgagcttattacactccaagtgagaacaagttttactcacagaatttattagcaaacctgtaatatgttgttgtggttaatatgatgcctctttcagggtagagagatattgcaaaacactgtagatctggttcagaataatttgaatttggaggtatgtagaattcctgtgtctatggatttctctgtagtgataaatcattcagaattgaaattgcttcaaagggacacaacaacttggtagatgctagagattagaatttaatacatctcaacttcattgtattggggattaaactggaggtgaagatgcctcctaaaaatccaatccgttgaagattcaacagctttttttattaattaactgcttgtattgatatttactttccttgtactggacaggttatctatggtgatacggattccatcatgatacatactggacttgatgacatctccagggcaaaagcaattgcaggaaaagttattcaggaggtaagactcaggatgtgacatcttaatgtgtaaggtgcagatgttcattttaatgcttcacaaagagtagcgtttaataataggaagagttttctttttcccacaacggtaaaattgaatttcattaccagggcaacaaaattacagtcatagttcaagttcatatgtaaaggaaacagccacctgccaaacactcatatttctgatcacctagggatcagacaatatgagctatccttaccccacaaaaaagctagaagtttccccagaagaggcaaaccacaaaaccttaatgctctatacatggcccttggcctataccacagcacacaggctggatcttgcttaaattacatcttactgccatctcccagaaccatccgctgctgcccacccctttcaggctccttcacctgcccatggaaatacaaagccatcctcttaagactgtctgctccactttccatctgaagaagtttatttttggctgttaaactatctcttgattttggcaactatcaaaactggatgaccttggcccttgactggtttcaaaggtggttttgactatatatttattcttatgaaatatggttagatctaacaatcataactaattcactttaaacaaaatatatgaaactggtacccaaattttcctaaaaatacaatggaaaaagtctatatcaccccataaactataaggtggtgtctactttaccccccgaactataaaacagtctaatttatcccctgaactatccaaaaccgtttaaatcacctcttgagcggtttttatggcggttttgctacagtaactatggttttactacagtaacagtggttttgactttttctttttattatttattttcgctgaatctttgaaaaatcatagtaaatcaaaaaaaaatcgtaaaatagaaaatataattttgttggactctacatgagtagatctacacacaatgaatatataatatggtatagtttagtacaaatttcgtactcatttgatcatatataacttagttatagatttattcaggtttatgcttgttaaatataaataaatctataactaagttatacatgatccgatgagtattaaatatttactatagttcaagcatagaataattagtccaccataaaaatttcaccacaattggaccatagaagctgcagctatgaattattccaattaattatagataaaatttgatttttctaactaatttgaagctacagaaaaaatttgtactaaagtataccatattatatattcatcgcgtggatcaactcatgaggagtccaacaaaattagattttctattttatgatttttctgtgatttactatgatttttcaaagattatatgaaaacaaataggaaaaaagaaaaggcaaaaccatggctactgtagcaaactgccgtaaaaaaccgcccggggggtattttgaacgggtttggatagttcagggggtaaattagaccgttttatagttcgggggtaaagtggacaccaccccatagtttagggggtgatatagacttttttcaaatacaatctatctattggtgctctatttagcgttatttggatcttgttcctattgctagtgtttttattgctcttagtcatgactattatttatttaaataatttattttatgttgattgcatggtgtttgagggtccgtcttacttgaaacctattacctagtcaaccgattgaaaattaaagctgtagtcatgcaatgcctaaataccatctatatgtggtggtgcttggcatctgggaggttggcgtcacctttgagatctttcatgtacttggagtccataggatccttttggttgatctctttgtctaatatagagcaaagcgttcaatgaccaaaaatacacttcttcatttataagatgtgcaaactgaagaaagatgatcttaccaagaatgcttcaatgcaggtgaacaaaaagtaccgttgtctggagattgatcttgatggcatatacaagagaatgttacttcttaaaaagaagaaatatgctgctattaaagtggcactggatggcagcttacgagaggtttgtgcttattatgaatctatgtgtcatcttgtgaaagtagtagagttgctttaacatgtttgatgtttgatgcagaacattgaacgcaaggggctcgatatggtcagacgtgattggagtttgctgtcaaaagacattggagatttttgtctcaatcaaattttgtctggagggtaagcatttaagtttctattgtaattttggttttcacatttttctagtctgacctttgtgaaaactgcctctacaggacatgtgatgatgttgttgagtcaatacacagttctcttgtccaggttaggagcctgccatctttttcttaacattaatctcaatactcaagaaacatttgttagcaagatactgttgtctgcaatgaatctttggcctaaaacatattatttgttatatatttctattactatatattttaatatatactttcaggtgcaagagcaaatgagaagtggtcaaatagaacttgaaaaatatgttatcacaaagagcttaacgaaagcgccagaagattatccagatgctaaaaatcagcctcatgttcaggtaagagttgcatatccttgttttgttttgtcctgatttcaagccataaaagtgatgagctaataaatgtgtaaacttggttcctcaggttgctttgagactcaagcaaaatggttactctggctgctcagctggtgacacagtcccttatataatttgctctcagcaggtattactaaatgatgtcttttatgttttgcatgctcactaaatcctcaaatgcttatccacattgcaaatttttggattgtcaacctgtcatatgacactgattggtactcctgtttcacaatctgtccaagcctccaaggctccaagctcatcatgtatacagacccagaagcactaaatctcatcaaagttataaaaagagaccaacacatccctaatgatattcacattttaccaccactcacaatcttgattttattgctgaactaacattttgaaacatttcttcataagataagaatatggataaacggagggagtagtcagaacttttgtttacctgcagtgtaatttcaggaaaaaggaatatatattttttgcctgaaaaacatcccagtttagctttgtttgaagcgatttatctgatcttaaactgtatttgcccattctgtataggactcagataatacacattctgtgggaatagctcagagagctagacatcccgaggagttaaaaagagaccctgacaagtggatgattgacattgactattatttgtcacaacaggttcttcaccattgcaatacattttcccatcttggaaaaatacagttgtctttccatatgctatagtatacacagtgttgctgattctaaattgcctttgcagattcatcctgttgtttctcgtctgtgtgcttccatccagggtactagtccagctcgtctggctgaatgtttgggacttgattcggctaaggtgcgcattttctgttgagtcttcgatatcttaaatgattggcatcatttatttcagtatagagtttgctgattcttattacctggatcagttccaatcaagagtgactgagtctagcaatcaagatacatctacgatgctgttatctgtgatcgatgatgaagatgagaggtgaacctcttaacatatcaatttcgttaatgttgcagtatttcagttatattaaaatattcttgtgttttaatgacagatatcgtggttgtgagccactgcgtttatcatgcccaagctgttctggtaccttcgactgccctcctgtatctagtctgattactagtgctacaagtgtatcagatccaaatgaaggaaaggatgctactgctaatttctggcgccatatgcggtgcccaagatgcccagataacgctgacgagtccaaaatttctcctccaatgcttgccaatcaggtgaatattaatatagcatggcctggaatttaagttgattaaaacttaacttttatgttttccatgtgtagatgaaaagacaagctgataatttcattagtctatattataaaggtctgcagatggtaagtgtttcagtttgagccttaatatattatgcaatgcatgtttatgattacccttgaccttttagctgttcttttctgccagtgtgacgatgagggttgcaaatactcgactcacagcgtaaaccttagagttatgggggattctgagagaggaaccatctgccctaactacccactctgcaatggtcgcctagtaagacaggtttgttgacactctgcctgagcttacaatgtgcccatttgggcaactggcaactggtgtctaatactaaacctttgcgtttaacagtacacggaggcagatctatacaggcaactgtcatacttttgctatgtacttgatgcaacccggtgtcttgaaaaggttctcatcaacctaaccatgtactttccgtttttttttttactttctaatccaacgtatgccatagctgacttgatcttaactgctttggatgtagctggaccagaaggcaaggctccccttcgagagagagtttgtagcagtaggccaaacaattaacttggcactgcaagagatccagaaaatccgagatagatgtgcatttggatgggttcagctaaaggaccttgccgtgtcaatatgatgcttttttggggggaaagagctcatttagatgaatctgattctagccgcacaagaaattcatcgctgtctgtaggtcgtgttgattctagatcgcgtcctgtaaatggaacaggacacgctaaatggtgagttgaaacaccagcgtcctggtagtatttccttgcctgtagagttccatttggatacacctcatagcagaccttgtctcatgtgttttagtgagtggctgtgttgtactaaacttgtaaatatgttgtgtccgtctccttaggcgtcggtgcctgcgcccaatgtacactagtatcatatatagtcatctgacagttgtttcttatgctatttggatacacctcatagcagattacttgtgttgtgaattccgttaggtggaaaagtatgtgagaggaaaacgagcgctttgtgacaacttgcattctggaattggtggtctctccgtgtcattttcttatcgcctaactgcgcagtttatgccttggataatgggcctgaatccgaatgatggtagaatgggcctgaatctcttaaacttttatttacaagctatgataaaaaaaaagtagagactcaaattaagacccaactccaatggaaaaaaaaataaactaagtccttatctcacatatttttgtcttgatttatgggtggggggtgggatccactggataggggattctagatgtgaggagcttaaactataatttgggagggcatggaaaatgagagaccaagtagaaggtgggttggagttgattttttttggatcgtccctagatttagaatagggacttgtttaggaggtgaactggagttgg

SEQ ID NO: 4389 - DNA, 8857 bp, Sorghum bicolor
aatataaggcgttttgaattacataaatatgcagaaaatgatttttatctaaaatatatctccacatcttaaaaccaaacctatatgacgctttgcagtatagataattgcacaggcaaatactcggcaaaatgcctgagaatatatgtccagtgaacaacgaccaacatttatgtagacagagttaataaacttcttctttatagtatcttccttcttctttctaccaccgaagaataagaaatactcatcttaaacttatcctctctagtcctttaaatctaaccacagtaaaatagataagagatcgaagaaaattattccatgacagcgacaacatctccaccttaatgttaaacttattaaaaacgataaatccccactccatccggcctctggcgatatgctagaggaggaagggagggagaccactagtggtggagacgagagcggcggcggcgccaccgtcatgtcggagaccctagcggtggctgcagtaggtgtgcgtaattacgctgagatctcgtctagagagaccgtttttggaagaaaacagtttagggtggatgtatatttagaattgaccatgtatatataagaaaatatgagacctaattttaggtgagctcttagggatagttaggccctatttggatttcatagtttaaaatttagccactaaagttttgaccactttaggccttgtttagttccaaaaaaatttgccaaaaattttagattctccgtcacattgaatcttgaggcacatgtacgaagtattagatatagacgaaagtaaaaactaattacacagtttatttgtaatttatgaaataaatcttttgagcctaattagtccatgattggacaatatttgtcaaatagaaacgaaagtgctacagtacccaaaatcctaaaataatagggccttagctcttaaggctcaaaataaaatgtttaaagtatttagacgccttgcaaaaattttagaccacataaagcgagctaaaattttaatcatcaactttagccactaaactttatacaagagaatccaaacaccccttaaatatgttaacaaaggtgaacttcgtactccctcggtaccagatttaaaagttatttttataaggtttaggttaaatattgaaaatataaattatcaataaattttaaattattgaatttgtaaatataaaaactatatgaatatatttgtcttaaaaaatactttcataaaagtatacatatattatttctttctaaatatttttataaaaaaataagaggttaaagttttgttttagagactgtgtcgctgtcctacacaacttctaaatcctatatgcagagagtatattttaattagctgtaaaaggcaaatacaaatgtctaagtaaatagtgtaacactcttttcatcccaaatcataagtcactctaagaattttggagaatcaaagtattttaagtttgaccaaatttatataaaaagataataacatatatgatgccaactaagtattattaaattcttcatcaatcatattttcatagtatacatatttaatgtcaaaagtctttatggttttctataattttggtcaaatttaagatgttttgactctccaagatttatggaatgacttataatttaaaatgggaggagcagtagttaaaagtgattattttatatatttcaacgattttagtttggtatatgtgaaaaaaaaacttgagaggactccctaaatacacacatatatatattttaaaaacggatatcttctataggaattactatttactactggaattgaaaatgaagctatagcatatgtctagctgctgcctgctaggtggtggcccgcagcctccgacaccgcgagccttctcgaacccatcaaaccgccaagcaaaacagcgagaagaaagctccggcgatcgaagtgctagagcgccagaagccgccgccggcgaaccgcaagacggcggccagctatggacgcgccgagagagctgcagtgcgtcggccggctcgagatcgccgcgccgccgccggcgcgctaccttcgcgtcggctccctccccgtccccaccgactcctctgcctgtctcccagccctcctgccctctccgtccccgtaagcccctcttcccccactctcgcctcatcgtgcatgttcacgcgctcgtgtttaagccctctggctactgtttgtcctattctgaatcaggaggggctgatgcttctagggtttaaagcgtctcgatgcaattgtaggtttttttttttgttaagggtcgaggctgggaattcgagatggagtaccatggaatgagcaccctctacgttgtgcaattagaactaattgtgtttgttatttggtagagaagaccctggggatagtaggcttcagttaagttctgccgatagattgccaattggttattggatttgtaagttgttatcataggaaattgtgatgaaactgttatggtgaaatgaatagagatcatgtgctacagttggtctgattgatggatgcaacctaccagaattcagtggctatattcatgtaaaatggaaagaaatgaacacatattctggtggtgggatgctggtggatactggatactgtttaccctcttttggttttatctcccataatactgcaatgaataacaagcatgtgcacacaatcatattcaaagacaaaaataaaatggcacctagtcctaatgatcctattcctgtagctggaactcaattatgcatgcaaatgcctcgtatggagaattgctgtttaattctgctcttgctgcaacaaaccatgtaggactggtgctccaaggtatcaaatgctgccactagagactgatctcaacacactccctatgattccaaacatcccagagaaggttttttcaagtgatgcaaagagtactgaaggtgatctctgttgatccttgataactatgatctgatcagcataaaaggaatactggcttgtagctaactttctctgcaagctgttcagtactgataaattggtgttgtgtgttcttttttttgtcacctttatgactctgttcatactcttcaggactacggtatgatagtggtcatatcaaccagaacttatcaaggaagtgtgaagcattagctgtgtcaggtttggcggaatatagcgacgaaatagatgtgattgctccagctgatatcatgaagcagattttcaaacttccatactccaaggcacaagtatctattgctgtaaaccgcataggagatacactcattctaaacacagggtatgtagctggttgcataataatcatcatgctgagtatagttaatacacatgaatatttaatcgtgttgtaggcctgatgttgatgaaggtgaaaagatattcagaagacaaggtaaccagcctaaaggatctgatccatcaatatttctgaattttgcaatgcactctgtccgagcagaagcttgtgattgtcccccaagtcatcaagcttcgcaggagaagcaagcagcgtctgcagtattgcgtggaacctttggctgtagcgagggttcttttgattcatccccatcatctagttttagcacatcaccttatctggatcagaatgacagtaaaagtagaaaagctccgcatagtactcatgaaagcctgtacttgggagcaatggaaaacaagcggaaagttaaaggatctgatcctattaaaaaaaccgctcgtgttggtgaaaaaaacagctgtgaggtgcaagaatctgagaagagcaagagagtgggaaataatggatttcgtaaagtttgcttttggcaattccacaatttccatatgcttttgggtagtgacttgcttatatttagcaatgagaaatatatggcagtcagtttgcacctatgggatgtctctagacaggtatgctttcattcctgtcgaatatggttacatacttcctttttttacccctattgacaaattgtgtttttataggttactccattgaactggcttgaagcttggcttgacaatgtaatggcaagtgttcctgaattggcaatatgctaccatcagaatggtgttgttcaaggttatgagcttttaaagaatgatgatatatttctccttaagggtgtctcagatgatggcacacctgcatttcatccacaggttgtccagcaaaatggccttgctgtgctgaggttcattcaggataactgtaagcaagaccctggtgcatattgggtatgtctttgaataccatcctttttccccttgtttgctagatgcagtaactaccgtcaagatgttatattaaccctttagtcccttatcatattgcctaaatatctagcctcttttccaatgatgatgatctcgcttgttttcattaaatcatgttgaacctttgctttttcagctgtacaaaggcgctgaagaagatgtcatacagttatatgatctgtctatcttacctgaaaaacatacaactggtgatcatagatctccatgcggtcctatgtcatcttttatagacaagggaaggaaggagtcattgttctctctgggtacactcctttaccgtgttgctcacaggatgtccctgtcaaaggtactggagtattatctttcgcgctttgctttcatatttcttcttggttgttaatattatatgtgctttgcaggtgcctagtaatagagcaaaatgtgcaaaattcttcaggaaatgtttggattttctcagtgagcaggatcacctggtattctattcatcttatcattctgtaatcatttaattgtattagtgcattagtagatttgtgccaatatttgtttttgtttttatcttctaggttgtccgggcatgtgcacatgaacagtttgcaagactcatcctcaaatgttatgaggagctggagctgacatctgaatcatttatgattgaatctgaagtcacccttactgatttggatgatggttctccagaactgagacttgagaatttaccagcaaaacaaaatgtactgccagagcttggcaagaatgagccagcagtgttagatgatgtgttggaatgcacaccatcagtgtcttctggtatgacaaatagtttagtggaaccaagccaagttgttggtggttcatcatcttcagttacaaaagatgtttctctggacagcttggtcatgtgtcaggctggtatatcaaaaacaattgccgatgccatctcctctaagttggctgccatacaccacatatctcaagctatcaaatcccttagatggaatcgacagctgcagaataatactcagcatggttgtggggacaatgcagataccatttgggagagatcagtcgacttctctttatgccgatgtggtgatgttgattgtattgaggtctgtgacatcagggagtggctgccaaaatcaaaaatggatcataagttgtggaaacttgttcttttgctaggggaatcttatttggcacttggagaggcatacaagaatgatgggcagcttcagcgcacccttaaagttgttgaattagcttgtttggtatatgggtctatgcctggacatattgatggtgacgagttcatctcatccatgtccaacagtttgttgagtcaagaagatgttgatctaaaaactaaacttgtactggatgaggcagattattgcaatatcagaagatgcttcagttatgatgtttcttcccaccaattgccaccaaattatttattctgggccaaggcatggatgcttgttggtgatgtctatgcggaatatcacagattgaatggtcatcaagcaaagttggtaccagaacagaagtctcatggcgaagttagaatgtcaaatgaagttgcattggaggtcaaacgccttaagagaaaactgggaaaggataagcagaattgtgacacatgctctttgataaactgtagctgccaaagtgacagggcaagtagtggcagcagtgcaagcagcagtagttcggaggcctctaagctttatgtccgaaagaaaaataaaaaatcacttggcaggaaccttcaatcacaatatagagaggccagcaagaaccccaatgcacaagaagctacgcaaggttctgaaaaaaagcagcatgatgtgaatgatacttgtattgagaataacccagtgttaaatgacgatgttggtcattacagtcaagccagggaaaatcagtcaagaaatgtcgatggggttcctgaaaaatctcaagcaagtgttcctactgtgagggatggtggtatcttcaagttcctcggtggtccaaaacctggagatattgagtacaacttgtcttctgctattcactgctatggtgcggccaagggagcattgtacgcatttcctgtgcattcagtagaaacttccacagttcttaagaaaagaggctgggcatttaatgaactgggccgttgtagactggagtgtagaaatctgggtagcgctgagattgcttttgcggatgctattaaagcatttcaagaggtctttgaccacacaaatgttatactgatcaactgtaacttaggtcatggtaggagagctttagcagaggaatgtgtatccaggattgatgaatttcagaagcatgatcttcctgaaggcacatatatgcaatccttcaagtcagccaagtcagaatattttcaagcaataaactactacaccgcagctaagaggcaactgaagtatgtcaatactgaggtcgataaagtactataccatgaggtttacacacagtatgcccatacctacctgaggcttggaatgcttttggcaagggaaagcttcttaactgatagttatgaaggcggacttgtcgatgactcatctaacagaacagttctagagatttcagcgagtgatgctttttgggaggctttgtctacgtatgaatcccttggtgaacatcgcaaacaggaagctgcttttggtcattttcagctcgcttgttatcagagggatttgtgcttaaggtttctggatttagtcgacaaggaggttaaacagaaaaatgaggataaatatcgtcagaaaagtaagtggtatggttcactagctgagaagaactggcagaaggctttagaattttatgggccgaagacacatcctactatgtttcttaacattcttatggcgcagtctgccctttctattaatatttctaattccttccactcaaccgcggtatgtttttttttctcaggccttgctacatattccatctccagcttttcattgtgctagaatcaagtcaagtcactattcttaattcttatggaattttgaaaagggcatacctgttggtcagtgtgctggttaaccctatgttttattgtgcagacggggtgctgtatacttagaggaataatacctggcttgagttttttatttgatgcaatagtaattttgttaagtgactacattttatttctgccaaggattaacattttcatagagttaaactctgaaaaagccttttttgtcagtatacaaatctcattgatcagtgcaaacaggctagcatctagcaacataggttcatcataatttacctataggtactaggtagactagccgagtttttttctgctaaaagttcaccttttatttgcaccttggtcatgcccatctgatatgtgtttcctggaagcaaatgaccctttcaaatttgttcaataatttgtgcctcatccttgcagatgcttgacactgctctgactcacttgttggaaggccggcatgtggttgaagcaaatgaagactactccaatgatatggatctggacataaaaccaaagttctggagccagctgcagagcctgctgaagaggatgctggtgggatccctgcctagcagcacaggcagagtagtttcttctgtcagccaggtcagcactaacaacagaacagaagctgctaagctgaaagagatgtatcgtttgtcgctcaaatcttctactctgggccagctgcatgagttgtacaagctttgggtatcttagcaccttcacttgacaaatggttgctgctcatgttttatgtcgtcggcatctgtctcttgaattacacagtttgtatctggtgatcacggcacgcttttgtttgttttgatttctagtcaagttttgaagctaaatacctgtaggctgtagtgtacatttaagtgtaaccatggtatgtcagggaacgggaaacactagctactgcaactgtgtagcagatttgtataaatagcaaataatggcatccgatgtaaagcaccagtgtattatatatgtattgtagatgtcagaatatctgaatgtgtgccggcttcaccgcgaatggataagaatttgggaattttgattctctgtttttttttctattactaggttctcactgaacatggttgtcagttattatgacttccaggcccagctgtaaaagctacaatgctgacattcccatggccatcccttgtaaaactttaatttttttactagtagtaataattagtcgtgtttagaaaataatggtgtcagcaagagttcgctaagatttatacaacttttttcttatttatttctggaacttctacgtacagtaggagatagtgtcacggtgctgacggtgggtcgctgtatattagtggcgtatgtgccaacacagaaaggccacggagaaacatgggccatggcccatggaccaatacgaaggaccgcaacgaagcccaaacagcagttcgtcggtgctcggtgaagcaacgcgctgagcaacaggcaatcgttttgtcccacctcggctagtc

SEQ ID NO: 4390 - DNA, 4779 bp, Sorghum bicolor
tctgtagtatttcgtttttatttgacaaacattgtccaatcacggagtaactaggctcaaaagattcatcttgcaaattacaggtaaactgtgcaattagtttttattttcgtctatatttaatactccatgcatgcggccaaagattcgatgtgacggaaaatcttgaaaaattttgcgaactaaacaagaccttaatacaatgggagaaaaaaaagaagataaataatggaaaaattacatccccaacaaggacttaagtagtcctatgcaacaaaccgccttgattcaagatgtcaactcctctgaaataggatcaccagcgtcaagatagtcgtcgaaacacgtttgtcacaccttaaaaaagatagtgaaaacgttggacaccgaccaccattgaagattggatgcttcttctaaggcaacagcacaaagaacttagaacagacatagacctgccatccaaactccgagcagttatgccaacaaacacctccttcgacgagaactgcacatgtctataacaaggtattccatcgtaattactctaccagcgaaagcgagattctgcgatctgtccctcgttctactaaattttactgcgtcagctgcagtaaataaacaataaaataaatcaagccaggactgagaaatcacagctgatgggtcaattgaaaatgcaaatagtacgataatatgccagtacgacgagtagtgctttgcatttcttctgcttacccatgctttctcggctgatactacctcctcattctcgggaaataaaaatctttattctacttagagttgtacattttgatattatatatatatccaataaattcaatcaaacttacaggcggtttgattttgattagacttaaaactgcattactccttctatccaaaaaataataatctaaattctagatccagaacaagctaaactatatcttaaatttaactaaatttatagaaaacattatcaacattttatgttcctaaataggtttactacaaatatttagtataatgctgtttatttggaattgtaattgtcattgccttttatataaatcttaattgaatttaaaattatttgactgctcgaaggtgagatttttgtgacagttttatttttgaagcactgacagagtattttttagacggaggcactttttgttcaccgccaactttctcttagttcaaactttttaagattttttatcacattaaatcttacggcacatgtgtgaaacactaaatgtagataaaaataaaaattaattatacaatttacttataaattgcgagataaatcttttaagacaataattaccaaataaaaatgaaaattccaccataccaaaaaccaaaaaaaaatcgtaactaaggccttgtttagttccgaaaagatttcggatttcggtactgtagcactttcgtttgtttgtgacaaatattattcaattatagactaactaagatcaaaagattcgtctcgcgatttccagttaaactgtgtaattagtttttgctttcgtctatatttaatgcttcatgcatgtgccgtaagattcgatgtgacggggaatcttgaaaattttttgctttttggggtgaactaaacaaggcctaaacgaggtctaaggtgaggtgactagcatatataccgtgtctgtatgtagcttggagtactactagtatttaataaggttgcagtggcgctgctagtccaatacgctcgtgaccacctctgctttacgcggccttgtcctttgctccaccttgccatccatccatccatatagctagctctccacgatgcgctctcccctgtgctctgcacgtagccatatcacaccgcacacggtactcgtcctcctcctcgcagagcttgcaccagcacgccaccttagcttgctgtgctcgcactcgcacagttgcgagcgcattgcatttgcgcagcacgcagctaggcggccgggaagcatagctggcagatggcgagcagcgcgggggaccggttcctgaggcagctgagcgcgagcaacggcggcgacgacgaaggggtctgcggcggcctgcagctggaccagcaggagtacggcggcgccggcgcggggaggaggggctcccggcggtggtccaagaagcgggccgccgccgccgccgccgcgaggggctacggcgccggcgccggcgggtacggcgtgaagcagcaggcggaggccgccgcaactgccgcgaggaagcgggtgatggtggtggtggatgagacctcgggctccaagcacgccatgatgtgggcgctcacccacgtcgccaacaagggggacttcctcacgctgctccacgtcctgccgcactccggcagcggccggggcgaggaggcctcctccctcgccaactcactcggcacgctctgcaaggcctccaggccagaggtgcgcatctgcaacacctgcatttgcatttgctagctgattagtgaagcttagttataattagctactaccctgtaacatgttactcgtaagcagtgcacatttgaaccaactttggttacagtacagctagccttcttttggtagcatgtgcttggagccatgcacaagagaattactagtagttaattaactactggaaaaaactacaccaacaagagaatactaggagttaattaaaaacaatgacaccaacaaagggattcatgggttcatgacagttcttgttaaaaaaagggattctgtcctggttcctcgtcaaaaagaaaaaaaaggattctggttgttaggtaatctggagaagtcactcatcacctgacgttttaagattgcctttttagacttgtaaccagttggggagatcatagaagagatcagaatccacttttgtgtctgcatggatcaggatctagatcccagacagataaaaaaaggccagggcaccatatatatcaatcgacctgggtctccatttctactacaaaggaagtaagcaacagactggggggctctggtcccctaaaatctgaaatcataaatcagggcattatgaaatgcaatctcatcatgtctggtttttgtttgcttcaatccaaagccttagttatttcgttgtctctgcacttgcctgcttaagtgtgacagtagaggtgcatcaactattcctttgtctttgttgtgttgtggcctgtaaatcagtaaatgtaaataaggtcatgatggctcacgaagagaaatgtgaatgatggtggtaggtggaggttgaagcccttgtgatccaagggcccaagctgggcaccgtgctcagccaggtgaagaagctggaggcctccgtgctggtgctcagccaatgcaagccatctccttactgctggctaagctggtaaggcactccgcaccataccccttatccattctgcatatgtcttggaaatgtgaagctctcagaggtcaactatggacagtgaaattgtggtaagagaatctctcatgatgccaatccgtggtgtttcgtttaaaaatgaaaaactaagcttagacttcataactactccagtaatttatatatctatacatgccagcagaatattcgactgttctcaggtttagcttatcctcttaggtaaacaattcaaaaaacgctaggtcaaggttgtggagtgagctgattggcacttggttagttggcttcagtctcaatgtatactctctgtaagatactaccattaaaaagaaggtaaaaaaaaacgtaattatgagaggccctactcacaagtggtggccaaactatttgtaaaagaatcgttgctcaccaccgttcaatactagggtccatgcctttgggtgaaaacaacgctttatgatgcagcggccatgtgcaatccataaatcgcagatgccatgcttgtccttctagatacacctctcctaaataaagcaagaatcatacacacagctaccagcaatactatagtactacccttttgctgcaatgtcacatcacatgtggcgtggcatctgaatctcggtagttaaggttggattagggaaaatgtactcgttcacctcagtgataaccagccgtcgtttgagcaaattccaatgctgtaattcttttttttttcagtttgctacggagcagcagcgaggagtttgtggagcaatgcatcaaccaggcggagtgcctgacgctggcggtgaggaagcagagcaagggcgtcggtgggtacctcgtcagcacccggtggcagaagaacttctggctgctggcttgacgaccattttacctagttgcggctgctactactccacgatcatgttttgtgtaaccatagagtgtctgctgtcatttcgtgtaaccaagtgcatcaccaaaaaaaaacttctgcctctctctctcgatctgtattctgtggcatgtcgtgtatgcgtccgtggatcgtcctgcctccttcctgttgtaaagccaaatagccccccaaatctgaccaccctctcctacaaacctgtatcttccgtccctgcgagtcttcagcgttcgtgtaatctgtactggacaatcatgtaaggctgcataaatgaccaattctgttgtacggtgcttcttgtttgctggaattgacttaaggttgaggctgcctgactggctctttgtttgcagattacgctaccggacgagtctgattgcgtaaccacgacagaagaacagcgcaaaatcgggatgaaaacatcggcaagaccatggcgacgtttccaatgcagtagctcgaaattg

SEQ ID NO: 4391 - DNA, 3198 bp, Sorghum bicolor
agcctctctttcccctctcttcgcaaaaagatgttctcatcagtctctctctttgtttctgttttacaaagaattctcttatgttaagtgtctcagtaatttacaccaacccagtcaaagctaacgaaccagtaaaagggttcccgtttctcctaataaaaaggcttcggctctaactctggctcctcatctagagcactttttctgttgaagctgaaaccattttataaaatatttgtcaaaaacgttttcagtggcaactttgtaataatttgtattaagtttgtgaggagctgagggaaactatatttgtgtggctctgactcttcaatgcaaggagcaggagccaggagaagtcacagccatatagccctgctgatatgaaggcaaagttgtgctcgtaaagatgtcgtgtcgtgtggctgcacatgatcatccactcgtccacagagagatatctgttggtagggtgcctttgagcctcagaaaatcagatggccacgggtacctcctcaaaccccccacagctttcaaatgataataagcgtcttccccatccacaccaacagaagtgaacttccatgaattctctcccttggaagcaatgcaaagagagtcacagactcacacacaggccctttagctgctctcacgcatcggctcactgtctgtctactagtaattatatccccatcaatcctaatcatcgtaacaactaacacacttgcagcacagatacaccatacacatgcatggcaaattgacatgtgaaggtcttctggctgtgctgtgtgtgccactagaggtgaggtgataaatcctgcacacgcaagttacctgacgtgcacccatgatgccgcgcgcatcagaggccggccggattggtcccctgcacaaagaaggcacctcccttctttccacgagctgcttttccctgcgtcgtcgccccgccggccggccattccactcctttcgctttcgttgcgctttgccgtcagctcaatagctcatacagctacagactactacaccgtccccttccttacctttgatgaatcatttcctccctcctcggctatacggacactagtctttataggcggatcatgtggcctgctgctacagagtgcgtgcatgggagtggggacgaggacgactggggagccggccagccactccttccttggagctccatctccaacatgattctgggattattttttgtatcagtctcgcagccttgccatcgcatcaactgttgaagacgagcgagtgtggcagcctttctcgcggcactctttttgttcctccgagactttactctctctctctccacattgccaccaccagatcagctgagatctcactttcgactcagcccagtcactggctttaagtagaggggcagccgagctggacctctccttgtaggttccccttggcatttggcgttcaccactggcctttcgtgatctcagtcccatccccatgaacacagccaaagcatgcatagagttataggccgtcgatcgctagctcattcttgtcttcttcggttcagagaggaggagctcagggtgctagtactgaagcctctccgcttccagaacccctgaaggtatgtatgtgatatataatctgttttgtatgtctgcaataacaatgaacataattctgaatcctggatgggtggtatcacaggctttcacaactcctctttctgattttcattttttttctcttttctgatgatgttttagggtgaatgcatggttcgaatgagttggaacatgtgatccatgattctttgagacttcataattgatcctagagtgggctagtcatagttccagaaagaagtcaagcattcagtcgcttgccctggagaggttggtcaacaaagtgagtgaatgttacacggcgtgcagagagatcgacgacgcgacgcctgatcgcaaatatacgaagacgtgagcgccaagatcgctgagacgacagacatgagcgggatcgggcagaggtcgtcgcggccatggccgggggaccccgcgtccacgccgtcagagccagccgccgcggtggccgcggccgcggacgcgcggggcgaggcgtccacgctcagggacttcggcacgtccatggacgccatctccttcgggttcgcggccacggccatcctcatctcgctcttcctcctcatggccatcttcgagcacctcatcaagccccgggccttcccgccggactccgccgacgacgacggcaggcgtccgcacgctgctgtccgccaccggcatggccgccgctcgcccggcaagctccgggggacgcccatggtaagatcacccaagcaagcttgccaatcaggcaatcacccgttgtcgcgtaccacgcattgcggatttgcggtgcatgttacttgctgggagggactgcgatacgatacccacacccactgtcccactggcactgggtgtaatcttggcatgctttggctctttctgatgcgaaattcctggcatgcttttttttttttcaggtggaggcggtgctgcaggcggcggacctgtcggtgctgatgccggggcagcggtacccgacgtacctggcacagccggcgccgctgccgccgtcgtgccccagggaaggtgtgcattggccgccgcacgaccaccacaactcctacatgccaccctgatctcatcctccacggccacgagagcatgtttattttgacgcacacggcacacacgctgtgtccaccgtgctcgttcactgcgttgtactatagtggagaagaggttgtaaatgcaggtggtcgcgaatccgatatggacgtcctgtccttgctgccttcgttctgttcttgtccgtatgcactgtgccactgtcctctaggatgccgaattcgccaaagtccaggcgcaaccgtccaggttaaccggcaatcagggccgagattatgcagctgttccgtcgctaacagagcaatactggtcatcgagaggatggtccaagaaactccggccttgtttagttcaacctgaaaaacaaaaagttttcaagattctccgtcacatcgaatcttgtgtcacatgcattagacattaaatataaacgaaaacaaaaactaattacacagtttagctgtaaatcacgagacgaatcttttaatcttagttagtccataattggata

SEQ ID NO: 4392 - DNA, 6312 bp, Sorghum bicolor
atacgtttaaagattcgatgtgacggagaatctgaaaaattttacaaaatttttagagaactaaacaaggccagtattctcggattgccagtgaaatagtttatttttattgttatctccttaacattgcttttatcagtactgactaagcagacaatatatgtgcttttgcaagctgtaaaatcaaaacgatgagcatttgcaaactaaacaaaagtaagcatacatgctaaatagattctgactgtcaaggatagctaacctgctatgctagctggctgtgaccagtgagtgttgagtgggtagtgacactggccactagggagcaggatagagctgctgctgtgtcgtttggctctagcgatcaatcaatcaaccccagccatgaatggtctcactctcatgcgttcttgtctcagttcattgaatgtggacggctcttcggatggccttagcttttaggttatgtggacctttttggatgtacaattacaggtgcgtgtttggaagaattacggaacggtgataagatgatactgaggttgatcgagacaagggactcggtgtgaaatatcaaatagaatgttttgcggaacgactcatgttgcaccgtgaaattagacatacacaatgtctacgtgtcgaggttctataagtctaagtttcgaaatagtgatagaaatgatataccaagcttgattaggatagacatggtgaaagatcaaacaaatcatcttagagaatgttagtttgtaaatataaaagacataatgtacatgcatgtgttgtcattttataagcactattgcggataatgatgacttcaagtcgatgaataataatgagcgtgataataaatcataggagaccgtcttagagagagtcaaactagatcaaattggtattgtaataaaaataccaagctttataccaaaagctttgctttattagcctataaaataaacaatacaatatgaacgaccaactttaaatagaatgcaaattcagaaactcaagacttgatgcaaagaaggtatttgagaaaattcatccttttgcattgatccatgaaaacaaacaaacgttctctgctcaacgaaaaaaactcatttacataataccgtaaaatttaagcttaagatttcatagaagatgtacataggttaaaaatagaaacaaaatgatagaagataccaagatttctttgactcgctcgtgctcctcatcgtatagactatttggaaggagaggaacaaccgagtcttcgagagggtagcgttgcccgtgatggatgtcgtacgagctacactgaaggagggtgaagagtgggcgcttgtcggggtcgcgccagttgcagccttgcatctactatggtcgcaacattcgttcacgcttatgtgaacatttagtagatgctagattctaatgtcgggttcttctgagggctgctcgtcttgttcaagccggcttttggttggttgtgtaacctaaactttctttttcttttaatgaaaaaatacaggcactcaatccgttcgtgggaaaagaaaagaagataccaagatcataccgtctctgtcgatccgctaactgtgtggttaaccagcggttgaaccaggccagccacggcctgacctttctccattctgagcccggcccgagcccggcccaaaggcccaaaatcaacgggcagcccgcagaggaagcgagcccttccagacgtttcctccagaccaggtagcgcgcctgcgggtccggcggcgcgctcctcccgttttcccgtccccgcatccagaggaggcgagcagcgcaaacaagcgggaaaaaaatcccggtccccagccgacgacgctaccgcacacgtgcccggccccgccaccccgcccgccacgtaaccccccgtcccgccctcctcgagcctcccgtcgcgtgtcctgtgccgcgcttggcgcttgctatttagcacccccgtcctcctccgtccccaggcagtcgcagttcacaactgcgacttaaaactatcttctccgccgcgatttggggcgacttgggctggcaaaagcgttgcttcgcttctcggactgctaggtgagcagaaagctcgcgtcttttttttttctctatactggactggataggatgggagttcagatcgcttggttttgattcgggattggcctgctcctgataccgagatcgccttctgaggctagatttttcgtggttcctagggtttccctgttgaatcttcgggccttttcacccgtagtatcgtcgtcttttctgtggatgtctgtgcgcgaaagctactgcaacgcgcggatgatctggagttgttttctcggactcggatattcctttcatcccgatagttgcagtggttgtgggtccctttaatgagtagatgcatgctgcctgcgccggatttgtcaccattcatcccatcgcaaagatttgggatttatcgatagctatggaggatttacttccccattcctctcgattcatcccaacgttggttcctctcgattcatcccaacgttggcttgctgtgctggtttggtttgttgagctttgcgttgtaaagcacgcctccgatgtttttgccggaaatttcgatgctttaccaaaaaagaaatgttcggcggctagcataggtcgtgctgcctttatacttgccgcttccgcattttactcgatgcgtttcatacttttcccaattaagtagtgtggctagtacagtacaaatccatctaaagaagaaaaagattgctgattgcgacgaacacacactctttgtgcgtttcctgagtgtatttttggtatttgtgtcctgaagatctaaagaagaaatagatgtttagattctctatcgtgtccttaacctgtagtgctgcaaacctgcatctgtgtgcttgcgatgtgcctttttggtttgagtagtagtagtagataggcgataattgccaccttatcaatggagtgatgttcatgttccatggtctggatttcagagttgggagttttactatgatctcgtgtgcacgcggcatcttgttgcaaatattatgcaagcatacaagactagtcaatgctaattacacctgtgcacaatctttttagtttgtaaatgtttctgtgacaagttcagtgtaggtttattcatcactagtattctaatgattgcaggttaagttgcgttttcggttcttagaaaaggactggctctgcactcagataatattaaaatggatggtgcacagccaccgagtgggcaattgaacaactcgttcaatactcttatggtttctggagatgagcagagtcaacagccgcaggatgctgggaatgaaaccagcttcacgaattggaaagaccttcccatggagctgcttctgcgtatcatttcactagttggagatgacaggatagtcattgtggcctctggtgtatgcacaggatggcgtgacacattagggtggggagttgcaaatctttcgctgtcatggtaagaattgtctttcactctttcaggcatgtctgttttagtttggcatacgttatcctcagacgatgagttcatcaattatcaagattttagaatctagaagcttccatactgtagatttggatacaatagtggattagttattcagctgtcttcgatttcttagatgtttaacccaatatcctcataatgtttgattgcaatggtgctattcagtcagtaattccataatctaaatccacgacggtaacctgtttggttgaatttcttttcagtggatcattttctttgttgctgttgtttgtcaaagtactgttgttgcagttgttgttcaaccacatgatgtagacagtcaaccatatgatgttcttgctataaaggtcattgcaaacatgagaattccatgtgctgatttctcagccctacagttgactagattatagagagaaacctaaaaaggtagccataaatgattatacatgggctgtttgcctgtgttctgtacaagaatccctgtggatcatacatacttacgtagcaaacttcaagcactaattttagttcgttatttcataccttctgatacacaaagtagttggccttcgagatagaactggtgattttttttttctttcggagatagcaaaatcatccagagttatgtgacttcctgctatgcaaataaagtacatagtaaaactttgtttacttcagttcctagatgaccagctggtctttttgaatagcttttggagaggaaagtgtttattgaccaaagaaagtgtcaaattcaggtgccaggaccacatgaatgacttggtgatgtcactggctcacaaattcacgaagctccaagttctatctctacgccaaatcagagctcagctagaagacagtggggtggaggccgtggcgaacaactgccatgatttacgcgagctggatcttagcagaagctttaggctcagcgacctgtccttgtacgctctggcgcacgggtgccctcaccttacaaggctcaacatcagtgggtgctccaatttcagtgattcggctcttgtgttcctctctagccagtgcaagaacctcaaatgcttgaacctgtgcgggtgtgtgagggcagcttctgacagagcgctacaggtacttcatttgctgtaccattgtatgcttgagctcgcattgattcctgctgttttggtgctgcaggccatcgcatgtaactgtggccagctgcaatcgttgaacctgggctggtgtgatagcatcactgacaagggagtgaccagcttggcttcaggatgccctgagctcagggctgtggacttgtgcggttgtgttcttataacaggtgaccttgcgtttacgtgtttggtgtcaatttctccaaaaccatcctgaaactttggcctgacgcttgtttgatgtcttgctacagatgagagtgtggttgcgctggcgaacggctgccctcacctgcgttccctgggtctgtactactgccagaacatcacggaccgcgccatgtactccctggccgccaacagccgtgtgcgcagccagggcaggggatgggacgctgcagtgaagagcggcggcagcagcaaggaccgggagcgggacgggctggcgagcctgaacatcagccagtgcacggcgctgaccccgccggcggtgcaggcggtgtgcgactcgttcccggcgctgcacacgtgcccggagcggcactcactcatcatcagcgggtgcctcagcctcacctccgtgcactgcgcctgcgcgctgcaccctcaccgagccgggcgcgtcatcctctccaaccacgcctactgatcgcattgtggagcactggacctgtggtgctgggatgtgtgcgtaggccgctgaaccgcgcgcgacggggctgttgtgtgaggtgcttttgtggtgtgttgtttgggcgtgtactagggtctctactctctagggagctgtattgaattgaaccgtgtagaagcaactgggttaagtttgttgtctgtaaaaacatggactgtatttgtggccttggcttttgagatcttggggctggtctcctggagcaccagaaggtagaagcagcagcgagatggccgcgaagccaccgctttgatagggatagggctctctcaccggctccagcgtcggtgctgtgctgctggctcgcggagtcaaccgcaggtccgcagccgtgcccagcgaggggtcgcagccgcgcgcccgtgcttgtggcaagattttctaggcatggcggcaaagtgagactatttcttaggcacggcaaagtgagactctaaatttttagctatttttgtggtttaacgaggggggtttggacgtagagactaaggttttattggtgtaacatcggatatcatatgaacataagatatttgaaaaattccagtagggggtaaaacccctcctgtttcctaaaaaaagatatttaaataataataataaaataaattgcagattcaatctatgattagtatttttactgtagcaattataaattaatatattattaattatggactaattaaatttatatatttgttttagtctatatttaatattatatatatatgtctaaatatttaatatgatacgaactaaacggggcaggggaccaaacatccccaacgtcttttactcgtgggagccatctttaaaccagctgccgtgccaaacgaggatttgcacatgtggtaccttttttcttaattcaatatggccttatttagttagcaaaataaaaagtttttttaacactgtagcacttt

SEQ ID NO: 4393 - DNA, 7467 bp, Sorghum bicolor
ggaaactgtaagacaaatttattaagcataattaatctgtcattagtatatgtggattactgtagcacttaaggctaattatggagtaactagacttaaaagattcgtctcgcgattctcaactaaactgtgtaattagtttatttttttatctacatttaatgttccatgcatgtgtccaaagattcgatggaatggatgaaaaatttttagatgggaactaaacagggcctgagaatggcatggcagttatccaacggtgggcaatgctaagctcaagctggcatggtaatgtgcgtccatagtgtactctatgttggagtagggaaaacaactgctgttcctcgacgaacaggcggagagcctgattggttgatagtgagatgacaggtttttggtaagattattagacacaggctggacagtacgtgtgtacgtacaaaaacggagttaaaaaaggacctgtgctcataggtgggcagctttgcactgctgcgttggaattgaaaaagtcaacctagtattattatttttattattagtacgagtcaacatggccctccaacgaagaaacagtcaaccggcctctctgcgcgtagacgaaagaaagaaagaatggtacgcgtcggccgattagcacaaatcaggagcacagcacagtttggtgcgcctcaactcgtggagcgtggcaggcaaaggcatcaggcggcagcagtccaccatggcgcggcaactaccggtaccagcgtccacaggggttgggttggttgttgggcaggcggcattagccagcccacccacacccatgagccacccactagtgactagtgggccagtcccagcctggtgggccgggtgggaatgggattgtccccaaccagccccactactcgctctcgctcccaatcagcagcctcgtgacgctccggggccgagcgatgccgacggccgccaccgacaagcaggggagtgccaagccgccgctcccgggatgcacgcgcccggttcactgcgccgtggcgcggaggacccgcagcgccgaacagcagacggtgcactggacgacgcgctgccgctgcgtcgtcgccgcggaggggggcgccgggcgcgcacgcacttactaccgccgcgggcccactcgcaccgtcgcactcacaccgtgaccgtgtgtgtgcccttggcctaatgctactcctacagtccaccatatgagttttatttgcattaaatatgttgctacataggattttttttgatgatatgactgtgtatttaagaagagagagaagaaatgagttggcacgatatcaactctctatgagtattgaaattaaatgcccatgaaactataaaatgaaactctccattgagagtgagtgtttcaaccaagtttcatttcatttcacatgatatggcagtcttggaaacaacaccatgaaactctccactgagactgacctaactctttttgctcgagtaaattctcaattaaggcattgtttagttaacctcaataactaaaaagttttcaaaattttctatcatatcgtatctttcgacacatccatgaaacattaaatataaatgaaaataaaaactaattgtacagtttaactgtaaatcgcgagatgaatcttagttagtccgtgtttggacaatatttgctacaaacaaataaaaatgccacagtagcgaaatccaaatttttttcgcatctaaacaaggcctaaagcatcgccatttcttctttctaagctcccggagaaataccaacatcttaaaagggcaaatccataaaactaccaaacactcagaccggacattttggccaagatctcccgagtaatctaacccaagtactagtatagcgtataattacgtacggtcgtctaatgcgaacccatctcctccgcttccgcttccgcctcttcacacactacacaacagattgcactccactcacactgcgctgcccgcccgcccgcccgcctttataacgcggcgaggcccagtgcggtggcagagaacccaaggacgcgcatccgccttccccttcctcgctcctcttcgagatccgcgcggagggccaccgcgaccactccggtcggttccggcgaggtaccaatccaccgcctccgcaatccgcattgctgctccgttctttctccttgcacactcttgctgtcctggatccagcaaagctggttccgtccttccgccgatgagctagctagctagcgagcgagctgctggattagctgttcccgtcttttttttctttgtggatggaatcggacattgattagtgcgcgttttgcgcccagctgagaaccagctcaattggaagatgcggtagctctccgcggaaggaacagaacgagggggttttaaagcacacgctttactaattttctttccatgtttggccacgaagggggatttctccgcgttttcccgtgttcttatactgggaaagagccgctgtagtactaggaaacaagaagctaatactagcaccaatagcggatcttccttccgttgttgcttgagtagatccagcgtttgttctttagatccagcaccttgatttatgtccgcggcgatttaagttttttttgtggtttgcttcaggtgccgcgcggctgtagcagcacaaagcagacaaaggtgcgatttttttgggggttcttggtccagcagtagttggtggagataaatcgcgtgaaggtcggtgctctggtacatgttcgccaggcactaatggcatttggccgaggtgggaagatggacggccgccggccgtcctcgacgtcgtcgtcgttctgcacgaccaccacggtcgtcgtctttgtggcgctctgcctggtcggcgcgtggatgatgacctcgtccactgtcttcccgctggagatctcctcgaataagaagccggtggtgaagcagcagcctgcgcctgtcaattttggggcctcacaggacaatgctggtgaaggttctgagaaatttgaggacaccgacaacaatgatgccacgatgccggaggagccgaataacaaggatgccacgatggaagagaagttcactgagaagccagaggagaagcctgaagagaaggagccggaagtgccgacagagaaagctgagaccaaggatatgtttgatgatgcaaatggaaaatcagaagggcggtcagatgacatgaagaacgatggtgacggggagaagagtggggagaagaaagatgatgaaatcacaaatgagagtggtgatgaaaaacctgatggagagagcaaggatgatcaagaagagaagcctgaaggtgatgccactcaggaggagcaacctcagatagaagagaaggtggaagaaaatggagagaaggatcagagctcaaactccaacgaggtatttcctgatggggcccaatcagagcttctgaaggagtcaaatacccagaatggttcattccccacacaggctgcagagtccaagaatgaaaaggaagtccaagcgtcatcaaagtcttcaggtgatgcgactagctattcctggaaactatgtaatagcagtgcctcgacagattacataccttgccttgacaacgagaaggctatcaagaagcttcgaactactaaacattatgaacatcgtgagaggcattgccctgaggagcctcctacctgccttgttccactcccagaaggatataaacgcccaattgagtggccaaggagcagggacaaggtgattctgtctattctaaattgtacgacactgaatcatctttagctgaccaagatctctgtttacttattaccatcttgtgctgctttttgcaggtatggtacagcaatgttcctcacactaggctcgcagagtacaagggacatcaaaattgggttaaagtatcaggtgactacctcctgttccctgggggtgggactcagttcaagaatggtgccctccactatattgatactattcagcaggtatatatcatcatcatcatcccagcatcccatattagtcaccccttagacttgaactcatctgtctcacacttttgagaatcagtgattgattcgctagtccacaatcataatttgtcaaatgccaccctatggaaatctacatgctgaggacagtttgtttatgctagactaaacgacatcaggctttcacagccagccatgtgttttcagcctctcgttctgatggatacaactttccttttttttagtctcatccatacattaatctatcaagcaagcttagtactgtccatgattatgaaagtttcatgttgcatctttgaacttgatattatcacacttgctttcatcatatgctgattaaactgtcattcacaggcactgcctgatattgcatggggcaaacgaagccgcgtcattctagatgtcggttgtggagttgccagctttggaggctacatgtttgatagagatgtgcttaccatgtcttttgctccgaaagatgagcatgaagctcaagtacaatttgcattagaaaggggaattccagcaatatcagctgtgatgggcaccaagagacttccataccccagcagagtctttgatgtcattcattgcgctcgctgcagggtcccttggcacattgaaggtttgtcttgttggtgacatgtcttcctttcatttattgatttgctatagaactgaatcttattactgactccttttaggtggcatgcttttgctggaattgaaccgcttgttacgccctggtggttactttgtctggtctgccactcctgtttaccaaaagctcccagaggatgttgagatttggaatggtatttccgtaactgcttagtttagtttcaccctaactgcatgaagttcttatattaattaatgtcacctatcaaaactatgtatattcattttgagaagtgtatatccataagtagggtagctgctaacttgatttgttacgtcgaaataccatacagcctcccatctttaataaggaacccgtaccaaatttatgtttggtacactgaacatttctagtatagcaactactggcagaacaaattcagcagttcatgagtgaaagtactgaataatcctaagtatcaggggttaacttctttcatggataaggaaggattgcatttgttcaaaacagatgctatgtaccaacagtgcaaaattgaattttatttctatcataacatatgaccccttaatcttttcagcgatgtccactttgacaaagtccatgtgctggaagatggtcaacaagactaaggataagttaaatcaagttggtatggtcatatttcagaaaccaatggacaacatttgctatgagaaaagatccgaaaacaacccaccattgtgcaaggaatctgatgatgcagatgcagcttggtatggttttgtttctttgagaagaacgtattttcaatgcggcgaagtgcttcctctgctttgcttacacaatcttttgatttgcaggaatgtacctttggaagcatgcatgcacaaactgcctgttggctcgaaagttcgagggtcaaaatggccagagttttggccacaaaggcttgagaagactcctttctggattgatggttccaaggttggggtctatggaaagcctgcaaatgaagatttcgaggcagataatgctcactggaaaagggttgtaagtaaatcgtatgtgaatggcatgggaattgactggtccaaagtgagaaatgtaatggacatgagagctgtgtatggagggtaagtaaatgggtgtctttctcagtttcttgggcatgatttttttttcttctcttttttggtaattcagatcacactacataactaccagttagccaagctggcacatagctatcataaaacataacaggcaacttgtccaccataagtcattaagcagtttttttctttctttctttcagttaagctggaggaattatctttcttggttttggtttaaaaaacccaatatttttactaatgctttacatcgttgcatggcagttttgctgcagctctgagggaccaaaaggtctgggtcatgaatattgtgccgattgattcaccagacacactgcccatcatttacgagcgtggtttgtttggtatgtaccatgactggtgcgagtctttgagcacttacccaagaacttatgaccttctgcacgcggaccatctattctcaaagctcacaaagaggtttgtatctcttgttcttgacattattctatccttctggtatagattactagtggaactcagaaattgaaaccaactaatgtgatcagttcagcaagaaaacaataataatgattttcatgtgtttgagtttgacatgtttctttgacatgtacaagtagcatgtttgcatgctttatgcttcttgcaatgaaacctgtggtgtttacagatgctaaatctgtgttgcttgtttacagatgcaaattgatggcagtttttgccgaggttgatcgtgtactgaggccccaaggcaaactgattgtgagggacactgcggacacaataaacgaactggaaagcatggccaagtccctgcagtgggaggtgcgaatgacctacaccaagggcaacgagggcttgctttgcgtcgagaagtcgatgtggcggcccaaggaactcgatgcaagcacgtgaaatatatgtgttgaagagaactgttaccaagtagggtaaaattagaggaatttttgtcactagatatgcatatgattcttgttgatgctgaaaggacaaactctttggtgtaactgtagaataatacacatctgttttcccccatttgttgtttcattctcaacgctgctgtaagatagtgtgctggaaatcactggtacattctgttcaattgggcagcttcttcagtttgtcggatagcagtcgaacaatcttgtgcataattgcatatgctatatttgaactgttgtgcaagtcgttgttaaacgcccaagtctacagcgacttgcttggtgctaccgacctgttgttccgcgtgacaagtcactacccctagtacactggattcggtggtgcgtgactgcatgttatcaactgcgtgagaacgcaacggaccaccgggaaagatacaaaacagtacaggatgcggcatggttggaagaggttcaatgcagagataaaattgcagtaagatttttttgttgccgcctctttttttttgtcgcatctctccctgaaatgctggttcacgtggatggagtttcccttgtagataatcctgctgtttgcaaagttttgttttttctccagctatcagtgcaagtagtgcggcctagttggtcatgtccgaaacaagaatccgggcaagccaggcaggccttgtgcacctgaaattctgaattgaagggtctcctaaatctatctgcctcttccatcgtcccatgtccagagatgaaaa

SEQ ID NO: 4394 - DNA, 2611 bp, Sorghum bicolor
gtagatctacacaatgaatatataatatggtatactttagtacaaagttttggttgtagatttaaatctatgtttttctataattaaaaagaataattcatatatgtagttccaatggttcaattgtggtaaattttttatggtggactcattattgtatgcttgaactatggtaaaagtttcgtatccattggatcaagtaaaatttagttatagatttatttagctttattcttgttaaatctatgctttatctataactaagttatatgtgatccaatgagtatgaaatttttaccatagttcaagcatacaataatgagcctaccataaaaattttaccacaattgaaccatagaaactacatatatgaattattctaattaattacaggaaaacatagatttaaagctacagaaaaaactttgtactaaagtatatcatattatatattcactatgtagatctagtcatcaggagtccaacaaaattgaattttttattttatgatttttctgtgatttattatgatttttcaaagaatcagcggaaataaataaaaaagaaaaagacaaaaccaccctctaaaaccactcgagggggttatttgaccggttttgaaagttcaggggtaaaatatctggttttatactttggggggtaaagtattccaccttagatagtttggggggttatgtagactttttccttaaataaacccatctgtgaacacagtcgcaaccggaatcggtagcaaaaaagaatttctgagaattccttccttccgtacgtatgtgtatgtatacgtgtatccgaatccgagttcatgccgtatcggtacccccggggttaggcaccaggcaccagctgcacaggacgatggagctgccctgcctcgccttccaccgctgcggccgctccacgcaacttttcagcgcatctgaacacaagcgcgtcgtcaacgccggcggcgacatcgatatggacgacatggacgaggttctgactggcaagatcgtctgtccgaccgcgcagggtcaccttctcgtccgcgactgaactggccaaattggtggcgcctagggagctttcagtattgtgtttgtttgatcaaccatctccttttttatgttgttgcatggtcttctcagtttgcttcattgccatgagcccatgaatgggcatgatagattttcaccctgtaaccagagctcaaattagtggcgcctagcctaggttgtcgcatgacatgttaggagtgatcatcatcgacacagcccacccgattggtgtcagtaaaaactctcttaagggaagaactgaactttctattcctcaagccttgatcaatggcccctttaacatatggcagaatttgcttcacagccccacactgaacatcaatgaattgagattggaactgacaaaggaaatgtccagccgtgtcaagattagatactgaagggctctgtgcctctgccagcactcccatacagaaaagcatcagagtaacttagagcatgaccaaggtcatgagacaatttatcttctgtatgtatgcaatggtgtagaaaatacagtaggcttaattatgagataaagctcccatcttctattgtgattatgttactggcaatctgctatgagaagtgtctagaccatttagttgcgcagttattctgggtttgcttcagaatttacacaaagcatagtggaaactagagtaagattaatccttgtttcgtacatcatgcagtattgattttaaatataaatactgaagaaaaaaattcagttcctcatgggaaattagagtaagattaatccttgttttgtacaacatgcagtatgatttttaaatataaatactgaagaaaaggacagctcctcatggagtcaatgaattatgacaacgaattagtggtcacaaatcatcactgttctaatcacattttagatttcatcaatcataaccatgacattatcgaacaaatgttctgtacaacaatcctgtgcacatcaccttgacatataatcaccttccatcagaacttacaacattcaacaacactacagcaccaagttgcaaatcttaccaatatctaaagtagcagaacactagagaaacttcttctcaagtctccacgaaacaaatgctacaacatttctgctgcaccttaggagttcaaacgaataattgtcctgctgtggctatcgtacacccaagcaaagcgccagcaatcacctggaccagttcggcacccaagaaattagaaactcataaaaatcgtaattcataaatgtatgccacaagaagatagtggcactgacgaagctgcatgatgttgatagtagataagggcatgcccaacgcgggcagtcaaatttgttagccccatgcaaaagtatcagtccatgtagacttgagtaatttggggctactattcactcaacccaagctatagtttatggtcctgtgaatcactattttatctgtctgtttctgacaacctacactagttttttcattgtctttatacgtcacaagagtgtgtttgagcttctcaacactggatacagcgagtgcctcaaacttttgtcagatggggaa

SEQ ID NO: 4395 - DNA, 8993 bp, Sorghum bicolor
acctataatcttcttttgcaactcccagttagaatttacatagtgagcaacaacacatatgtaatcctccttagcattaccagaccatatgtcagaagtcaaagcaacagatgatgaagcatgcacacagttcctaatcatagcacgacgttcagcaaataacttatctagatctctagtggtggttcttctagatgatctaacaaatcttggattatgagcacgaacaatgtattcttcaaatgcatcagtgtcaccaaaaccaagaggaagatcaagcctagcaatcaatctacacagttcagttctagcaacagtaggatcatagttccaattatgcaaagccccatcagaactaaaagctagtcgagactgaaccttattttgctgatcaagtttagcaaggcaacctttagcgtgcctaagaatatggccagtaccagcagcagatctaccactcaaaacttttttacaaatcttacagatagctttaacacgcacacgattaccatttatcatctcaaaaacctcatcaaatgtttcccaacacttagaccgtcgcttaccacatgtaccagaggaaggagaaggagtagcattaccatcaccattaccattaacaccagtgctcgtggtgtgggtgttggagtccaccgcatcgacgggatcgacgtcgttcacgggaggctgtgacccgccgccaccggatgcgtcgacaaacacatcaaaggggtcacggccgtcatcgtccctctccggggacaacccagcagcgatgaagtcgtcattccctgtccactcgtcgcacgtcgtcgccaaggggccctcggccgcggacggctgtcctcctcctcctccagcaccattcctcaacggtgcgtggccacgacttggccgcggtgccattgccctagcccgtcgtccgtctacgccaccaaggctagttgacgacgaggcatcggcaacagacctgcaaaaagaacagatttagggttagattagaatgggggaaaagaaaaattacgaagaagacgagatctagggttagatcttacctgcgcaaccggagcccggcgccggagaagacgagattaagaaggacgacgagcgactacggaacggagacggggaggcggactcacatgctcatggacaggatagagaaagaagggagacagatagggagagggaggcagggagcagggaactcagggagagaggcagagagccgacggcgacggcgatgtcaccagatcgtaggacgacggcggcgaagaagtcgagaggaggagccgacctctcggatccgatctgagagagagagtgtgcgaggctgcgcctgcgctgcgactggtgagtggtgactgcgagtgcgagggcgacggccgacgaccgacggtcgatgagcgacggcggcgcggctgcggtggtgagtgaggacgagcgacggcggcgcggctgcggctgcggtggggattagggttagggtttcgggtggggagactgagtgaggcgcgccgcgggggccgcagccgggcggaattttatatggaggggggtcggggtcggggggagtggaagccagggacagggaggcgcgcggcgcgccctactgggctggcggcctggctgctggtgccggccggcctggtgggggagcgggccggtatcgggcctgccattatttggcgggccgggccgtgccggcctgcgggcctgaagtgcggcccaagcacggcctgcacccccgtgccgtgccagcccgggcccaatgaacttcgggccgtgccgtgcttgggccgggccaaagtgacgggctttgggccgtgctaacgggctcgggctgcatgcccaggtatggccgctggcccgctgctgccgttcgcttgtctctctcgctctcgccgcccactccgccaccactcgcaaaccttctcccctcctcgccgcccgcggtcggccccgaacctctagaaccctgaacccatcggggctccgggatggagcccaggagacgagagcgccgggtcatcgccatcgccggtgcggcagcgctcgtcgccgtcggcctcaacatcgccttctccgccgtcaccgcccaccgtcggaggaaacgacgaggtgagcgccgcaaaaccctcggccttcgcgtttgaactcaaagcccatccgatgctctgaaattgagcaaccttgcactgacccgtccagtgttttggttcaatctcgtaccaatgcagcatatagatacagtgattggtgtttgcttaacacggtccgattgctttgcccttcagcgctacatatacttgccccatgaactttgtattcatgcgtctattgtttgaaatgttacaattaatgctaaacgttatctcctaggtatggaattttgaaaagttatccatgtgtgtatttgaattttgagtggttgcagagcttccagggtttactgctcaagtcaacctgtcagcagctgagattaaaaaaatagctgaccgtatcatctccaagtcaaaggaaacatacgattctgtggccgcagtgcccctagataaagtatgtatgcaactctttatgccactgcattttactaattgcactgttttgtggaatgtggcatttacagaaacccatagagggctttgggcttgtgatttggtctatagtattctatagttataatattcagacaaccatgtagttgtagagaagtatacatatgtttgcagcatgctggttcttagaagaatacaatttgcaatgagcatatacagacctaaaatcgggagaattttcttacagttgcatgttgtattttgtaggtcagttttgcaaatgtcgttgtaccattggcagaattagatgcgctgcaatttcctctggttcaagcttgtgttcttcccaggatggtatcaccatctgaggatgttcgcaaggcaagtgctgaagcagagaagctgttggattcccactttgtgctgtgcaggtgcaatgttgccacttatttcttattgttcacttggatgtagtagtaatgtatgttccctaactgatttagtgtaggattaggtaccattgtcaactaacatgaactggtattgtacaaaacaaaactatgcgaatagcttgtagcttggtatcctttcaaaaaaaaagcttgtagcttggtatctgtgttactcttgctcatattatttgcttggcctggtgagcacctgtgacataatctcagtgacccatccatcatgttgttttgtaaaatctatgaagtaatgcatgttctgtaaagtttatgaagtaatgtactaatgtaccatttcttgagaataacaataggatgtgaggttccctttcttctatctcagccaatgcaacgattttctgaacatgtatttcctgcaaggtgaccaggcagcgtgaagatgtttatcgcgtcataaaagcgttcacagtgaaaggcgagagaataggtcctgaagcgacaagatttctccactccttggtacagaattctttcgttacatgtacaattgaatgtgcttagatgtctagatacatagtaaaaacaatgcatctagaaaagccaaaacgtcttataatttggaacggtgagagtacatgtgatgatttggtgtcaatgctttaaccctgaataccattttcctaattgttgtatccttatttattttgagatgagcatacatcatgtcggtataatctggctcctgactggtctcgtaacatgctcatctactgcatcttctcttatgctgacgtgtctttgtgtctgcagcacccattgtcccattcttcttgaacttgaatttctgatttatttgttagcatcaaagctgaaattaaaccatagaattaattgattgtaaagttactgaaagatatgtgatgtgtcttgctattatattatttgcaatttgtatgaaaacgattttgtgaattggtttggctaattagtgtcgatttgctgaattgtctaattatgattaaacaggtgaaagagtttgagcgtaatggagtaaagctatctcaaagcaagagaaaggaaatggagaaattgaaatctcatatggatgcattaaacctgaagtatctacaaaatttgaatgatttcaccaaattccttcttttaggtgaggatgagctagctggaatgccctttgagttcctaaaggtaagctagagagtaagcttgaatcaagcatacttttcagaagtacaataagcaatccttagaaggttcaataatcttttcttactttgtgcttgaacagaagtttgagtgaatgaaaaatatgatattattgctttctaatcctcttttacccaaactcttcaactcaggatctggaaaaggctgatggaaagtttaaggttccgttgaccagttaccatgttactccaattcttgagcactgcaaggtcagctccctgtcttacgctttatcacacaactccacatttcataattatgattaatatacacttggctcttttatgagctttgtccactgatttgacagggatagccagtaatattgtatgttgtgggatacttttttttcttcttattttctttatgctagaaactatgctgttgaccaattgcaatgtatatttatgcaatggagttatgtatgaactggatgtcaactagttgcatcttttcaaggttggctctaccaggaagcagattgctgtcgcttatggacagaaaggtgggaaggataatctagccatcctagaaaatttggtaaccgcaagtgcccatatccactgtaacttcatagcaattggtgttttctatcgctgatttcaccttatctcataacatctgttacatttgattattttgcaagggtttcagtgtaggaaggaaccctggaactgacatgttgcaatttcatcttctatgtttattcaggttcagctaagacacaagtttgctagattactggggtacaccaactatgctgattttgctattgagcccagaatgccaagaacttcaaggaaggtttgtgctttttctgctaggaaatctgcttgtctttctttttagctagatctgcttggtgaaacacgtttttcaatatcaaacttggtaaaaaaaaatcaatcctggtctattcatcttgctggcaaaatattgtttcatgctcctttcacgctaggaaaataacagatgtcaaagtgttttctcctgcaggtcttagagtttttggaagagatgtcagaacaattaagtgatgtagctaatagagagctcagcatactcaaagaccttaaggttttatgaaagctcctttctgctctgctaatttttccatcaattcaaatctttcattactaatcaaattattgctattgattttctgatttcagatcaaggaggaaggaaatgctttgtttggaatggaagatttattgtactacatcaaaagagctgaagaattcaaggttgatcttgacatcggtgaaattaaacaatacttccctgttagcctggtcatatctggaatgttgaagatgtttcaggatctatttggtaaaatgatagccattaactaatgtactagcaacctctatttttataaggtatgagcacagatatatttttctgctaataataattctttttttttcctttcatgaagcactacgattcgatgaaattaaggatgttgaagtttggcatgatacagttcgtgtgttttctgtttgggatgcaagttcaagtgatcttttgggttacttttttcttgatatctttgccaggtttgttctgaaagcatgctagcgaagcttgaatgatttcaaggtttcatgatatgtaaaacatgtttgatgattagatagaaatgctctcgctgccttttctttcaccctgttcatcataattgacaaaaaatatattagggaatccaacatttgcaaggagaaaatagactcaacaaatgcagatgcaagacacattaaggaacacctcataagacaccattccagtacacataaaatacggttatttaatcggctaccctattttgcttcacagggaaggaaagtatacccacacttgtgttgtgacacttcagaatggatgcttgtgttctaatggtgcacgcaaggtaactcgaaagtctcatgcatattatatagtgcaatcagagtacgaatttcttgttagaatcactgtagttcaaatgattaaattaacattctcttgtaaccacaaggttttgtattgaagcaaatttaacgggtgatctaatacaatcaaattgttaaattgttaaaagttcaaaagtacttgttctctcacatactcacgatatttataatctttgggaagtacttctgtagcctgcttgagtggttaattattcatggtgtaattattggatggttgctgtgtgctgacaggttccggctgctgtgatattatctcagtgtccaaaagagcttgatgggaattcagcattactgcggttccctgaagtcgtgaggctattccatgaatttagccatgtggtattgatatcaattttctctattggattctgacaaagtataaatatcctggcatttgttgacactaaatgaatagatttattgatttcattatcctgcaggtccatcacgtatccaacagagccaccttttcaagattttcaggtcttcgactggagggtgactttactgaaattccaagcctgctactcgagaattggtaggcataattattttcattcagtaatgtaccaattaccaacacttttttaatccattggaagctgatgtttctgatatgtaaagcaaccttgtcatctcaggtgctatgagagtatttctctgaaaatgatgtccggcttccatcaggtggtgcaaatttagcatatgatatttatgtgtcggaatttttaccctaccttgcatattttcaacgacaaaaaataaagatgtaagagaaatggtcaataatgtttggccagtctagtagatggaactaatttcatgaataaagcaaaaatatttgtgaccttgcatgggtgaacaatccttggttactgagtaatcaggatatgatctggagaccaacacttctgtttttccatagagtgaacctaatgacaccaaaaacatgttaatgttgtattgcgataattatttgatactttgataagttcttgtgagccttctgagacttgtttaaattagtgctaaattttttctgtttttattattgtaggacattacaaaatccataaccagtgaagcttgccaatctctgaaaagaaggcgtgatttatttactggcctgaaaatgaaacaagagatccttttgtgtgagttattttgctacctgccaaatgaaatagagttagagtattgttcctcaaatgttatctagctctgaaactccaacaaaatataatgacaccagccacctgtatttggctgtcttttcttgtcctcatcacttcattctcttactttagtgaacagtatatataactatatgcccaatcactgttctgctagtagatactggtaacacaaattactctttttttcccacctgttctctgaaacaagttcctactgatacgctgttaatttgtttggcaaaaccaacctaattggtacttgtcaattgtagacagcttgatttgtatcctattgttagctcatgtttattaattagtaagaaatttgaatccaatgtagtaaattatgtattgtttcacttttactaggccttgttgatcagataatacattcaagtgaggatgtggacattgatgacttaatcaaggatcttcatcccaaggtacacttggaatgactgctttactgtctatgttactccctccattccaaattataggtggttttagttttttatgtatctagacatagtgtatatatgggtgcatagcaaaaactatgtacctagaaaaggcaaaacaacttataatttgggatgaagtacttatgatgaccaattaaggcaaatgtcccttttccaggtaatgctgggtatacctttattggaagggaccagtccagcttcatgttttcctcgtattgcttttggctatgatgctgtgtgctacagttacatatggagtgaggtttgatcaatacaaatcctaagccatattgcttccatcatatatttggagagagtagaataacactatctgaactatgcaggtgtttgctgctgatctttttgtatcaaaatttaaagatgacttgctcaatcagcatgctggattgcggttcagaaataaggtaactgctaatgtgtcctccttgcatgctcatttgaattgttacaaaatgcttacatcactgcaggtgttggctctaggaggctcaaaagatcccctggagataataaccgactacctaggaagagaaccatcactccaaccttttattcagagcagaacaagaaatagtttgtgagggatcatttatgatgtaaccattagagttttttctttttcgaatgtagctattgaaggtcagctgattgtcgtgagttctttctttctttttctaataagataggccttgttcagttctgattttttttttggtttttgggtactgtagtatttttgtttttatttgacaaacattgtccaatcatggactaactagactcaaaagattcatctcgcgatttacagtcaaactgtgcaattagtttttgtttttgtctatatttaatgttccatgcatgtgccgcaagatttgaagtgtcacggaatcttgaaaagattttgatttttttgggtgaattaaacaaggcctaagattgacaagtatgatctatgtgccattctgatttcagacatcatttctttgacccttagttaagctggaatacaaaagatgtcccattctgctcggaccatcttttcctaaccttaccatactttcaagctttcagctaatgccta

SEQ ID NO: 4396 - DNA, 9761 bp, Sorghum bicolor
gagatgatatgaatacgaagcggaattggatcaaagatgaattaaaatagtcgtgtaatatttgtcgagagttaacttagtaaagtcttgcactggattctattttgtggatattataccgacacaattaacatttaacagggtatcgacacccacaaataataaggtataagtcaataagtaataatagtttgcaagttatcaattcagaatatgaaacaaacagaccacaaaaataaaatttctcaaactaacaagctttttttaaaatcccaagttcagctagtttttattcttgggagacaaattattgaatatcctatttaaatctgcataaaatacggataaaccatatcctacaatgcatccacacataattgaacttgaattattcatatttatatggatattaaaagttcttttttcacatcctcaaatatggatttggatcaaatcgaagaattatccatgccactttcattcttatttatgagttcccatgcacgtcttcttgatgttatttttgagatgcaacaaaaacgggcgcaatagggtaaaaggatgaaatcaacaattgcataatagtgggttgcagataaaacataaatagtataatccacaactatccaagtgttagttttgtgttctttatcttcttgcacaaatataacgttgcactccaagatttacatgatggtagtgcactacatgaactatcgaaccgtgtaattggttgcattgggttaattttattgatttatgatggtgttcacaaattttttctaaaattagcagcgaataatttatcaattttaaaatatgacaatttagtattttaaaggtgtttgtatgaatatattggacatatgtttctggctaatctatctactagcattaattttgtccatttagtatgtgatctggtgttggtagttcgtaatattggcctcagtcgtaaaagtttctaactccgccactttctagtgcaaggcaagcaaccagataataagactattaaaaatagaattataccaagtaaatagtactcccacaacgggtaggattatcgtatcagactactgaatcaaggcaacccgcttttcaatgagtaaagtaaagagagtcctcattaagatctgactgatctgtgaggctgagctcaaagtttgttcaaggcagaaaggaaggcgcgcagcgaagaaaaattgcgtagcgtagcaagtatttccgatcagcagattctgttttcatgggggcacgcccacacaatctcaaatctgtaccatccattcctaggccttgtttagtttccaataaattttgcaaattttttcagattctccatcacatcgaatctttaaacgcatgcatagagtattaaatataaacgaaaataaaaactaattgcacagtttggtcggaattgacgagacaaactttttaaacctagttagtccatgattggacaatatttatcaaatacaaacgaaagtgctacagtgtcaattttctaaaattttttggaactaaacaaggccctagtagcctcacctagacaccgtaatgctagattcaggagatgtttggttgctagctacagtttgccacgctttatcttaggcaagtttaatcaaattggcaagtgtttgattgacaactaagtttaggcatgattcttttggactacacatgtcatagagttaaaaagtgtggcaagattcctttagacataacaaaatgtggcaatcaatttgctagccacactttttttagtttgccacacttatctaaagttaagttgtggtaaactatgattaacaacaaacatccccttagtgcggtagtgccgagtgggcgaaccgtcgccgtcagcgcgcgccatctcttctcgccacggcgcggcggcatgtggcggggcgtgctgtgctgccgtgctggcgcacgaatggcgctcgcgcaccatataccctgatcccgacacgaaaaagaggaaacccctcagccctcactagattcctagtgggccagcctcgtcgtaggccgatagccagtccagccacacccacacaacacgcggacgccccacttcaccacggcaccaccggccggccaccgggcgccaaaaggaacggaacggcgcagccgcggcggcggcggcggctgtaagctcccgcaccagcgaccggcggacacgtacacggtatatcgatctcccctcgcacagtcccacgcaacccgtcctcggcctcgttccgtccgccagcaatgccgctggcgctcgcgcagctgcaggacctgcgggaccgcatctccgaccacctccgcccatggagccgctccgcgcagttctgggtccgcgccgcggacatctacaccagctataaggtcggctagctagcctctgttccattggtgtgccttctatctgctcgttgatatgcctctgaggcgcggggggttttaattgcgaatcgctttggtcggtccaggtgtgccagctgcgggcggggtttgtgaaggatgaggacgagcgggaggccatgtgggagcagcagcacgagctcggcgcccagaagatgtactccctctgctccgagctcggcggtcttttcctcaaggttggtgcgcttgggttcgcccgccctattctaatttttctttcctcctctctgattttcaaatgccctcactccacccacccaaaaaaaatggtggtgtgacagaagctgcaatccgattgtggtggtaactgtgatcgtgcttgtggtgtggtgctttgtatcatcatgttatgattagtatgctttgtgacactggatcggtggattttgaacaggctgctcaaattctgggaaaacctgacctggcaccgatggcttgggtgaagagacttgtcacgctgtgtgatcaggccccagccacgccatttgttgtggttagagatgttgtggagaaacagtttggaaagaacttcgatgacatattcgaattcttcgatgtcgagcctgttgggtctgcttctattgcacaggttcgtgcttaggtatttctcttcatctgtgtaatctggggagtggggtaacatctgtattttctaccattcctgccaatgttaggcttgtgcaaatgttgttcacttctttgtaacataataacatcatgtacttactgggaatatcacttactttctcactaaattttccaagttatattttggtccatgtttgttaggtgcatcgagcaaggcttaaattatcaaaggcagacgttgctgtcaaggttagtaatatgcttatgtgctttgtaagcagccatttcaaacctcagatttttccgatgtcataatgaattaggaatggaccaggttcaacatccaggagccgagcatttgatgatggttgatattcggaatatgcaagcaatggccttgtttctgcagaagtatgacatcaactttgatctattctctgccaccaaagagatggaaaagcaggtttatcccgcacccccatagctttctgttttgtcgcttgtcccagtaatccaatatacttttctaccctttcctaaaacaccaagaaacatgttgagcctctttctgcatagttaagtggagataatcagtctgctgtgtttcaaattattattgaaccctattgaactgcacaggttggtactatatgcggatcattttatagagttgtacacatcatggaattctgatatctactatcttatatctgattaatcagcaactttcaaatttaggaccactaaaataaggttcaacctttttcttatcctttttttctttaaccatcactatggaaattttaagctcttatcttagagcaaatgtgaaatcttcctcttaacattgttttcgtagtatagtgaatggtaactaatatgtatctttggtgaagcagtaatgcaatgcaaggttaatagaagcttcaaatattagatatatgcatgtgcacaaaagaataaactcagtcattctttcgatatattagctggaagaacaaagaagacaagatttcacattttgaccattagaaacaagaaatggctcctatttgtatctggaccattgttgaccagttacatatttacattagccaaaggaggttagctgttcaaatagattggtcttcataaacatgcacctcctatgtgagaatatctgttgggtttcctttctttgttagtacctctatttcacacgagtgcaaaccttgtgtggtactcccttggttccaaattataagctgctttgacttttttggttcatccattttgctatgtatctggacatattattatagctagactagatgcatagcaaaacggatgtaccaaaaaattcaaagcgacttataatttagaacggagggagtattaaagtattaatatgttttcttcttgatgtttgcttctgaagatatgctatgaatttgactttgtgcgtgaagcaagagcaatggaaagaatacgagaattcctacgtgtcaccaataagaaacctccagttatggtgcctcgtgtgattcctgggatggttagcaggtataattccatagcttctcactgagctaaagtgttcttcaggttatttaattgaatcctagttctctaccatacgttcagttggatggaatggttgtctctagtttgatggtttcaacagagcaattataaatcatccacttacagacttactgatactggaacaagaaatattttttatccacactagattttccctttgcatgatgcttctgtatgcaaagtttttctagtgtgttttcccccatcacgcagtgactttacgtttcctgaccctctaggttgtttatctggatatctagggattaacactatgttgtactggcttgtttggatttttagaactaataaacaaagaaatatttatcactgccatttcacgatatcaagaagtctgctgctgtttttaaatcatacctttctttgttctttcttattccaaatgtaggaaactttatttttatactgtatgctgttagatagaacaagcacttaactttgatttgatgtaatggcttaatttttactgagcctgctatctcctgtgtttctttgcataagcaacatgtgaagtttttatctattaaatgttctttttttgtttatatgttttgttagagaggttttggtaatggaattcatcaaagggaccccaataatgaatcttggcaatgaaatggctaaaaggggcatcgatcctggtggtaagattgcagcaatggcaaagcagtaagccccttcatctcaaaagagtatgattctcatttgcttagtttacagaaccttatactagttctaagattctgtggttggactgatgggtcaatgctattcaatgaatatgataaaatttcatgccactcagtttagtcatgattggcagacctcgaaaagcaattagttttttttatcaaaaacgcaggagagctgtgtacctttatattaaatctaagaagaaaaacagaaggggggcaagagcccttagacgacccccacccccacccacccatccacccacccacacacacacacacacaaataatgttataactcgtagttgacaaagataagaccgaccctgactaaagcctagaaacctgcactattctccatcctgcacaagagcaaggaggtgggaaatacccctagccctggccagactccaattgaacagctcctccttagcgagcaaaaatgctgcagccatgtttagggaagccccatcaaacacacaccgattgtggtgtttccaaattatccaagctccgaggacgatgatagaattgagaccttttctgacaggacgggacaatccaccctggattcagccattgccaccattcatcaaagcatacatcttctttttgagggggagagaccttgtaaaccgagtctttgcagcaggagaaaccagtctcgtgcaaaaatgccagaacaagcaggtgattgattgtttcatcagtttgatcacaaagtggactacgggcaggatgtgggaggccccatgcgagagactatcagctgccagcacctgttatgagccaccagccacatagaaaacttgcattttcctggagcctaggatttccaaatcctctcccagggtctaaagaggacagcaccatgaaacattccattgttatgcagtttggcagagtagttgcctgaattcgagaaacaccaaatgtgggtgtttttcacctttgggctgaaacaccacctcacaaagcatgccccagagacgaataaattctgtaatgacttcaacagttagagctccagcaatatcagattttttggcactaaagagaacaattgaggtgcaaggtcagtaggggcctcaaacccctcctgttccttcaaaaaaaaaataattgaggtgcaaggtcagcaatacattgtccgtggatgcacctgtgagttgaaaacagtgtggaggcagcaccattacaccaacttctgagaccattgccatggagaagaaagcctgggcggagccatgaattcgaacaagtaaggctaaccaaggacgatgggggtctgtttcttgcaaacataaccacctaatcctgagtgctcatccaaggttttgttggttggagatgcccatgacgcccagctcaggggggtgacgtactttagtccaagtcaccagagaccagacaatgcccgcttctgtgtctttggtctttacgtcctctccaaagaaagccccgcctgatctgaccaatggcttttagggctcatgctggaagctcaatggccattgccgagtagacttgcattgagttgaggacaaatcggaccaagatacgttgaccagcatgtgttaacaggtccgccttccatcctggaagccaatctgctctcttatcaataatgggttggatttgagcttaggtcagtttctctagagagtgaaactccaagatatatacaggaaagtctagcacttaactgacatggcatcaggtcctgtatctgtgtgatgtcctcggtgcaatggataggtagcacattgctcttgtgaaagtttgttttcagacctgatacctcacgaaaaagctgtaagatatcaaaccaatgcccctaacaaagggtctgaataattagaaacattccttcttttttttttgtaaattcagtttttcttttgtagtcattttttcaattgctttaaattctaatgattaggttatctcaaaagtaccccttttctgttgtaggaagattttgtcagatcttactcttgcatatggtcaaatgatcttgaaggatggctttttccatgcagatccacacccaggaaacatccttatctgtaaggacacagaggtaagagatcttttaaacccttcaatctccctttacagggcaatggcagcttccagttaaatgttctttgtgatttttcttaggtggctttacttgattatggacaagtgaaagaaatgccagaagatttgcggcttgcttatgcaaatcttgtagttgcaatggctgatgatgatttcttgagggctgaggaaagtttcaggtatcctgaattgcacaccatgcattatttgtctaaacggccgttgagggcatttagacactacactgtggcacaccgtttccatttaatcacccatttatcccatttaaatggcagttttgcctgaattatggctaaaaggtaggtggccgactgtcttgcgtttagcaaaacactaacgccgtgctatgtgtatgttctactttgtacacacttggagtttttgcaaatcagtaaacggaaatattttatgtcgtttctgtaacaaagcagtctgagctagcaaactaatgaagatatggcatattggttcctgttcaaaatgaaaatatgggtgctgattcttattgaagcgtcttgctgatatattagtatattacctattttgctcatggaatataaaatatttcagggagctcggtatccgaacatgggccataactgataacaagctagaagaattgtttcaattatccctgcgaatgtttgatacaagattaccaccaggtgtaactgttatgtcaccttttgccgatgattcttcgcttaataaaattggagtggaggtatgatcacatcttcaagattcaaacaggaaaacaaataacctatatgtttttcttagtcagtcctatattcgtgtacatccatttatttgcattatctacgcacataggcgatctatctatgtattattgtgtagtttgacttcctaaactgcttccttaaatgacatattctattcgtttcctatgtgaagagcttcccggaagagttattttcagtgcttcgaacaattcagcttttgcgagggttgactgtaggcatgggccttacattctcgtgcgctcagcattggagaccaatcgctgaggaagtattgttaaaggctggaagacaaaatggtaaatgtgttttaatctgcatgatttgtttgtaaggtgcattctgatagagagatggagtgatggactaatttgaacttatgtcatgttgatgcagcttcaaaatcaagaaatcaaaagagaagttttctcaggagacttttttggtgaagtagggatagggaccatcaaagaatatggtatacgaacaattctatgatgaaatggaagtagccataaatctcaagccttcgattcttatattcacagtacatctgttcactttttttttgagaggcatctgttcacattcatttacattgggtgcgtgtttatttgactcaacgatgttgctcattcctttatcaaaatgtattatttggattttagtatatttacatagtcgaaaatcagaccagtcttattggatgtagcacttcagatttgcaggccaaaaatctcggcccattatcaaacgtgcaaacctacggaaccatcctccaggagatcaatgcaaggagacggagcttcacaagagcagatttcgtctttgaagtgtgaagatcgaatgttgacgctcatctagtcgctagaagctctataaatttattgataggtagacatgcttggtttttggagcctcctgatggagtttgtaatccttatcctgctgattgaataaagtcagagctcccctaaaaaaaggaaaaaaaaaacatgtacacattcatgctcaaaatactccaaatatcgtgtggggacaaacacaatactccatccgttcttttaatttgtcacattgaacattgatctttacttggtcaaacctgtccaacgtttccacaaaaactcgacgcaaacatcttgtttgacgatcagaccgatgaacgtgagttttgcctatttgattcacaaattaacattttataacccgttgcttcttctctactaaagagaagaagcaactctaattaaagcctgtcatctttctgcgcaaggcgttcaatctgccttgcatctctgcttatcaatggaggatcatttcagttccatggataaagaacatcagtttccattcctctatagaacgcattacatcagtttcccatgacaaaaaggatcatgagggaaaaaaaaaacgatgaagatacagcaagaaatcgaaacctcctcatgctgttaggttggttaacaggcctacacaatctgtcaagcaactcaaccaagcactctgtgactgtgatggccttattatacaagtgtgttca

SEQ ID NO: 4397 - DNA, 3116 bp, Sorghum bicolor
gttcaacatatgcatttaagagaaccggaccgtcctgtatttagtactagatcacccattttttcagattgcacaaaattctcaatttgattatgaacagacaacaactaaaaaaataaacttaagacaaacgttcagttttcaaatgaatttatatgagaaaaaaaagagtatcctggtccattagatacgaatacaaggaacgtacatttacatgcatggatgtcaaacatagttttcgttttatatagatgatttcaaatgaaaatgttgtcaaatacaaagttgcataactttttgagatcaacaacttttgttttgattgctactaccaagatccttaaatatcactaccactcatttatgactatagaacatatggctttagttggtgataacttttatgaaatcttgcgaatcatatagaggacattgtaaccacttaaaaaaacaagttatgaactataaagttgtataattttttgagatctataacttttcttttggacacttctccatccgagatccttaactaccgtcgcacgctcacttatgactatggagcataaggactcttttgatattaactttacagattttttgactttctaattaactaaataagtaattaagagttaaaaaatatggtaagatagctattgaccatcttgatggtgattgttggatcatgcatcgtttgctggtatgaaaagctatgactaaaaatattgtttgttgatttattgtaagagaaaaatattgttggctgatagaaaaaatacgacttataagagaagtgaaacaggctcggcctagccgattactagtgtgtatatatatatgtgtacaacaagacaaacaagtaatagagcgcgatgctctagagttcttcaacactgtaaaaccaaccgtggctctttagccatggctgcccgaaaaggtgattggagcatgcggatgctttttgcatgtcctgttagaatattattattaggatgtcatcacatcatggcgactagcggtgtccatctctactgaggagagatcgatgcggtgcaggctgagacgcaagtatatattctcacatgctaagtggcaacctgtgagccgattgtcgatttgcttggtaactacaggctgatatccgtacttgacttggattgaattcactgctgcaaacataggtgtagggcgctatctatgtacaaatgaattttcgttactacacttcttatgtttcacgcctaccacccggcccaccgtccgcgctgaatgcttaaattagctatttcctgcttaggatattcttattaggaaaaattattaaatgcgtacgaaccctacaaaaagttgtagttaaaacggagcaggggcctcgagcaagggctacaattacacaagccgcaactcaattttctgtgtatacaatggacataaaattatttataatgaagttataaatgctcacatagtactagcaggctgcggctctctctcttttttttggtcgagctaggtcgcttaaaagggcccgtagccagtagccacccgtacgtgtagcaatcggcctgttgttcctgaaactaaataattttttttttatttcccgagatgatccaccttttttcttttttttttcttttttttttgctttgagtggcttatcaccttggccaaactctccttcgctaagttcttttattttcttataagtactttgttttgaaaaccccttaggcggcagagtctcgccggcagtttttggagaaaaaagaataaaaaattatcgaattttggccaatatagtccaaatacttctagatgacgctaaaaagcgcaagaaagttgcataaacaaagcagttgctgacagctatctttctccctcatgagtcgtgatcagattattcctcactccactcatgctgtcatgcttcttctcgctcgtacgttaattataaaagcccacccagccctagcatatccagcacacaattctcacacacattcaccagatcacaaccgcttcgaagcacaggcacaaaacaccaagcatcaccaatggctcactaccaggaggtggactactgctcggaggaggtgaagtcggtggccgccggcggccctgccggctttggtcgccatcatggcggccacggcggcgtccagcagcacgtcgtcaaggagaagttcgaggaggtcgacagcgtctcacgcgccggcggcggccgccacggccacttcgaggcccgcgagtccaagttcgaggaggacgtcaacacccgcaccggcgagttccacgagcgcaaggagaacttcgtcgtcaaggccgacaactgaccagcttcttcgcgcgggctcgatcgacgcacgtatcatgatctgaacgacctggactggactctgaggcacgtacgtatatgtgtatgtacgtacacgtacgtacgtacgtgtcttctccatatacgtatgtatgacgactgtatatgtgtgtactcacttcgcgagcgtgcgtgcatgtactctgtacgcatgcagccctgtacgaacgacgtaaaaataagctcgtgatctgaataaagcaggttctccgtgctgtaaaaagctgtgttgcgccaacatgacatggagtgatgaacatgcgatttgtgatgtggatctcgcggaccatcgtctatatgatgtgcatgttttattatgcttacaataatatatatccaaggacgaccattgttaaaaactctgaaattcatggccttgccaagtaaaaagaacacgaatccgggtcaatattgctttttgattcgctaaattctacaggatgggatatacattaagtccctgtttggatacaaagtattttcagagttttaaaaaattaccatgactctatgaaatactttggttttaaagtgccatgaagtgtttaggtgcaataaattttatgttttaaatactatatgtattgctgagagaccatagtctttttggagtttcaaaaactccactctaaacctctatgaaacactaattactataattacaaatatgctatagtattcaaattcttttcttttcgcgaattaaatgaggccttagacccagcccttccgtcca

SEQ ID NO: 4398 - DNA, 3044 bp, Sorghum bicolor
gtgtttaccgtcctccgaaatttatgcctactagcgtggatgatgaagagaagcgtcgtaaaaaagattcaaggagagataaagcattagcccgagtggcaatagaaaatccttatattaaagaaataattgacgatgctgcggacagacctgaagaggtttgcttaacttctgatctgaatttattagcaggctctcttggatacagagtaaactgtgtgctgtttattttcatgctaaataatctttctggaatttacagtggaaggaaacagtgggcgatgaaagcagggaatttgggaggtacatgcgacagagagaggagcaagagaagcaggaagaggagttgttcactcgggctcctgtaaccaaacgtgataagcagatcgagaagcgcataaggagacaacttcatgggtatgtatatggtttatcttttgctgctgcttgtttcctgtgtaaatacacaatcaactttgtcagctacaagtactattccgcccttggttttcccttaggattttcagcttgtcttgataaaaaaaaagattttcagcttgtcttaatatccaacttacgcccccaactgatatctgattctggcaacaggctaggaggcttaacggatggtttcgaccttggaatgaacatgctaattggcggagacaaggaagatgatggcggttcaagcaaatcgcatggcaagagtggacatcgaaagaagcacctgaagagcagtaagaggaagaggcattagccttgacccacactgatgtagcacttcaacatgccatcaagcctagaagatggttcaagcaaaagccaattgaaagttgaagctggagaaaataccaggagactaagtagaaaaggcttttggttcctcaaaatggaagattattatttctgaaacagaacttgatctgagtgactgagcctgagctattggaacagtatgaatttatatgtcttgaaagtggtaggtgtagcaaattttgttcatcgtagtctcgtagagtatcccagatgatcgacttattgttgcaaattgtttcccacagtctgctttttgtttgtgttttgcaagcttgtggatgccacggctgaatttcaacctagatgggtgcatgcactgcaaacccttcagcagattcctgatgaaaacaacggtaggttcgttaggaatggctgcctgaaaggagatgggagcaccggagcagcccgctgctttgcatctgagcatctctcttctttgaatcaaaggatgtcatcactcatgagtcatgagttgtggttcttctgtccgtctccatctcaattctcttctctatagtgaatgaagagatgaaatggcggtgcaggctgagacgcaagtatctattccccactccactggctaagtgcctaacttaactgataagtatattcttcttacctgaccggtgacaggtgacattgtaccaggagaggatctgaaatgaacaaattggcactctgaagatgagtaattactctcgggcctggtattcgtttccctctatttttccactggaatttaactcactgctgtacaaccaagcagctctagaacatataaaagctccagtatgatcataatatctactctcattcagaattgtaagacatagggagtactttttcttcttatttttccattggcagttccatgctcatctagattagctaattttatcctcaaagtacatcgttgttagagaaccacaattaaacctcatcaaaacaagataaaagaaatgctgttaaaaaggcctctagccacccaactatgtgtaataatcggtcgccgtttcaagattacagtccaaatacatctagatcaatgctaaaaagcgaagtaagcaagcacacaatacaggtatctttctccctcatcaagttgaggatgatgagcaaattattcctcactccacttgtgtgcttccacgttataaaagcgcacccgacgaacgttaccatgcattcatcacaccaacaatccacacaagcagttgaacgcactgcgcacaggcactagaacaaacaccaagcatcaccattcaccaatggcctacttccaggaggtggactactgctcggaggaggtgaggtcggtggccccggccggcggcttcggccgctacggcggcggcgtccagcagcacgtcgtcaaggagaaattcgaggaggtcgacacggtgtcacgcgccggcggccaccaccacggccacggtcaccacggccacggcgtcgtggtgcgcgagaccagggtcgaggaggacttcaacacctgcaccggcgagttccacgagcgcaaggagagcttcctcgccagggctaactgagccgccggccgcacgaccgtaccatgcgcgcccccgttcgtgccttatgtatgtatgtgcgtataagattgtgcagggtcatcgtacttggctggcgtgcacgcactcagcttctgtaagaattacgacaataagctcgtgacctgaataaagcttctccgtaccacctacattaccatgcacattctctctgtgcccccaaaaagatacaatttcaaaatagtactaagtcaaaggatcataagtttaaccaaatttatataaaaatatgctaatatttattatactaaataaatattgataatatacctattcagagttatacatattgataatatcaatctatttaaacttaagatagtttgactttaataatggtaaaacaagaaaattgtaaaccaattgaggatttgttaagaaaaaatataagaaaatggaacaaaatatgaaggataggaaattaaaattaaagggagaaaaataagacccatgatcgttctcctatctgtgtgaggggcgcacctggttccacgccacaacacccctacaaaaatcggaccagctcgggacagaccaacgaatgcttgcccggccggatgactctgtttggacaagcacgctttggttgccttagagcaaggttaatagcaacggcgaccaccggctgcaagcgggctgtat

SEQ ID NO: 4399 - DNA, 6563 bp, Sorghum bicolor
cgcgcggcgacgacagctggcgttctccctccacggctccacccgcaagccaccaccgcggcaggacggcatccagcacctcccccactccggcccccattgacagctcgactcagctcgtcccctcgccgcaccgccggctcgccccgacgccccctgcccgtatccctgctgcctcctcccagcgcgaaggagccgaccagtggcggagccaggattttttttggagccttggcgagacgcaccctaatactaacgacctttggtagagcttcagcttctcacatggagtagcttcttttggtggggctgaagctgttttgcaaaatatttagcaaaaacaacctcaatattgtaataatttgtgttagaattgtgaagaggaaccgaaagaaaccacatctatgtggctccggctcctctatagaaatagctccaacttctctatacttatacaaggagttgtttattagatgcctatttaatcggagttcttgcaaggagccacgagaagctggaaccaaagcctttgccaacaaggatctaatgtaatgtagagcattgtatataaaagtaaaattagagaacaataataattttaagctaattcatctctctagtataagttcctagctagaaggtggtgtagttggtccatctcgcttgcacatttaaaaaaaaaacacatgaattatgaataaaaaatacaaaaggagatggcatttgctctgctattgtataaataataaagctggaagaaaggcttaagtaatatcttctaattctaacactacttttctcggtcgtttctttgggagcttcaaacatataggagtaaaaaacctgtataaagttgacctgttcacctccgagcccgaccactggcccagggtggccgggccttggctccgccagtggagccgaccaccggcggcggcgccccttctgcagcaaccctctggccgtctggcgtccgtgtccggccgaccgaccctccccctcggcggcttcaagcaaggtgagcagaacacctaggtccattgtttagtgtatgagtttgaactttgaagattttttttttccaatttttgattgtactcttaattcttgtaatgtattcttaattctgtcaagtgaaagatgaggatatcatcaatctcttccaacaagggaaccagagagttacgttatactagtagactttactattttgatcattagagacaacagcactatgtttagaacttgtactttggttattattatggatttgtcatggccattataacttatggtctattatattccatatgtgctttgaaattttttacatgtggcatacccagctgcaaattcctggatagccggaaatttgtaaccagcagctcagcttgcagatccggaaattttgtatacaagtataataacagaatgaaatttaatgaaattattacagcgaatcaaaattgcattcgattcctgccatcaatatgatgaattcaacagattttttttcgattttttttaaaacaatttcctttcgactaaaaccaaattgtcaggttttggttttgacacagtatgctttgtcgatgaaggccttgtttagttccaaaaatttttgcaaaacaggcactgtagcaatttcgtttgtatttgacaaatattgtccaattatagactaactaagctcaaaagattcgtctcgtcaattccgtccaaactatgcaattagtttttattttcgtctatatttaatactccatgtatgcgtctaaagattcgatgtgacggaaaatctaaaaaaatttataaaattttttgggaactaaacaaggccgaaatatgtcttggcagggcatttatttggtagtgcagctgctgctgtctagtacctgtgagaagcagttgcagcgcttataagggcttccaagcttttgccggtaaaaccattgcacaagttacccgactgccattcgcgacccccgccgctcgccagaatgacgcctcgggtgctcctctcccgcctgcgcctcacccctctcctccacgacggccaccacctgagacgccctttctccgccgctgctgccaaactacctgacgagttgcctcctggcgcgccgccgccgacctccgactccaggctcttcgtcgccggtaccactctgctctcccgcatccgtgtctgtctcccatatgatcctcgattgcatcatagctctcactgtactacgtttctgtttactgattgcgggtgcagggttgtcgtggtccgtggatgagcgctccctcacggacgccttctcctccttcggcaccgtcactgaaggtaagaaacagattcgcgcactggaacctcactgttactaggaacttattaggaatgcccaatttcatcgtgttaaataacctctgcgcgttggggtttttttttggggggtttcggttggaggtcagatggtgcacgggataggtgttcgaccaaatgccgtggagaccgtgagccactccatggcgcccaggcctgcagcctgctcaatgaaattcctgtttgggacgtggtcacctgctcagcagcaatctatcggcatgcaaggagcgggtcgttccatgagtcatctgagctgtttgtcagcatgatgagggcaggtgtgtgcccaaactcgttcaccttggtcggtgtgttgcttgcggcagctggtctgggtgatgttgtgcttgccgagtgcattcatgggtgggctataaagagtcagttggaatccaatcattttgttgcaaccgcactggtggatgcatatgcaaaatgtgggcaccccatgaacgcattggcatttttcagcggtttgagggatcctaatgtagtttcctggaatgcaatgatctccgggttagtgcacaatgttttgtttgaggaagcagtattggcattcaagaggttgtgttgttgttttgggtcagttcctaataatgctgtgaccatgattaatatcgctcaagcgtatgctggttgtggtgaacttgaaatgtgcaagagtgtacatgcttatgcagttaagatgggctttgatttggatgtctcggtgacaaactcaatacttggcatgtacttgagttttggggatattgagattggaagagagattttcaggaaaattattcttaggaatgtggttacttggacaatgatgatgggtttccttcttgagcaggctcatgctggtgaagttataaatatctttgttcagatgaggtcaaatggcatagttcctgacaggatagcaatggtcagtttggtgcaagcttgtgcacttctgggtgatgcaaggagaggaaaaatggttcataaccaaatgatcacacgtgggtttagtagtgagcttcctgcagttaattcattaatcactatgtattccaaatgcaaggatttaagttcagctagagtgttgtttgatggcatgaggaacaaaagcttagtttcatggactgcaatggtttcaggatatataggaagtggaagagccctagaggggatgcatctatttggtaagatgaggcatgaagatacttttgtgattgattctgtgacattagtcagcttattgactggatgctatgagactgctaagtttgttctatgtgttcaacttcatgggtatagctacaagtcaggtttgtatctgtatagacctgtccctaataccctcatggcagtttatggtaagtgtggatatgccattttagctcataaagtatttgatgacatgatttctcgagatgttgtctcgtggaataccctgatattatcctatggtataaatggccaaggagagcaagcagtagcactttttaataaaatggaggaatctagtgaagagcgagacagtgtaacatacttgaacacaatgctggcatgcagccattctggacaagttgatgatgggttgatcatattcaggagaatgattaatgagaagcacgtaaatccatgccaagaacacattggatgcctagtagatatgttggcaagagctggtcgcttggatgaagcagcagaagtggctagcttgactagcaatgagggagcaaatccttggaaggctttgatgggaggaggtcacctgcatagtcacacagaattaactgaagttgctgctgagaaggtgctgaacgcggactcatttgataatggccatgtggtgttactttctaacgcttgtgcatctgctgggaagtatagtgatgctgaatctatccgatcctgttattcgaaacaaacacaaaagaagattctagggcttagttccattgaggttatgctatccagctcaagatagccactatacttcttgcaatggaagggaaaagatacatgagacaattaccatacactgtctgtctgtctcaaagtattggagatctgttttaggcatgaaagatggagttttactttgcatacagccaagtcccatgtaattaaaagagaaacatcaagaatgaggcttcaaatagcacattagatgcaatggaaaattgcattggtctttatattgtgatagactaagagtttttttcatcttgattctagtatggttgaatcaggagacttacgtcatgtgagtatggtgtttatctgatgcaattctgacccaatagaaaacttgttgactacaccgtcagttcaattacatctgttgttttgtgtttccttagtacttttgccttggagtattaaccatctctgatctgtatcaatatcctcctcactatatctactctttgaatacaatcatttgttgattgtgaacatgaagcctatggtccatgcttctttgcaaagagttggcgcaaagcctgagataatctgaagtacttgacttttgaaaaatatattatggtgcatctcatccaagtgacaatgtaacattttacttgaaggtagtgcctaggaaattgcaaaaagataagattaattttacttgaaatgttctatgaaattcgtgcctcatttgtgcagccctagatcatgtttattgtttctgccatgtcttgcatcttatttgtctgtccctatttatcaggcacttaaaagtttaagtttgtatgtttgttcatgaaactaattgtgtgatcacaccccttgttttaaagtttttcacactaacatcgtgtatgttgctgtgctattagcttactaccaacaaaaccatagttaacaatgttgacgctaaaatagcaacagttaagaaatgttatggttgtattatcccacgggtagctatcatgtcatggttacatgtagcacatgcattctggctatcatttcccttcatccgtggtatgtgattataggttaacctagtcaggggtttactcttccatatcatggcagtgttcatatacttgaaaaccaataggtcaagtatttttgcgtttacctggtattgagctagtgagataagaaataactttttatgctttgtcctatttgcccccatgaatttttaccaactttgcatttataaggtttaaatatttagttgtaaaaggaccttttgctttgcagttagaataatgtatgacaaaaactctggaaggtcaagaggctttggatttgttcatttctcaaatgatcatgaagctaagtgtgccaaggatgctatggatgggaaggtacagccttattgtttcgtaagcatgttagttattgcagttagaaatgaagcattgacctatattaattctacaggtaatgctagggcggccattgcgaataagttttgctcttggaaaagtccgtggcgcatcagttattgttcctcgactttctacggtgagaaaaaaatagcaatgacatgttcgttcacatcattaccggaaatagaagcacgcctactattgataagttggtctttagaaatattgcttctactcaccttttgtcatctgcatatataaaatctttctaaaagtcaaattaaatctgtggaaattgtaaaaattgattgtttaattatattggctcttgcctcttgttctttatagaccgaaaaaagttgatctgcttgtattggccctacactcctacagaagctttagaagctagtttgagagtgattgatgctaggagtgttagcaactagttggtaatgccgcagtgagacaggctacggttatatttagaagaaaaaaaagtaaccgtttgaaaaactactgagtagtcaacaagctgcttgctgtttcatattctctcagaatttattttcattttttatttcttttcgagagagatatacttgcattttgtattcaggtatgtgataatgtgaactgtgataggctacccatactgtgtgtactcacctaataaaaatattaagattgaaatctgatataatttggcaatttacttctttagatgttcacagtatcgggtcatatgttccacagctgactactttgctcaattacttcctgtaactgtccagttatgattagttgtatgaagtatgaaccctggtctgaagtaccaattcaatatacaacaaatctaatactat

SEQ ID NO: 4400 - DNA, 5612 bp, Sorghum bicolor
atttgacacaaatactcagggacggagccaacgctcgggcagggcgggctcgagcccccccctaccgctggcgtgtacatagagctccccgaagcccctcaagaaaatttcacgtatttatatatataataggaagggctgacatattttgggctaatttatatgatctattatcttctaaattcataattttgaggtccatatatatttgattaatcaattttatctatttctctagattgctattttggacaaataatgtgtgtcaacatcaggtgccgtttattagcttcgtaaatcgtagttggacctttaggtatgagtgaactgtatcttttattttttcatgatatattttataaattttatcattaatcaatgtttccaatataagagttttaagctatgatatatttgtctattgttgtggtcatagtagagctaagtcgtcgtaagatttttgttcagcccctcctaaacttttttctggcttcgtccttgcatatacttacaactctatgaatgtagagcatgtataggtcagacctacgagatcttgatgttgaccaagtcgtcataagagcatctctaagagaacacgataatttgttccaaaaaacactgatgtttccaaagaagtattgaaagaaataaataagatcatctttaacagattttaataattcaatcgtaaaatatagaagacaattttacatcctataacatttctaaaattttccaaccacttttatatatctttctctcttatacattttaatgaggaactcttttctactctttatttttttccataccctttcacctttagattgggagaccgatactcacggatctttgcatgcgttgggtgatttttttttttgaagtggcaaaagattaggaggtggtattggaaactcttggagatgagtttttttctattgttgccaaaaatcctagattaggatgttttattggaaactcttgcacagaaaaggtaattaggtgtaaacatatggacataagttgaaggtggaggctcgactttaattcaaaaacactactaccttagtttaaattataagacatattttattttgttgcaaaaatggacaattgctctattaatatattttgacaaaaaatgtcattatattgctattttaaaatacctacttaagattgtacttttatatcatagataagtagttttcaatggagtaattattaatatcgaaacattgccatatcaaaatgaaatgtgccttgtcaaactgagtcatccattcagaaaataataggcgtatttgaccacagaaaaataatacaaaacagattttgacctgtaaaagtttttgtaacaattaaactactgcatccttgaatttttactaagatgccgctaatgttcaaataaatcaaaccacatttactttgggtggtagcaaaaacaagcacgtatttctaaatttccgacccgaacctgctcgtttgtcttataagccgtactttttctaacaaccaataatatcttctgcatgactttttaaacaagcggaaaaaagacaccaacatcatcgaacagaaggggctgaaaacttcattcagccataaataataaataaaaactatcacagcacacaaacagatcgcagcggttcccatccaatgggctccttgttctatcctggaattaaaaactggaaaccattaaaaattgtttagtttttggctagtatacgatctaacccagactaccaagcatcctttgtccccttgtgggcttgcctccctccccaatttaatgattggttcatctctcaatttcatgagccaaacaaccatcccctgcttggggaccatcaccttcatctccttcctccttaaacaatttccaggatcagaaaacaaaacactagcaaattgtatttagtcttttgggtttatacagcacagataaaaggcagcagcagagcagcagtgcatctcccctttttcccttctccacctcccgcaagcaaactcccggcaccgccccgcacccacttctctttctctccagtgccgctccctctagcttcttcctcccccctttcatggcaggaaaggctgaggtgatgatgcccataagccatccaatttgacccatgctaccctggacctctatacatacttgccccagcgcaggcactcgcaatctctactaccacttctctaccaccctctctcctccctgcttctgcttctgcttttgcctcagcctgctgcaagcttttgctttggtttaggtgcttcttttccactcctttactgttcccccacttttgcttgctttgtcacgcacacgaaaagctcctgcctttaccttctcggaccttatctccgcccccgtagtgggatttggtgggagctgcgctgcttgcccctcgcgtttctttgctcaattggggtcacagcgcgtgctcgtggacggaattcgggttcttgcgcggtccccgtcccccttggcgattgcgggacgctcgctgcagatctttgcgtaattccgggagcgccggagatgaactgtgggccgcccgaccagctgccgccggcgtcggcgccggcgtgcttcctcaacctcaactgggaccagtccatggccgccgccacggccggcgaccacctcgacccggcgctcagctcgatggtctcctccccggcgtccaactcgacggccgccgcggcgactgacggcctcgctctccacgggatctcgccacagccgcagtacggaggcacccctctcagctcgccccccaagctcaacctctccatgatgggccagttccaccactacccgccgccgcaggtcggtggcgctgcgcccagcggcctgccaatcctcgagaacttgatgccgatggctcatctagaccagttcctcgccgacccaggcttcgccgagcgcgcggcgaggctctccggctttgacggccgccccggtggaagtggctatggcggcgccgtcccgggacagtttggcctcccggacgctgaccccatcgacgcattgaaggagctggagctcgggaacggccgggacgagtcatcggtgtccgatccggcgtccgccagcgcggagatggcgctcaaggggccttccgatggcaatgcaaagaaacgcaaggctagcggaaaggggaaaggcaaggacggccccgggtccaccgccgccaaggatctcgcgaaggtacgtgcacaattgcgttgctttggttccccgattcccccacgcagttcaggtttggggcaaaagatttcattctgggggcgttttacaggaggaatccggtgggaagcggtgcaaatcggcggacgagagcaatggcgcggaggacaactccaccaagggcaaggccgcgcagagcaatagcgagaatggtggaaagaagcaggggaaggacagcacatcgaagcctcccgagccgcccaaggactacatccatgtccgggcgaggcgcggtgaggcgacagacagccacagcctcgcggagagggtacggttccttgaggctcaattgcattgttctttctgctatcatccttgctggctgtagatttgtgtgttgagtttttctcgcttcttgtgaacaattcaggtgagaagggaaaagatcagccagcggatgaagctgctgcaggatcttgttccgggttgcaataaggtactcactcagcggatgaaactgcatcaggcacttgctgtcactcgagtagtttggtgtgctcagatttgaatttgggaaatgtttctcgtttcaggtggttggcaaggcagtcatgctcgatgaaatcataaactacgtgcagtccttgcaacggcaagtcgaggtatatttccactgtcaattcacagctggaatgactctgaaactgcagtttttttgccgttttagaatggaacaagggtcgatgtgctctatctgaaccctttcccttcacatcgattttgcagtttctgtccatgaaattggccactgtgaatccccagctggacttcaacaacctgcctaacctccttcctaaagatgtgaggacacgcatatatgatcgttcacattactatgtttggttcctggtattgagggaatggagcatttcaccctgtctcatattccaattctgtttgtaatcagatacaccagtcctgtggcccgctgcagaactcgcatttcccgctggagacctcaggtgcaccgctgccataccttaaccagcctcaccaggggaaccctctaggttgcagcctaaccggcatggacagccagagttctatgcacccacttgacccggcattttgccggccaatgaattcgcaacatcctttcctcaacggtgttagtgatgctgcatctcaggtaatgcaaccactgtcctggctcttaagcttagatcatattcgtatgcagtgacactgaggatgaaacgtggatatgtcacaggtcgggactttctggcaagacgaccttcaaagcgtagttcacatggatatcgggcaaagtcaggagatcgctcccacctcttcgaatagctacaacggtatgaaaaaaatcagcgtcctatcggctgatagcttagttgacaaacatcgctatatattgagctctgacatcgaattaccactcaccaggttcactgcaaacagtccacatgaaaatggagctttgacatagacgaaattcagtccaaagctcgacgcccctgtatatacagaagagagcacagcttgcagcggaagcactctgagattcaacctaacaacgttgggccctagcagtgttttagcttctaattttccccctggtgtaatgattctttgaacaagatgtgaagatcaccacgctggcggttggtcgcctgttttagctgcaagatcgcccgcaaggaatgaaatgcggtgcattgcatcccagtatattctcaatcagacccttatgctcccctcaagcgagagggaagaagacctgtaatatcatttgtattgccattatatttgtagctgatatatatatttaagatccctattcctgtcattcctgatctccttgaagatgaaatccccgttcctgaatggatcatagactctttttaattctgatacctgcatcttgccaatggcatagaattgttctagctgttgctctgttgagctcaggaaccaggatttttttcttggttctagaataaattcagccaagaagctggatcgtgtaaaaaggacatggacagaaggaacaagcaacttgtgctgggagtggatttgtgggtgctttttagctgtatgataagtacccggagaaagggacagcactaggccaggggctagtagctgaggacccttttgattttgtttttcttttttttttcagcagagatgctactatgccaggcgtgcatcaggcatcagcattcagtgcgatgaatgctacgctgtttctgctcgtctatagctactttgatttattttttttaaaaaaagagagagagaaaaagatccctctctttagtcgttaagtagttaagaattggagctaccaatccacttcagtgaagtccaaatcatccaggct

SEQ ID NO: 4401 - DNA, 5993 bp, Sorghum bicolor
tctccatgcaccaggggatgttagctgcttcgctagttagcttaagggtgtttggttggtagtttaataagtcctgtagtattttggtcttattgagcaattaattagtatataattatgaactaattaggtttaaaagattcgtgtcgcaaattactctctagctacgttttcgtaaatagtttatatttagtacctcatgtatgtgtttaaatattcgatgtgacgggagttaaactttactgagagcaaccaaacgaggccttgaagcaactccaaccgaaaatgcaaggatttagcctagctaacagggtctggttattagtctttccattctgtattataagatattttggtttttctagatgcatacatgtttatgtacttattagatatatactctacctagtacatacttcatctgtctcaaattataagtcatttcaaaaaatttggaaagtcaaattatctaaaatttgactaaatttatatgataattaagataataatatttaggccttgtttaattttgcaaaatttttcagattccccgtcacatcgaatctttagacgtatacatggagtattaaatatagataaaaataaaaattaattatacagtttggtcggaattgacgagacgaatcttttgaatctagttagtccataattggacaatatttgtcaaatacaaacgaaagtgctactattcctattttgcaaaaatttttggaactaaacaaggccttattgagccaactggaatatttattcgaccaaaattagaatagagggagtacataataaaagtaatatgtctagaaaactaaaatatcttataatttaaaatataggaatatttttaaaactcatctcgccttttattgataggcctgacgaatattgtcgatcggatcatcagatcatttacaaaactagagagggcttaccccaatcttaagatgatctgagtcccaagccaatcccaactggaccaactcatgagcacaaaaaattacatacacgaggtcaaaaagaaatttgaccatggaccaaaacaaaaggcatgaaaatagacgcaactccttaaataggacaccacctgaagcaaggtcgaagtctgacgattttagatgaccagtgacaaaaactcagctttcacatacacatgtaaccccctcggcctttgctgcttttaagcctacaagacaagcttctgcctcttcgcatacgtgctgatgatagatttaagtcatactttattaataaatcaagtcatgataaaaaaaatgatattgtaaagaaaaattgaataaaataagtggtcaaacttaggccctgtttggcacagtttaatttcaccagtaaagctatttttttagaaaatagttttatgagcactttctagataaaagctgaactatttttaaaaaaagtgtttggtaaaatagcttcaccaactacttcttgcatagacgagagagaaatgaaggagagagccgcaataaactatttttttcagcttcatcgcaactcatgtctttgtgagagaagaagaaaaacaacattactcatgaagctattttagaaacaagtgtttggcaacaaaaacagctcacaacagctttataagctgttgtgagctataccaaataggctcttagcattaagaaaagatcaaacgtttatgatttgtgatggattgaatagtttttttatagaaaaacacaatattgttttcgtttattaaagaagatctggaagagaggacgataaacgggccagcgaaaatatgagacgaactgggccgttttctttcttctcctaacatcggaagcctttgccaactgggctcaattatagtgcttcagccgctgagctgggccaagagatattttcctttcccattcaacccctttcgcaagtcaatcccatcccactgtgtccgtgtcgatccacaactcctctcattccccatacaagggactagagagccagcacgccacgtccccaccgccccccaccgctccggtcgtccccaaatctaagcgagacggggcgcagggagaggagagcctaaaaccctaacccccccgaatcggatcccgccgccggagcgccgaacccccgtccctcggcccgccatggagatgggagggatgagtgatgcggagcggctgttcttcttcgagatggcctgcaagaactccgaggccgtgtacgagcagaaccccaacgacgccgacgtacgacccatctcgagctctcctctcctctccccgttcgttttcccgccgcttggatcaaaccctgtacgatgtgatccggttgtgtgttccttgtgtgcgcgcagaacctgacgcgatggggcggcgcgctgctggagctgtcgcaggtgcgggccggccccgacggcctcaagctccttgaaggtattgcttcctcagattagacggttcttcttgtttttgtttgggtgatttgatgcactacttgtagttttttttaggatttgttcgtgaagtgccggctaatgatattaggatctcaatgagtgctttacaaattcataaatccatagttcaatccgcgtcgtcatatgttaggcccttatggcggtagcgttgatccctcttaagtcttagcctttgccgattgattcactgtgttgctggcccagacatttaggaaatttgttggctcagctgctattatgctcagattgattcactgtgttgctgcgctggtgctgtttcaattaacaaggatggcttttgtttgcttgttttttagtcctttccttttctgtatcaaatgttttacgcttgtttcagtgctcttttgtcatagtcatcagtgtcatgggtattcgctaaaaaaaatctgatagcatattgaagctgttactggaatttgtttgtgttgggtgtggtgcatcctttctaccagaatccgtggcattttttgaagaatcagcagtcagttgttactaacaattcaggtggcttatattgctgatgtatcatctggggactggtttattgcttcccagtttctttcttcaaagtgctattttgattgctcacttgttatccatatttagtcatatgcgagatgcaggttttcatacttcatgaatgcctgttgtgttgtgctgtgactataggatttcatgaatgcagattctcgtatttcaaagtgttgtatgtttaaattttattagtattcagagttcaagtataggatttcattgtactgtgactgtgagtacatctaggtttctgccactttgtagctgttaatgaacagtgaaagtggtactaattgagtgagtgttgttgttacagatgcggaagccaagctggaggaggcactgcaaattgatcccaacaagtctgatgcactctggtgcttgggaaatgctcagacctctcatggattcttcactccagacactgcaatagctaatgagttctttgcaaaggcaaccgggtgtttccagaaggctgttgatctggtatgtgtagtccgctattgtgttagctaaattcgaacacatttacattgttccttttatctaggctgacccatagtcacaaagttccttttatctaggctgacccatagtcactgttttttctttttccatgcggggatgagattgtttttgtttctgttttcctgggacgaggaacatggcatagtaccatgttcctggtgatcctggctgacctgcagacctgttcacgtggggcttgagccacatgcagtcaggttgtcatgcaagcatctggaagaatatcaataaaagaactttgatattgtctttttctttcaaaaaacttccatttctgctgcaatgtcgggtgcaatttggtttgactgtaaactaaagttcagacctgctatttgtaggaacctgcaaatgagctgtacaggaagtctttagacttgtcaacgaaggtgggttcttttctcctttctgttctgtagtattttcatgtactgattcctggagcctctgtgctacagaggctaaattaagcttattttcttattaatactgggtttgagattccaataatcagtggtgctgtttgagcttgtcactatttagtttttatatttgttacaacttgcaatgctaaaaatcgattttgacatcttcaacaatcaatcttttacagtatgttcaatcatgctgttataagtggttagcgataatgcatgtgtatcattctagtgacatttgcttccaattatctcaggcacctgaactgcatttggagatccagaggcaaatggtttctcaagcagcgacacaagcatcctcagcctcaaatccaagggtactctaccttatcttgttcctagaaatcttgttcctagaaactacttaaacgtttgtcagtgtggtctcagtaaagtttcatgttgtttaatatctaccattttttgtattttctacccttttatttattactactattggaggctcatgaagtggtttagtatgtagtttatcccaaatttgttgagcatgaatggcctttttggtccagctgatttattaagcattccttaacattggttgcctggttggtaattcagtatgttccatattttcagacattaatgaagacgcttgctagttttgtatgaacaaaatgcattgtggactgttctatgaccacagttagcatgataatgagatctttcatgagtagtctgttccttgatgatttttttgtttatacactgttctcattacaagtaagaacatttaagtggcatttctactgtatactgttatatctggaatatttgtgcccctgttttctatagtatagaaaatttctgtttgatttgtgcactataactggaatgtggcagagctaaaccagtttttggcattttgtggtttgctgatttcatatgatatatgtggtttggtgcatgccttagcctatgttttctaccctattgaaactgacaacattatgctttgcagcaatcaaggaagaagaagaaggatagtgacttctggtacgatgtttttggatgggtgatccttggcgctggcatttttgcttgggttggattggcaagatcaatgcctccaccgccaccaccggccaggtgaactgagtcggctgtcaagaatgctttgcaaatgatggcacgcctatgttaaggtgcctcagatatgaatcttgctaggtgatagttttgtatggagaggagagaatgatgtttccatacggtttggtcaaattttcatgcttgttccttctgagagcctcgaggaggtttcttttataagcagcataggctgctggataattttgtacttgtttaccttgataccgtttcgaggctaaaaccattatgttgcgacatttagttttgttggttatgatactggatgttctcgaatggcaccatgcataaagtggcatcaccacgaataaatgtatgtgtttgtgttttgacatactgcgactgcgaatcctacgagctatagcaatagaaccagcctccaaattatgagattgtagtgctaagtatttgttctcgcttttgtagaagggctcgccctgtccaaaacaatatgacacttaggctatttgtcatctattttgggaggcagtacttcacagcatagttaagttcacaggctaggcttactgttatgacacttggcgttgccatcgcagtctcttgattaaactgcaagtatgtgtaagtacgacttgttctcagatttaagatactactactactacttaacacgttagtttcacacagacagctgcgtagattttcttctttttaaaaaacaaataaaaaaagtttaaccgagaccaaggttgttttctgaaatgacagagcatactgtacgtctgtactgcctttttcccgttattggtcgaatcctgttgagattcgagatccaggatctgactgtttaccagccgcgactgaccacatga

SEQ ID NO: 4402 - DNA, 6411 bp, Sorghum bicolor
gttttagttccatgaaagccaattcgtcagttccacgtattctaagtgttgaagttgtacttttatcgttaaaaagctaaaaaaaaatatgtgcagtacatgccgaggcgaatctcagaaaatgctatcatatttgcaaggcgtggtaccattgttttccatatcttgccactgttcccgacacttcctttatatatactgcgcatcaaactctgtgagaccatgactaaagaaaaaaccacatgtttaaacctcaaaaatcaaaccattgtgcaacaaagaaggagggctagaactagaaaagaagccggcatatagtagggccatgcatttcaggatgtgcacttttgggagtgcagggagcaatattgggtgtcatgatggtgctctggttgtgatttgtgaacatgaccatgtcagctgggatgaggcagcatagcatagcactagtcacagctgcaacacagcacaaaacacaaacagggggaaaaggaagaaggcagcaggaaaggctgccccggcggcccctgcgcctgcctaacctcctccctcttccccccttttcccttgctgcatccatctctttcccaacttttgtattgtactttttccctgccctccacccgcctacaaaaggtggagggaggaggagcctctgcacttaagttagtccttctcatcatctcctctccgggtctctgttaacgagtattttattttattttatttttaagaggagtggtgcctggtggtagtagctctcctcatctttgcccatttgctggtgcacaactaatctgcagtgactgagcttccttgcttgcttgcaattgaaacccagccctggaagaaaccaatcctcaacctcaaggaggcaacagggggcaaaggctactcctaataatcctataggctgctgagctgaggaagcaaagcaaaggaaaaggcagtagctagcagctagcagcaaccaccaaagatgggggaaggggaatccttcctgccctcttgatggattgatgatgttctttgctgcattggtttcaggctctctctctctctctccgtccgtcctccgcttgcttcttgttcgagagtggtagctgcttcttctccttcccttttttatctgtctctctgaatcttttgcttgctgtctgattccttctccttcccacctaccctccctccccaaccacacatcacacacgcacacacacacacacacagtgtattgttactgccattggtaaatataaaaggagggagcagtggaggtggaggtggaggtggaggtgaggtgcccccagctcgcctctcggcaattattgccacctttggagtttggagtcctccaataggagtctcctccctccgtcgtcctcttcctgtgctgtctgcaaccactgccctcctcttccttcccttcacccctcgccttttcttggaccggggttggtgcttgcttccatccatccgtgtcctccgctcgctttaaagcttaagccaccgctcgctgcagctgcccccggccgcctggcctagcagcagctcactgtgctgtactgctgtgagagagcacccacgacgcacgaccacgagcacgagcccagccctcgcctcgtccccttcctttgttcttggattcttaattgcatgctgttgctgctgtgatctccgtcccgtcctccaaagcttttgcttgcttgcaatcaactttgcttttggggtctctctctgtctactctccccggcctctttccgtcctagcgagcagttgtctgtctccgacgacctgcttctgcgcaggcagcagcagagcagaaaggccccctcccaaaatccaccatttggagcagccagccgccgccagcgacgacggtgccttcctggtcgagttgagtcccaaggagagagctgctactacgtgctactcccaggcagcaaggatcccgagaacaagcaataacgtacacgctcgttgggacaagcctgtcgccatggattgggacgccaagatgcttcctgcctgggacctcggcacggtggtcgggcccagcagcagcggaggcgtaggcgtaggcggtggcggcgcgctggacctgaagctgggcgcgccgacgagctcgagggtggtggccacggccgccgcggccgtcggtgccgcgcccacgctgccgtcagcgaaccatccgcctccgccggcaccggcaccggcaccggcgccgtcgtcgtccgcgccggcgaagcggccgcggccggggcacgcgcagcaggcggtgccggcgtgctccgtgcagggctgcgacgccgacctgtcccgctgccgcgactaccaccgccgccacaaggtctgcgaggcgcactccaagacgcccgtcgtcaccgtcgccggccagcagcagcgcttctgccagcagtgcagcaggtacgcatgtctgccctcgtcccctcctgtcgtgtcgtgccgtgccgcgtacggacggacgcctctccgtccgcccgcccatgcatcttgttctttcgactttggattccattcccttcctcccgttgtccccccgaccccgagctcatgattctcttttggttctttccgcttcaataatttaaccactgctacgacgagctctgctctagatacaactacaacaacaacagctcgtctcgtcggccatggatgcatgttttcttcttggaagcattcgtttcgttctcgtccgcgtgggggtgaatttcatcgagaattaccgccacgtccaacagtactaaccaacattagagactaggccctgcttgcttaggcgaccaagaactcgctgtcagctgctgcagctcctcctgtcgctttaactaatttagacgtcctgattaacctttggcgcttgcaactgacgaacgtgcggtgcgccggcagctaagacttcgtgcatccatctgtttgttcggtcaaacgtacaaaggaatctgctttgctataaacactgcaagtcgccgaccaaagatccaatttttatgcaaaagttggaacggaactcttgcaggaactgggatttggacggccaaacttacggtggtagcagtagatatatactcgatagaaacgtgcgattaacctagtctgggcactcgccatctggtcctgaatttgtcaaggactgaactgaacatcttgtgagctgtgtgtgacaccagcgaagccggctgctagcagcggctgcatgcgcacccgtgctttcagggcgtgtccctacaatacaacaaggcaggtgcaatggaactggactttcattcaggacttgtttagttcgcaaaaattttcaagatttcctgtcacatcgaatctttggtcgcaagcatgaagcattaaatataaacgaaaataaaaactaactgcacagtttacctgagatgaatcttttgagcctagttactccgtgattgaataatgtttgtcaaataaaaacaaaatgctacagtagccaaaaaacaaaaatttttgcgaactaaacaagcctcagttcaggtccagcctgcctcccgtccttgtcactggcagcaggctcactccactcatcactcacccgggtccttctccagctctgttctccgatgtgtgtgcgtgcatgtctgtgtgtgtgcgcgtccctgtcgtcgactcgtcgttgtgctgcgtggcttgcccatgccttccatattccatatgttttttccaactcagaggcctcaatcaaatgcatctcgtgttctagaagacgaggatctgatgagttcccaggtaggagtagctgcctttccttgtcttttttgtcctcactcatgttccagattcaccagtcaggtttcaaaatatccgagacacagagagcgtgccgtgaaggttgcgtggtttaatttagtttcagaagggaaaaaaagtcttcttgaggtcaacaggggtgtgttccaagtgtttgcttgaattagagtggctgatgccatgaggttgaccagactggcatgcaacagcgttttctttaggaatctacttgttgttttagaaactctgaaattctgaatggaaccaagcatggcggctaccgcattgtgctcgtgcaaagtccttacagaccgctggtggaattgcttcttcctgcaggtttcatctgctcggggagttcgatgaggtgaagaggagctgcaggaagcgccttgatgggcacaaccgccgccgccggaagccacagccggaccctctcaaccctgccggcttgtttggcaatcaccatggtaaattcacttctcctttgttgttagggagaacgcatgtcataccaaatactcctagatatgaacatacatgcatgagaacttagagatgacaacacttgtagagcgatggaaggaaagcagaggtttttttttataacagttctatgtttattttagttacgtgtgtttagatttggatcattatctggcacaactgggagcacaaacttataactaatattgttttctgaactgaagctcagcttatcagacctacggaatcagtatcttgcatctgattgatcatgtgctgatctgagtcctcacctgtcagtcgactggcagcattgtctgcaatgcaaccaaacatttcacacgttgcaggtgctgccatccaatgtgtagtttttctttccagaaaggaggccaaaaggaacttgtctaccatcagtcctgcactatcatgatgaatgtaaccgtagttcagtcagccctggatctggatggtcgcttccatgaaatcatagtcataattgatcaggaaaatttctctgaagctgcttgcttgtgtagtttgaactgctgtgggcctattaggtatctgaaaccagctaatggcgtcataaagcaggctgattgcatttctgcacacacgaattcctcggaaccttcatactttgtcaaagtcataatgcgaaatgaactgataatatcactaagaaatgacatttgaaattgccccatcaactaacctgtactttgtccgtgcagttttgatgcattgcctcattgttgatgtggccaaacatctgacttgtgtttattttcccatgttgtccaggagtgacaaggttcacatcgtacccgcagctcttcaccacatccatggcagagcccaaatggtcggtggttaagacggagaccgacgtgttccaagaccagtactacccggccgtccacctcgatggtgccggcgccggttccctcttccacggcaaggaccggaagcacttcccgttcctgaccaaccacaacaatggcggcggtgacgtggccgccgcggccctgggctgccaacccttcaccatcaccacgacggcttcctcagagagcagcagcaagcagagcaacggcaactgtgctctctctcttctgtcagacaacccgacaccagcacagacggccatgatcccaaccgcgcagcccctcggcccggcgatgcagtacggcaggctccctggcagcggcggcggcagcggcgacgtctccctcaccgggatgtcgtacatgagggtggcagacagcaggcaggcatccatgctgacaacttcgtcacccagtcacactgcagttgcttcccctggtccggctactgcagctgcaacacagcaccagctgcagtaccaccatggctactaccatgtgagcggtggcgagcagggcaacaacccagatggtgctgccattcaggcccttcccttctcatcgtggtagacgagttctgatgaatcatgtgctaggcaggcagtcgctcttgttcaccaaacatattggttgtaatagtaggctcgatcatactgaaatccatgacaagttgtccatttcaacttatcctgataggtctaatttatggaaattcttccctaagttattatgattcagaatcgtgtaaaaattccactttcaatagcccacaaggttgaacttgtgcatgattttggatgcaattctgtttgtttcggttggagtctatcggttggccatccgcttgctcattaggtactcttaatggtgtctataacatccaccatcagccagctataagccaaccatgtcagatcttgtgctacagtggaagggagaagaggtaaagagagacaaaaggtgtcgaaagcattttcaatataagtgcatgtctcgtatattaagaagttagaagtcaatcaattcaagtttaattaaatatataaaaataattcaaatttaatcaaatatataaaaaatttactcgcacgggttggaacttctccgttttctgaaaaacactagtactcacaacaccaaataagcatcattagataatctcactatatatattcatattaaacctatttaaatgtacaaaagtttatattttctacatctagtcaaacttaagat

SEQ ID NO: 4403 - DNA, 2797 bp, Sorghum bicolor
atgtgagcacacatgtatgattttggtgaggttaccactatagtcaccagcgaaaacaaagactgaaccatagcaataaataatgtagtattgaacaaattggcctcagatataaaatgctccttggttgaccttgatcttggagcataagaaacaaagtttcagtacctcaacacaagctcatggtcatcaatttttggtaacacagttgatatgcaaataagatatcatcattggcaattcgatagcaccaaagttcaattaaccgcacaaaagtgtaagagaagaaacaacacatcattgcaaagtgccataggtctcagtgcttattacgggggtgattggttgccccagaaattcaccaatgctacttatcagtacatattagaggatgcaagcaaaagttcaggcatcacaagataaacaaggcgcggctgccacactcaaaggtgctcctccagcgcctaaagttacattcacatgatcaaccataggcactttgctcaatttgtaataaatcaaagcatcatcatgtgcaagtgcaagagcagaccaccacatgttgactgaatgtaaaacatatgaaatcacaagttgactggtagatctacacaagcaccgcacagatctgaatgtaaaacatgtgaaatcacaagttgactggtagatctacacaagcaccgcacagatctaaacgggtaacatcaagaacccttgctccaaaccgcaaacaaaatcaccgcacacatcaaagctcatatacggggagaggggagggggaggagggggagggagaggtgacttgtatactgacgcgatctagggaggaccgccaacggtccgccggagatcgacgacgatgatggcggagggaggccgagaaggaggaagaagattcaccgcaccggaagaggagaggaaggagaggcgccaaatgagggaggtaaccctagcgcccaccccgcgcgcgcgctggaacgctccaatctcccgtgctcgcacctccccttcccgccaaggagcgcaccgtccaggatggcgagggaagctcgactcgagaagacggcctcagccgggacagagggggaaaagagaatgagaagatacaccaaaacgatacaagttgaggaaccaaacacgggctaggtacacagagtcataccggatgggcactagtatgccaccatcggggcaaccaatcacccactatttttctacattatccatttcttgttgccgggccataccatttgtatgcagtcagaagattcggcttcggaagcagcaggtcattgctccaacctgcagcgtcctctgtttctgtctttgtgaacaagcattactcgtaccatttctctggcttctccggtatcgatcgattgggcgtccagtacctgatgcaaacataacaagcaaggtgatccttgtggttacgtgttattgtctgattctctcggatctacaaatagcttgcatctgcacgattgcattgcgttcctcagactgaaggagactactgtctcaagtcagccgggcagcatctcattctcatctcatctgttaaagcagtagtaaatcgcaagcaagcaaaacaggggaaaaggccagctaaaacgcgttgcctttgaggctttaaccctttgtttttcttgctaaccttgctggccattgctgcttttaaatttggccggaaccctcgtcgcaaaggagaacacctcaccaatctggagtgctctttaatcagagcttcagactgtaaagcaaaagccccctatatgctgcctgcagccttcctttgcacacgcagggcgtcgatcgcaaaggagaacctcttgcttgcttcgtgcacacgcagggcatgcattccttccttccttacctagccatttccctaccttgtacataacactacatacaatgctaagcaacctcactacatattgatgcccttgtacatcgatcgttctagctaacttggtgcagctgcagctgcgtccgtcatgaactacgcgggcatgaactacgcctacgcggacagaggaggcatgaacgccgcgggcagaagcagcatgtcgtcgccacggccgggcacggactggggccccatcatcgtggcggtgatcctcttcgtggtgctctcgccgggcctgctgttccagctcccctcgcggacgcgggtcgtcgagttcggcaacatggccaccagcgccatcgccatcctcgtccacgccgtcatcttcttctgcctcctcaccatcttcgtcgtcgccatcggcatccacgtctacgccgcctagctagagccctgctagcagcctccaaacattatggtggtgtgcgcttctcgtacgtgcagcctcttcttgctggtcttttcagtatatgtagactagagatggagcaagatttagctgctcgatctcatctcctatgtttgtgtattattgcccggctgttggacagagcgttggcttggcaatccggtgttagtgaaatttcgcttactttccgtggaaattgaaagagtgtttctcaggtgttgcgcgcgtgcatggtagctattactgtcactgaatccatgtgtttccagcagttaacatcaatataacccacgagctgtctagttatttcagagcagagtaggattttcctaaatgccaggtcatatatattgattgattgaaccagcatataggtttgttcgcttaagtttatcggtcgaatctaccagccattcaacagtatttttttctcacaacaaattagccaacagtactttctatcatggctttgttct

SEQ ID NO: 4404 - DNA, 6773 bp, Sorghum bicolor
gagcacaataggcagttagtagcatggaatcttaagttttgtcaaacttaagatgcattcaaagtgttttggtaacataaattttgtcattagatgatataagcttaagatgatatcattagattattgaaagacacaaataggtataactacatttatgatatcagtatacctaattgatatcataattttgtatattttttataattttaatcaaacttaagatgctttgacttaaaaagttagagtatcttataatttggaaccgcattcgctctcttcctcgctcccccgctcgagctgagagacgagataggccggtttttgtttatttactactgctttgttggttcccacgcactgccaacaacagcccaacacccggtgatgacgcaacacaaacacaacagggcccggtcggagttcgaggcaggaaaacaaggatgcagatgcagtacacgacagtgatgtacgtaaatgctatagatcagtgggtatttaacttccattcggcatataaaaaaactagaacacatggatctagagagaaagaagagagagagaggtacagaccatcggagggtttggcggtggtgaaggccatgtcatcggtggcatggggtgttggtgaagttcggtaggcggcgcttcccgttgctggtggtgcctcggtagggttagttggtgggatgtgtggtgtcgatcaacagtgaatctctcgtggcgtgtgcctatagcccccactcttacttatgacactatgcgacgagatttaggtcttgtttagttcactctaaaatccaaaaaaatttcaagatttttcgtcacatcgaatcttgcgaatcttgcggcatatacatgaaatattaaatatagtcaaaaacaaaaactaattgcacagtttgtctgtaaatcgcgagacgaatcttttgatcctagttagtttatgattggacaatatttgtcaaataaaaacgaaagtgctacagtacacagtttggctgtaaatcgcgagacgaatcttttgatcctagttagtttatgattggacaatatttgtcaaataaaaacgaaagtgctgcattagcgaaattcgaaattttttccaaactaaacaaggccttatcaaccttgttggattagacgtctcctatcaaagcacatatcagggaccgagtcgaccgttgggcctgactcggagatcaacccaacaatctctacacatcatacgtacggacgttttattggggtccagcagccagcatgcatcaatgcccatgcatgtacgtgttctggttctgctgcccatgcatgtacagcaacacctgctgcctgtcctaggctcgtgcgttgccgaggcgccacgtgaggtacacatactacagtggtggcacgcatgaacaggacgaggtcacaactatgtttagtttaatttttttttacaaaatagacactataacactttcgtttatatttgacaaatattatccaatcataaactaactagactcaaaagattcgtctcgcaaacgcaaattacagataaactgagcatttaattatttcttttatctatatttaatgcttcatgtatgtgttgtaagattcgatgtgacagagaatctgaaaaattttgcaattttttttgaactaaagaaggcctatatgtacaaaatttaacgggttaaagtttagtccctgatctaaaactctaagtcttcgttgcctcattcaccatcagcatttccgttgtcatttgatccacgatccatccatttcagcctgactcatcgtcggtatttgactcgggcccactcgagtgagtgcatgatgggctgggctttctgataggcaagtaagcctactgtattgggctgcatgcggtagctagcccaggcccacctatcctttcccgcgcacacacgacctgggttacatcatgtacgtccatatctcatcggtcggctggcatcagcccgcagcactcgccaatgcggtcactgcaagcccactcgccgccgcccgcgccgcaaaaccagccccccaaaccctataccccgcctcctctcctctcctccccgattgccggctcagcttcctcttccctgtcgacggcgaggactacccttcgcgctccctcgctcaggcctcgctaggcgatcacaggcggcagggagacccgctcgcgccgacgagcccagcggcggcgcggtaattaagcaggagaggaaccggcggcccgagcggcggggtccaaaatgagcgacgacgtgatatggcactgcatccgccacaaccactgcagcttcatggccaagtaagtagccttctttttcttctcggctcttgtctcgatttcggtttcttgtgcgactgtttccgatgatgaatctcatctgacggcggccccgtgggtgggttgggttgtgcaggatcacgacagggatattctgccgcaacccctacaacgcgacgggtatctgcaaccggagctcctgtccgcttgccaacagtcgctatgctactatccgggatcatgacggtgatcactgcaatgcgatgcttcccctttttgtgttaattaataatgatgttgtccatggatagcgataccaccgttttcaatcagctgtcgaacatgttatttagctcccttttgcctccaaggtcacccaaacactcaactcagtatgcaataacagacatggcatagcaactagcaaaccaatcaaattcaaagcctctttagttttagcaaaccaatcaaatttggatgctgtacttttccttctattattagattgaaaaaaaaacattaagttagctttgtagctgttctttctggagacgagatgaatgatctttttcatggaattcgttagttgtgactctggttgtgattaatcacaatttaagaagactgctttgatggagttaagaatactagagtactgcaagtttgctttttctttctgtgagaacaaattatgctgggatgtggtgctatttggattcaatgacacacaaactatgaggagttgcaacataatttttgtccaaaatggtgcagattttgatcttttggttaacaaaacctgccagttccctatgcaccttgtttttcatgctgtggactattaattttgagggcagtatatgcttatcggtcaccaaaatatttttttctgatgctgtcacgttatttttcctccccaaatggttatgcaggtgttttctatctgtacatgaaaactgctgaaagagctcatctgccaaacaaattatgggagagagtcaaactgccaaagaattacgagaaagcaatggatgtcataaacaagcatcttgtatgcatctctagctaacgtatactgtcactccataaaatttatagtatttggtctaatttcttggcttttttgtcatgaaggaattttggcctaagttacttgtgcacaagatcaaacaacggctgacaaaaatgactcagtatcgtataagaatgaggaaacttcaactgaaagtgaggtgggaacttctattttctattttaaaaacatttttctattttaagtacacagttataggacatagtttaaggataacataataattaattcatgtctgattctgttcagttggtatcaccgtgttctttatattgattactaaaaaaattatagacaagaagatagatccatatgcacatttttaatcaatttcttttaactttaggaaagcctttgaatttcaggatggaaacaatattcatttaatacattaaaaaaatattcatttaagcatagcaaagaaaaatattccaatgtggaagtagttaatgtgtaggtcacaaatttacattacagatcatgaaggagaggtctattgcatgagaaatgccttgtgcatagtttgtacagttctgttgattgttgaaacaatagcaataacctacagtaggattttgtgtttggttttccaggttttaggtttctgtgattgtttgaatgttaaaatctctattctgttttggattcgcattcgtgtagggctgtaggctgcatcaaccaaattttgtgttacgggcttgtttggttaaatgaagattagaccaaatcctttatgataggcagggtgtttagtgtccttatcggccaaatgattgaacctagttcatgcctaccaaaactaacactaagtgtaattattggaattctgaattaagatgagttttataatgcgaaattccaaatctttatcatggccagtaatttagattattaaagtggctgtcttgaggtgtattcggttctgatccttgctctgcttttagatagattgctctttgctctgatgtgccatttgtctgtagctaattttcatcaggaaatgagtcatcttgtgatgcatttttaactttgttgtaacatgatgagttgtttgacatatgcctccattcttttagggagaaggtcatgacaatgcccaggaaacaaacacagcgtgatctccggagattagacaaagctgaaagggctgctcaactagaaaaggtttttttcttatgtactttctcttttatcattttctttgtccattgtcacacagtaacatatacttgttaccttgcagaatattgaaaatgaattgaaggaacgcctgactaaaggtgtttatggtgacatctacaattatcccttcaaagcgtttgatgttgttcttgatatggaaaaaggtgaagtggctcctgaagaagaggaggaagaagtaagcattgtacttggtacctgcaggcacggtttatttctatgttctttgtgttcaccagctttgacatgtgttcacttgataaaacaggaaggcgagatagaatatgtcgaaggtgatgatatggaagagatggatgatatggaagatatggaagacttcgaaggcctcagtgacggtaaagatgttttgctgaaaccttccatgtcatgtcttatggaccttgaatacttcattataaactgtcttgggctcttggtctgctagaatgtgcaaggtgcagcacttgcatgtaaaggattatagtgctggactgttactgtagttttcttttttttaaaaaaagtgtaaattggttgcaggaggcacagatgaagatgatgttttggatgatccagtatcaaagaaacccaagggatcatcttcttcgaagcaaaacgccgggaaaaggtctaggaaggttatgactgaggtaagtattgcaagataccaatttaatcagtattttcttagttttttttttattctcttgcttctctcattcgtgtagttgccccgatagttacctactctgcccaaatgcctatcaggccatcagaaaattcgattgtttacttagcagtctttcacatatctatgttagtagtaaaatgaattgcttgtaggatactgcccaatattcttgattacaacactgttcaaaaattcacggatggaatcatctgtgatgaaatttgttgaaagcaagctgttgttattgaattgcctttgtttgaggaaccaagtcaatgttgtcaaagttggtttggattagctgagttcttggttataaggggttgtttggttgggtttgttaaagtttaataggtactgtagcatttccgttttatttggcaattaatatccaatcatggactaattaggctcaaaagattcatctcgcaaattattctctaactgtgtttttagtttcgtaaatagtccatatttagtacttcatgcatgtgtgcaaacattcgatgtaatgggcggtaaactttatcgcactaaacatttgttgtccatctgtgacaggtggaacaagacgaagagataaatacgaggcagaggcgaagggcatgaatgtgaaatctgcaaatgtaactccagttctatggtgttagatgctggtagccacttttgttgtatgttagatcattctacttgccttcatcatactgtaacgtggagaattcatctgtggtccctgttgagaagttggcgaataatttgtcgtggtttacatcattatacattgctatatgttacgaggaaaaaaacggattctagcttagttgaggatgtgggagaccatctagttcccgaggcgaatttaggtatctattttgtaactcattcattggtcaagttttgtttttgttatgcggaaaaccaaagtcctgcgtttacgaacacatttacacattggtatcgaagcaacctgatgcaaaatatctgaattttgtgacgtcttttgtattcccaaagtttggaagacttgaagatttggcttatgctaagctaaccgttgtgactgcgagatatatatagcaatataaaagcattgccatcgcagggaaaaaagttctcccgcgactcccgtgcatcatgcatctaataatattccttcaaataaaatctccaattatataaaagaagtctaaatcttaaaactagaattactgataatataataccgcagcaaattgatgcctaatgccttcggccccacactctaatcagaacagaaaaacataaacaaatcaaatctgcatgccagtactctactactttgtatggttaacacttagggcctgtttggcatggctccagagccgaactccaccccagagtcaagtggagctagccaaacaccccaactctagaaaatgctggagcagcccaactccatggagtttttgagctctagtacaaatttttggagtacctcttctcctactccgaaa

SEQ ID NO: 4405 - DNA, 6003 bp, Sorghum bicolor
attgttagttgacatcctatatatatcctgtttttcccaactcattgatgacttcatggctcaatgggtcttctcttccatcttgcttccaaatatggtgatcacaatgaacactgtggcccctttcaaatgtaaaaatattttatgttttctccgtgaaaataaactcattctcatgatatttcaaattcgtgcgtttgaaatggaacctataggatctgagctcatggtagcacgcaaagaagaacgaagatcttataatctccgtattttttttgcatggaaccatatgtacccggacttggcaatttataaataactagccagatgagacatataaataataaaaaataaatattgtaattcagggttatgagttgtgagagaggagtttctaagaaatcgtactagactagctatttaggagtaagagtcgttagctatttgatttctctccttgttagccaatataattctttctatactagtccctccgtcacacagtgtattctaaaaattttaagacaacttaagagaatcctcaaatgacgtcggtacctataaattaatgtcaattaaggtgtttctccttaaattatagttttcttttaataaaccttttcaaatctatgcattgacacctatagaatatactatttcagtataatatttttaaaaatcataatgctctatatttaggacgaagagagtagctatttaggaaccattaggccagtctcaatgcatagtttcatgacacagttaccaagactataaactagataaccgagccacaagagtttcatggggatgaaactcctctctcatctgatgaaactccttcatttaatgaccctgccaagtcagcaattttgcttatgtggcaccctatttaatgtgcatgacacttccatgaaacatacattaagactgatcttagaaacacccttttaactccagccatcattattatgcgggccaaagccaactgattccacttcaaaagttgctcagctgtggacatgcagaagaaaggggcatcagtttctcttttgacctgacaatggcttttgtcgttccataaaccaaacaacaactaaaccattacaggtgcagctgaaccactaaccaaacaacaccttcttaagttagcacaccgcagtttgttctgtcacagctctcaagttagcatctgggaatccaacaaaaccctcccgagctttgttcacccacttgcaccaaaatctcctgcgtgcctgccagcaaggatttgggccttgtttagttccaaaatttttagcaaaatgagcaccgtaacacttttgtttgtatttaataaatattgtctaatcatggactaactaagctcaaaagatccgtctcataaattatagaaaaactatgtaattagttattgttttatttatatttaatgttctatgtatgtgccgtaagattcagccgtactttttgtgccaaccggtagtgtttttatttcacaataaatcagtcaacaatattttcagccttaacttttcggaccagcgaatagaccctcaatgtgacaagaaattttaaaaattttataaatttttttggaaactaaataagaccttggtggacatgtagcccttcggctgccctaaccccaatcaaacaaactttctgcagacacagaaagttgacacaaaaatcttttgaaatttctatattaacagaattgaaaattcattcagaaaagcgaggaagctacctactccgtacactgtgcattgcgcaaatggcggggctttgctgctcgctgccgcgcggggagccccaatttgaagaactcggagggtctttatgcaaaagtttagggaagaagggaccaccacgagatattactacatgtccccagcagagggcctccatttggtctcatctcatctcgcttctctccctcccgcgacatcagcggcggcgcagcggtggggttgggggggtggggggacggcattgcgagctcacgccacctgcggcgcggcgatctcgggaggttgctgtgccgccccggctatgtagtgatctgggccgtgatctcgacggctattcgcggctgagcgggcggcggcgatgaacggagcgagcgccagcgctggcgtcggcaccggcgccggcgctgctggggaggcgccgctggtgtacaaggcctggaagggtaacaatgtgagcgaaatgcccctctcctctctcttcccctctgcgcctttctccctccccaagttccttggtcgcgggtgtggtgtggatctgtgcggccttgaggtcgcgactcaaattaactgtccctttctttctagggaccggcactagattgactcgtgtctgcggtgtcgttggcagatgttgggattcccttgctgaacttggcaaaatcgtttggtcattgttgcctccaaaaataattgattactcgattttcccccatttgttttatgattttgtactgggattctgggaatgtaggttctaggacagctggacgggttaaagtccactgcctggcctttctcaggacaagaatcctaagttttaggactggactagtgcattaattatacttagactgagtgtctattacatctcagaataatttcaccctctgctttcttgagtgagttgggcatagacaaagttgacgatggtacccacataggcacatagcttgagaagaaatgtttcctacgagattttcaagctgtttctgtttatgattgaactagaaagtgtgattgacggtagcttccatcttttgcaggtgtttttactgaaggggaggttcatatttggtcctgatgcaagatccttgtttgtcaccatgttccttattatcgcgccagcatcaatcttctgtgcattcgttgcgaagggattgatggataggttctcttatgccctgggattgccggttatgattgcagcagttctattcacagcatatgtgagtatcgttcttagcccttttcaaatcaccacactcatttatttcctgagctgtgcggtacaggtactgctgcttaatatatatgcagttattggaacagtacgagtctttaacaaagctgacagcttcagtttttcaaacgatgcttgtattctgtctatactggttgtgtctggcatgatcgcttggttcagttttattgcaatcaaagtatatgattagaaactggaaatttgcagtttcacatttgcctttccaatacattgcattcaactgggcaagtgactctctggacgatacactgcttaagaactgttatttaattgctcctaaccgtatgggactctgatattctgcttttatcatgtgtcatgtgttaaatggcaaagtgattccgaattatacaatgtaacttagttctggatgtcatcaaaggggattattcctttcgcttctgcattaattattttattattcattatatgctaattgtgcaagcggctctccccagatgatatagtacatgtcaactgtcaaatttaattgctcgtaatggcatcgaaatgtaatattctacctttattaagcgtcatgtgttaattgaagtgattcctgattttatctagaaaaggggattattcgtcctgttgtagtatctttttaacttgttgtccactggcaccaagcatattttgctggtgcccctacccctatcttttaatttggtacatacacaaatttatctttagtcatggtcatgctgccatgctggtaaagagaagaaggtatagaatgagcatatcttctaacctgtttaagcattatgcctcctttcaggatctgagtcttctgcttctaacttctgggagagatccggggatcatacctcgcaatgcacatcctccagaacctgaaggttttgatggcaatgcagaggttggggctaaccagactccacctgtgcgtttgccccgagtgaaggatgttgttgtcaatgggatcactgtgaagacaaaatactgtgacacttgcatgttgtacaggcctcctcgctgctctcattgctctatctgcaacaactgtgtggagcgttttgaccatcactgtccatgggttggacaatgcataggacttgtaagtttattaactaaacacttgtgagtcagaaagcctgttttgctgttcatatacaatcttttgccaacactttatgttaaatcttgcagcccctgttgtcccttcatttaatgcatcaattgtatttgcttgttccaccacattactaatatgtagagcatcttttccttttagaatgagattcctgcttaaatttgatggattgtaaaaaacttcaaacaccttagaagatttcttatgtttgtgcagaggaattacaggttcttctatatgtttgtattctcaacaactctgctctgcctgtatgtctttgggttctgctgggtgctcattgttaagatcagaaatgcagagcagattacaatttggaaggcaatggcaaagacccctgcatctattgctttagtcatctacacattcattgcggtttggtttgttggtggcctctctgtgttccatttgtatctcatgagcacaaatcaggtaaaaactgattccaagaaggatgcctttatatccttgcctgatgaagtatgttgcgccaattgctaatcagttgccctacttctgctttgtagacaacatatgagaacttcaggtatcgctatgatcaacgagccaacccatacaacaagggaatcatagaaaacatcaaagagatcttctttacaacaatccctccttccaagaacaacttctgtggtagggtccacaggagcatggtctgaggcctcgtccacaaatggtttcatgagtccaaacatggggagagctgttggcgacattgagatgggtagaaaaccagtggcatgggatgagcctaggatggcagctgagattggtgatttaggagcaggtctgagcaacttgttggaggacaaggatggcaggtttcgtagcgcatctccagatctcagccgtgacgcccttgcagttggaggaggcttagaagagcaaggctcctcggcgatgaaccctgggcgttcaagctggggagttgaagcaggtcgatgatggcattgaccatgtaagcgactgtagtgagatgctcagggtggttagtgccagttcgtcgctaatttgttgttttgtttgggatttgtggtcactaatgttattagactcatgacctgtatggcggttgtttctggactttcttttcttctttctcttaatttgcgatgtctttcatgtctattttttgaagcagttggtttgtgatgtctccagtttggcactgtcaggtttcgtctgtatataatcggagcagtaagcctaaaataggtttcagttgcttggatttggatggtattcgttgtgaacaatgttgaatctttgcattgcagtaaatgaacatcgcatgatctgagtgcccatgttaagatttatttccttctttgtaagtgttagtttatcgctaagttatcttgacttaatgtgctgtaatcttgttccttctctaaagttccttgagacaaaatgacattttgctttaatatccattttcaacagtatatgagtaaaggttttcatcttgtagcgctgagacaaagtggcaaacaatcatctggagttaagtcatctggggatttgggcgaactggaacattctataatattcttgactaattatcttgagccaggtaacaaaacagtaacacctggttcatctgacatatctaccgaaacaactttggtaagctcaattgacatggaaaaatgtcttcacagctccgacgagaacaagtattttccctgacgggaatggatgtttcgtcaaatgctatcagaggacagagatggtattcttgtctactcgtaacacactttattccttttcatttccagatacgtagcactgttaagtagaggcatggtatc

SEQ ID NO: 4406 - DNA, 5423 bp, Sorghum bicolor
tattttgggaaatgacaagtcaaaaatgccaaactcttaaagatgaactgattttttctttgacaaaatatttagggacttgacaaactccaacaaatgacaaatttcaattgcataagtgttggaaatgcacgagcgccattgcgttgcattgcagtggcaaccacgggtgcctgccctcttccgtctcccattcacacgccaccgacagccttggaccgactggactcccattatgtggaagttgacgcttccaaaggctatacaacacggacaggtttccggcggtccgatcctttgtaattttatgattaatttatcagacagaattaatcatatttttctaatcactgtataatgttttgtttcttataataaatctgcatcagtatcaagagactagcctagccgtagaaatgatccaacgaaccgcgcctgttgttattgctccagcaaaggaaggcacatgcaaacgaacaagctactgtatcgacgaacgacgaagccgtgcaccagcaatgcggtactgatgtgcagtgcggccttttgtctcgtgttccttgtgacaattcggagaaggcagatgagattattaagagcaactaacaaaagaagaagaaagaagaagaggacgcttccctaccctacgagcaagggaatctcattatcatgctgcacttccactgtcatgctgttgacgagcagcgccggattgcttgtagttgcagtacgattttctggactcgcctgctgggacccggtttcaacctgcttccgaataataatcgaacccctatagtacagtactacactatgtgatgataaacgtgtaccaaacccatccctccggatagtcgtagcagcagcttgctaatccctttccgtttccgcaaatccgctatgccatcaaagttcgttccacaagcacccaatgtttctttttcttgcttttgttgtcatcagttcaataatttttgtagaaaaaaagttgttttgtttttgttaaatgaaaaaggaggacagcattaagcgccatgatgctttaatttggctgcaactatcatcaccgaagaaaaagaaaaccctcatgagtcatgagtcatgctgagccatgacagtgctccgtcatattcatggatgcatgccccatgtgcaagggagcagtcgcagtcagcagcatggttcacatttatttcaagagaaataaaaaataaaacaaaacattgcttggaagttggaacagaggtgaaaaaggaaccgaaaatgactgcagaagcagcaggagtactaattaaacaccatggcgacagggatgcaggaaggaggaggtgagttttgacaggaacaaagggtgtcaacggtgcagtgcaattgtctcttgacgaaatgcagaaatcaaggcctgtctgacgttttgttaattaaggtataagacaagtgagaggtccagtccaagtttggtgaaatcaggactcaggagggtagtgagcgagggagggaggaaaaggaaagaaacctgacatctgatgcggaggcaagcccctcaccaaacctccattcatggagctcaataacattagttattggcctattacgggaggactacagctcatcattggtgtgtagaaaaagattacgaaagcagaaggaaaaaggggagatgcatgcatactcctatatagcagtatcatacagcaaaagaagaagaatcagccgcggacagccttcctaaccctcctttctcgctcatccttttcttgcttgcagttggtattagaacatgacccctattcctccgtcctcctgaagctctgctgtgcgtgtgtgcgcgttggaggaaggaggaaggaagcctaggaaagccaccgctcaccttctcgctcgctccccaccaaacgccgcttggtaggaggagaagaattggcccaaaagcttcccgttggccgggatctcttcttctttaattaccccctggggaagtggggattgcctcgctcattagaccagaccagacagggagggagacagagagggttgggggaggagagtagagagttagagacacagagagacaacgggtgctcggtgggaagaggaagaggctcgtggggagggggagggatccagaagaagatgaggcggtgggtcttggccatcgccattctttccgctgcttcggcggcggcgctcttccttggggctgaggcccaggcggtccagcagcagggccaccagacagagaggatctcaggtgagagatgatggacctctcttttccttgcgtttgttcccatcttgctttctgatcttgataggcacatccttgtcagtttgtagaactcatgctgcttggtctgtctagttgggtgtttgtggtgcatttgctagcagtaataatttggtaaagcaagaattttggcgccgattagtatggcagttgaactgtcaggcctctgaatccttaattcatagaagtttgatcctgattttgtatgctaataaactgaatacaggcgtgtcctttggtgttctattcatacctgtttgatccggttctcacgaaatatagccgaaaaaatcacttttttcacagacatgctttatattttttttggctgactggctgatgcaacgtggaaaatgtagaatgcagtatgatgcttatttcttacagtatgttctttcatcaaatttacctctttcagtggtcttttgttggtagttcctcaagcttggacaaatacaatcgtactcagtcactgagcaataactggctcatgatgacagttatgatttattcagttttgcataggtgcaaaattcacttttacactatatggcttacctagcatactttcctttcgatcattgtacttttatgatcctgtgatccctagcatggttctaggaccaagtatattcttttccctacctttctgcaaagccgtaatgctttggccaataaaatgcagggagtgctggtgacgtgttagaagataaccctgttgggaggctcaaggtttacgtctatgatctccccagtaaatacaacaagaagctgctgaagaaggatcctaggtgcctgaaccacatgtttgccgcagagatcttcatgcaccggttcctgttgtcaagcgctgtccgaacttttaatcctgaagaagcagattggttctacacgcctgtgtacaccacatgtgacctgactccttcgggtcttccccttcccttcaaatctcctcgcatgatgcgcagcgcaattgagctgattgccacgaactggccttactggaacagatcagagggtgcagatcatttctttgtcacaccacatgactttggtgcttgcttccattatcaggtacaaacagcaccagtgcatgaagtagctgtaacgtgcatttatttatgcttacactaatgaagatttgatactaagcaataatagacaagtactgaataccagcatttgaaacaagttgaacatatctaattgcgtcacagaacatggggtactgtgggcatcaaggtgcttgtttcgatatgaatgaaatactctgactaaactaattcgggttccacatgttctttgtcccttgtataagaaacatgcctcaggttgtaaattttgttagctgtcatactgatatccagattcatgacaacttgctaaacttccagttggcaactttcgttactggctgttccaacatctcaatatttctgtaacacaagcacttcaatttgtttttcaggaagagaaagcaatcggacggggaatccttcccttgcttcagcgtgctacactggttcagacctttggacagaagaaccatgtctgcctgaaggacgggtccatcacaatcccaccatttgcacctccccagaaaatgcaggctcaccttatccccgcagacacccctcggtccatcttcgtgtacttccgtggtctgttctatgacaccagcaacgatcctgagggtggttactatgcaaggtaaatcatccatctgtctacaagtgatgcaacttcactcaatgtctgtctgcctccttttttcccagtcagtcattgcaatactgcgtcctgggtctgatctctgatcattctgcatgttctacagaggtgctcgtgcatcagtctgggagaacttcaagaacaacccgctctttgacatctcaaccgatcacccaccgacttactacgaagacatgcagcgttcagtgttctgcctgtgcccattgggttgggctccatggagtcccaggctggtggaagccgtggttttcggctgcatcccggtgatcattgccgatgacattgtcctgcccttcgcggatgccatcccgtgggaggagatcggtgtgtttgtcgctgaggaggatgtcccaaagctggacagcatcttgacgtcaatcccaacagatgttatactgaggaaacagcgtctcctcgcaaacccatcgatgaagcaggccatgctgttcccccagcctgctcaggcgggtgatgcattccaccagatcctgaatgggctcgcacgcaagctcccgcatggtgacaacgtcttcttgaagcccggggagagggtcctgaactggaccgccgggccgccaggcgacctgaagccttggtagcatctgcctgccatattactagaactttttggggaaaaaaaaggaagattgaggacatggtgatatatatacgtgcgcctttaagttaccatggctgcatagttctgaccacaagccaaatgtacatttttgtatgttctttctccttttccctatagctgctatacctgtataccatatatcttcatttctctctctttttgcccctttcactaggtgatgagaatgtcagccttgtcaatcatgtggataccatagtcgaaatctacaacattttactcactctgaatgtctgatctcattttcattatcctcctgatcgagctgacaattgccttatatactgcacatggaccgacaacgtgtttgtgctgcaagatttcgtttcctttgcttccctttcatcatctaatgtaaaggtgaaactactttttgaagcaagatcattgggaagcctgcctgatttgctgatggttgatgacttctcagggcagcatgcatgtcgctgcagtctttgtctgaatgttgctgagttctcaaggaagttgcgacgtgagcacaataacctaaagaaagattgttggttgttagtatataatataagtagtgggtgctagaagggttagaaatggagtcaacatcagcacgttccctctttttccgccgatgaggtgagtcattttcttaacttgtataggttgtactatgatttgggaaggttcctgacatggtaccttgaccaaatgaccaataatttatcctatagttaagtattatcagttggt

SEQ ID NO: 4407 - DNA, 10654 bp, Sorghum bicolor
  misc_feature (10579)..(10654): n is a, c, g, or t
cttcgtaggccgctcgatctaaacgcaacacaagttagatctatcctagtggcactagataaccatttagttcacaagaaagccactcttgatagtatggctatatatcctaaacccggtcaaacacttctctacttaacccatgaccggtgaaatgaaatgccctacaaatatacctttgccttgcacaatctattctatcgccatgtcggtgatgccacaacaagcatgtaaccccatctatctagattaaatgatgaacaatggtcatccatcaatatagacaaccacgctacctagacaattgtctatagcatgaactcctccttcattctccatcaaaccactcgatcaccacaacaaatcaacactcagacttgatcttccatgaatgatacattccacttcacaacttcacgtggccttgttggttcattgattgtagccttgcttgctcttcaccattacctcggttcatcagtgccaagcccttcactcacacttcaatgccttgacgatccatcacacctgagtctctaactcgtccttcacacttgcaatttagtcctttgtagccaagcctcgcctcttgttgatcttcttcacctagccatatgacaccatgtcatgtctcatatttaatgagattcttttagaaggtgaagcaaacataggctaaaagtcctaaacaaggacacattttgtttcttaggcaaaaactcctaatgagagcgcctttggtttcttaggcaaatatcgaccaaccttacagagtaagaaactaaaattataaatatatttgaatagccaactagcaattctcggagtgtgcgtgctggcaagctgtgccaacaagctatgccagcatttttttggtgttggcaagcttttcgagtgttatgacgaggctagctggctacaaaaccaaacgtgccaaatcctttgttgcactgatctgtcacaagttgcttgttgcagccaccttacttagttggttttggttggtataaggtgggtggcaggaggtatacttatttatgaccattaaacgagtgctctttgatgaagacgttagtcaaaagatgacaacaccactatattgatgtagcacacatatgacacaattgaatgtacactgtcttctagtcatagttgtatatccgtgacaaaattcaaagagcataacaactctatcatataaaacaataaacagtgagacaacatgtcacatcatactgtgtgatgtaactgactacacaccttgtcctttagtcacaatcagacagctgttttgaaattcaaaatttgaaaccacacaactcctgcattgcctgaaatccataaaaagcccagccccacaactagtttaccctttttagctcctagaaaccatacagagagtacggaaggtatgcaaggaaaccctgcattggttcgttgcccgttggcctagtacacgcacaccactggcgcatgtcgggttcaaacactgcatcccccaatcgaacggtgctgcgagcgcctgcgattcgaatcgccaatcctcagccgcccaatgtgcgcctcgcccaaaattcaaactcgcccgggcaaacacggccagcccatcccgccgtggcagtccgcgttaatacgcccaacacccaggggcagtatagtcatcttgcctccgcagccagaaaaaggccgaggacgcgcagcgcgtgcgcaacaccccaccctacctattttgctcccattttgctctgttctggacgcttcgctctccccccctcccttcggcttccgccattcccgctatcgcggagcgcagggtgagcttctcgtcttctgcggcagtatcggaacggtgagcacctcgtctctctggctgctcccgacgcggcggtctgagacccgctgcgaaggcgattgctgcgctcgtttgcaagtgggggtttcggtttcactgttctaactttgttggggttttgttggggctggtgtggtgaagctggtggatggcgaaggtggattcggtggcgccggtgccgagcccgacgttcatggacgccgctcccctgaccttgccgccgccgctggtggtggaggagctcgtgctgcgccgcagtgctcgttgcctcaataggccaacccgtcccagctacgcggaccaggagcctcctaaaaagcccggtggccggggccggggcaagcggaagagggatgaggagaagccggagctggcggcggcgcagcagggtgccaagagcccgggcaggaagtactccaaggtggaggcgggtgagaggaagccgatgcccgtgattgcggcggtgccggtctcttgcgctggcgttgctacggaagacgatgcgatgggaaccgggaagagcgccaagctgagggtgaaagagacattgagggcgttcaacagccactacctccactttgtgcaggtacctttgtgtgtctgaatgtacaggtattatccagtttggttcatgtttttcgctgaatttgtaagcattttggtacaggaggagcagaagagagcacaggctgcgctacaagagattgaggctaagactaagagtggcctcaaacgtcagaccaaagggggtaaaaaggtgcaaatcttagcgctgtcttgagttttgtatgcagtaccgttttctcgtatgcgtttgttcgttaactgtgctgtgggtctatgagtcattgagtcgtgccatggtgaaaactgttcactaaatttgtacgctcctttgcccttatatgcagaagagcagtaagcaacaagctgaagctgaggagaaagagaaacgcccgtcaaagcggcctgatctgaaggcaatcaccaaggtaccgtgttgatctttgctaatcttctccattaccaagctgtacccctgtatgagtttgctatgcttgctggtcttattgttattgttgaaattccagatgcaagaaatgaatgccgtgctttatccagagaagaggattgggcatttaccaggttaatcttctacttctctccaaggaaaaaagttgtattctgaagtttgaggcgcatgaattcagttatatattttgtccccacatttccattgtactatatcgatgtgcaaagtgatgctcttatccaatccttctcagggattgatgttggtgatcgattttattctcgtgctgaaatggtagtgttgggcatccacagccattggctcaatggaattgactacatggggatgaaataccaaggaaaggtaacagcagcagacatttctgtaggagtgtagagacgtttttcaagaaaaaatagaaatagatggccggtattggattgggaaatttggaagtttacttcgttctgaacatgagagcatttcttgtgttcatttgacagaattacaccttgatccaacatgcttttactgctgtttgtaattattcaatattagcatttccctttcagcattcccaagtgtctactccttctgatcagatatttaagtccatctaggtgtgtctttagtcaaacttttctttacctttgattatcaatatctgaattttatatcaaccggcaagatttgtattactagattcactatgagctggactgctgatcgccttgcaagtttggggcttaccaccctgcagtttgtctcttgtgtgatcaggctgatgaagcatatcttgattgcttgtgtgtttgtaaggcaggtttggaccgtttttttgtgttgggttgcttccttttgcaccacaaccagaggactctcgtttcagtagctggtggagcaagaaaatcaaggctgttcctgagataaacagaagggctttatttgttcatacttagttgcttgcgagatttggaaacatatggaccactgtgtctttgagggtggtagtccttgctttcgaaaggttctgcttgtagttcatgaggagtgtaatatatggtgctgggttggtgctaaggctttacatagatcctatgtaggtcgttgacgttggatgcttaggctcctgatgtttttattttgtcgtgtttttgttttcagcgtgtgacattgttagccttgtactaggtggcctaggggagttggctctgcctcatttgtttattttcctacttagttaattgacacaaagatctcttgcgttgtttgagaaaaataaagattcattatgaaaaatagatcatgttatatagatctgtttgtattttaatatcaattggcaagatctacattagttaagataatatatttttatagatattgtgtgtacaagcgtgaatgtctcatggacttatatttgtgattggaggaagtaattctttgttgcagcatcttgtagttgtttctttgtatttttctaaatgttgagcaatttattggctattccatttctagcttctaaaaaagtaattctttgttgcagcatcttgtagttgtttctttgtatttttctaaatgttgagcaatttattggctattccatttctagcttctaaaacaaaccagaaatgactcctaaatggagtgaccatgtaacgtaactaataattttgaatttaattatgcagaaggagtatgagaagttaacttttccactagccacctgtattgtaatgtcggggatatatgaagatgatctagacaaggccgatgaaattatttatacgggtcaaggaggaaacgatttacttggtaaccatcgccaaattggctctcagcaattgacacgtggcaatttagcattgaaggttggtttcaatggttcttatttgttacttagtcatatcatttgtatatttgtatgtaatatactgtgttccacttttttgtggttatgcttttgtttcaagttataattcatttttggctttgtcctaagttaaacttcctaaactttgacaaagtttatacaaaaacatacaaacatctagaacatcaaatgatcaagtttgttcaatcaacctcttcatgaaataaattttaatagagattttgtttcaacttgtagatgtccatatttttctaaaaactcaattgaagttaaagaaatttgatttagggcaaccaaaagtgaactagaagttggaacagagggaatactatagttcttctagaaaatgtgctgtaatgtgacataccaacttgacttgatttgtcccatggttcatgtccaatgtgacataccaacttgacttgataagttgggtgtttattcccatcttgcttgcatagggtgagaaacaccaacatataagcttagctggtccaaaatccaatagcactagccctaaattaacccttttacttttacgtgaaacacagacaaaagtgtaagtgggtttgttatgagtgtggtttactaggtgtgcagggtaggcctagtcttcgttggactctatgggtctgattggttgcctgtattacactattccagacttgtgcagtgcagttagctcgtgagtgctcaaagcaggcctagtgctgcattggctagtatgccagatatgcacggttgcacaagctgatgcgcatacaaaaagaaatattctcatccttcatgcctttactatttactaaaaacatggcacctcaactagaatatggaggtgactacatgcaacaaaatttaaacaaccaaacatagtttaatcaaatgtatcttgtctgtgcagacacttcatacacttacattggtttaggttatgttgcgtaaggcctaatgtaggctaaagctggtttccagttgttcaagccatgacccatggcatgtctgacatatttaacatttcagtgcctgactgcctgagttaatttatatactcaacatcttggttgagcgtggtggtaggtcctctggttgggaggctgtcggccaggcttcaaatcctgggttgtacgaaaaaaaacgtgctagcccagggttcaaatcctgggttgtatgaaaaaaaacgtccattgataggtaactgtctacagacatatacgtgctgtcctaggcagccagctttcggggcctttttccgacgggttgagttttctctctcttatcgatcacaaatgttttgtcttacactttcgaataaattgatctatagcttctatataaatgaagctcattttattgacctcattttattttattgttgcagaatagcaggtacaatggtaatcctgtccgagttattcgaggccatttatcaaagaatagctatacaggaaagatctacacctacgatggactttacaaggtctttatatttttcaaatcttgggctttttaatttgcaatcccatggagattgatacacaccaaaaatagattcgctagtatctagttctcttgcattatctgaccaattcaacttttattatttcgtgtggataatctgtaggttgtacatgactgggtgcagactggagtgcaaggccatgttgttttcaaatataaattgaagcggcttgagggtcagccatcattgactacttctgaggtatacctgaacagagacaaccaactgagttggttgtgctgatattacccactgtcttgttatagtttgcatgggtgaccttcacttattttatactatattgtgtcaaccgatagagaagaaatgtggaaataacatgagacttctcagatttgctaattcaatcactaacaaattgctagttctagtgcagttttcctttcagaaatatgtttgtgtcattttttttctgtaactgaaatatgctttagaattgtgataatgtactaataatacaaccacctagttgttcttgaccagttgaccttttaaatggaatttgtattcccttgagtaattttaactttgcatttttgtatataccggaaatatcatgtgtttgtgtcatcacatatctgtgtatccaggtgcgatttactcgtgcagaagctcccacaactatttctgaattacctgggtaaatgatccaaacatctgaagtttctattttaccattcatgaattcatttttttctgataagttatgtgttctaaaataaagtagctcgtattgattatatgtgtgcttaaacacggaggatacaatgccttagcctagagtgcgactatatattctcccttggtttcaaaatgcaagtcgttttagttttgtcctaagtcaaacttctctatctttgacgtttatagaaaatgaataatgtaaacattaaattagtttcattaaatccactatgaattatgtcttgataatttatttatttggtattgtagatcttaatactattttatataaacttggtcaaagctagagagatttaacttagagcaaaactaaaccgacctgcattttgaaacagtagtagtttttagttcaagtatctgtataaacatgccaatctactagagataaagaaggatctgtactatatagaaatcttaataactaaatatatcattaaagatttgacatactagacggtactctatcaacatatatggttgtggtcatttcacaactgtgctatgctgctattttatcaccttagtcttagtgatacagaggttttgcttccttgaatgaaacttaatcatatgtcatgttttaatttgatagactggtttgtgacgacatctctggagggcaagaaaatattccaattcctgctactaacttggttgatgatccgcctgttcctccatctggtatgttcaaatttatcaagtgtctatttcatattttctttgttgcagggcagtttgcattgttccaataaactagggccttgtttagttcaccccgaaatccaaaaagttttcaagattctctgtcacatcgaatcttgcgacacatgcatgaagcattaaatggacaatatttatcaaataaaaacgaaaatgctacagtagcgaaatccgaaattttttcagaactaaacaaggcctagagcaaatgtgtgcagtgtgacttttaaattttgaataagctacatccgaatacgtcaaatagcactatagcagtttatatcacaaatcagatttttggaacttgtactatccaatggttcttcctccttctgtgggtttcaaataagtgacattttgagttggtgtcagccattgtatgttgagtttggatattttgaaaacgatgcagatatgttgtataatatgtagtttcataacattatacttttgctatgttttataaatttaattacaacaaaagttagtagtcaaagttgtattttgatgatcatgtctatgtccaaaacacagcttattctgtaactgttgggagtagaacataacaatacttccatttgcagttcggtttacaaacaacagttagccaagttgccgaacaagaatatttggaagttgtaccagcaaacaagataatacaatgaagtgctctttgaaactttctaaacataatagtaactaagcttgccgaattcagtgccaaatgtttcttgtattttaagaatttatcgtgtcgcttctagcatatctgttttcttgtcatcttgttctactgttgtttgtagtttctattcctgttcctgtttcaatttatacactaattatcagtggctgattgcttagtgtcacctttggcaacaatttaggtttcacatacttgaagtctctaaaaattccaaaggacatcaagattccatctagtattattggctgtgattgtgaaggagattgtgctaccaacaaaaattgttcatgtgctcagcgcaatggttctgatctgccttatgtatcacataagaacattggcaggtaagcgcaatgtttaaatagttcaacacttggatggattttgcaactattgtttttcaatatttttgtctctaattctataggttggtggagcccaaagcagttgtatttgaatgtggggctaactgcagttgcaaccatgattgtgtaaacagaacatctcaacagggtttgcagtatcggttagaggttggtatttctctttccaagagtcttgtgttctgacacttcctaggatatctattttagactttttccccttataaaaaacgcaggagatctgtgttttgtttcattaagaaaacaaattctttcttgtgcttccacagtttggcccctttcacaattcttctgttaggagtgacacctcttactagcatttgtatctagctatattttccttattggctgaattttgcaggtatttaagacagcttcaaaaggttggggagttaggacttgggacactatcctccctggggctcccatctgcgagtacacaggggtgttgaggaggactgaagatttggatggttcgcaaaacaactattgttttgacatcgactgtcttcaaaccatgaagggtttggatggaagggaggtaatagttttctcatttactataacatgaaatattgccaaattctactcctatattttagttgtgctgaaatttcatcagatgcttttaggacatttgttcttgaacactcatgctatgtactctgtcttgcagaaaagagctggatctgaaatgcacctgcctaatcttcatcctgaggatgattcagatgcaccacctgcacctgagtactgcatagacgctagttctattggcaattttgccagatttataaatcacagctgccaacctaaccttttcgtccagtgcgtcttgagctcacacaatgatgttaaactggcaaaagtgacgctttttgctgctgacactatacttcctcttcaggtgagaagtgcttgagttctctcaacaaaactgtagactctaccaaaaaaaaatttctgattaccatgtgcttttcaggagctatcctatgactatggttatcgcttggacagtgttgttgggcctgatggaaaaattgtgaagctgccttgccactgtggtgctcctgattgccggaagcgcctctactagaccctgcagtgtgttctgtttggattttggaggaaacaacttatattgtagggaagcagtcatggtatctatgtagttgacatgctctgatatttagcaaaagaggagcagcttatgatatctccttttagagcattcttaatttgtgagagttagaggacatgctggtcatggtagcgcatattttgcagacaaccaattaactgatatctatggacatcaggtcttggaacgcttaacctctagataaatatatatatatatatatatatatatatatatatatatatatatatatatatatatatatatatatatatatatatatatatatatatatatatatatatatagatatatagatagatatatatatatatatatatatatatatatatatatatatatatatatatatatatatatataattagatagatatatatatatatatatttatctatatatatatatatttgtacatttgtagattttttggaacattgactcagaaatagagaaactcactcagaaacacacacacattcaatgcatctccctctgtgtgaatcttacagcatatgtaaaacccattatttatatctcaaaatacaaataaattacgagannnnnnnnnnnnnnnnnnnnnnnnnnnnnnnnnnnnnnnnnnnnnnnnnnnnnnnnnnnnnnnnnnnnnnnnnnnn

SEQ ID NO: 4408 - DNA, 7875 bp, Sorghum bicolor
acttcaaaacatcttttggtgaccaaagccaattttgagtggaaactagtgaatttacccaaacagttttgaaattcaaactcaaatcaaagaaattccaaatttttgaattggggcaaaacagaatttccaaaattacttttgattttgcataacaacttgaaaaactcccaacatgaaagttgttcaacttttcaagccctacaactttcatgttgaccatttttcaaaattccaaacagattttgaattggggatttaagtttgaaaaggggacactttccggaaatctgtattttttaaaattactttggattttgtactaaatcttcaaaaactcaaaacaccaaagttgtacatcttgacaagatctacaactttgcttttaaactcaacttcaaattttgcttggtttttgaattgcacaaaagggggcaaatctaaggttttgaaaactagggttccccccctaagcttttcggaaaaactttcacccaaggtttttaaactccaaaacaagcatccatacataaaataaacacactttaattcttaagcacattcaaccaaatgtaaacttattttaagttaatgcatcagggtttacttaacaataaactatgcaatgctcatgatgacatgtcatgttttaattcgcttaacaccagagtgttacattcgtttagatttaatgtttcatgcatgcgatcaaatattcgatgtgacagagaattttgaaaatttttgcgaactaaacaagacctaaatcaagctgtgctttgcttctccccctgccgtggaaaacacaaccacggccaagcagcagcagcacccatcgcctcgccgcgtagaaaagcgaggcttatcgcatttgcccccactggtccatggcacgataaaaacgcaaacgaaacgaaacgaaagggtggcgccaccggctgcaaaaatggaacggcactgaggtgcctcggaggctcggagtctttctttcttcctcgctgtcgatttccgccaccgggaaaatatctcctgtttttgataaaaaaaagagtgcgttttttatgtggactaggaattcttcgaagaagcgacgtgtcggtcggactatggactggcggcgcggtaattccctccgtcacctcacgaaaaccttgctgctggttattcccgttgaatacaggaaaaaaaactagtgcaatgctactggcgaggacgcactcacatttactgtgggagtacgcgtacaatcgtgtaatcacgagcctcttccgtattgagtgcgatgtaacgtttaccgatagtataagacgcctttaaggcccagcaatagctctcttgacataattactgtagcaagagtcatttttttttctctttctttcctaaacaaacttaaggcagtggaactccttttcctttttggcttccccagcccttgctcttgaggccggccactcacagtgagatgagatccgttccatcactcgctgttaaattcaactttcaaccgccgcacatctcacaaagtagcacagtagtttttgtaggtgcggtgcagaacagaaagcatccctcgcagcgtgggagcccgtccgtgtccgtccgtcgcctacgaattgcgattgcgccccccctacccccacctataaagctgcgcgtccgtccgtaggtgtggtgaggtgcgcgcgcggcagcgcccgccactgctctactcctgccgccgctgcaccgcaccgcacccaccacccaccccgtctcgcttttgctgccgctgcaggctggtcagaccagccagccacacagacacacacgcaagcaccggcccgggcccacgcctccgccagccagcgaaccggaccggaccgctcgaaccggtggtccaagccaacgcggccgggtcaccagcggctttctttttgtccgaacgccaccgctgcgtctcgtggggtgtgtctatctctactccctacaaagagaccacaccaaatcccccctaccccatctcctcccgtctcccctcctctcctctccttcctccgcccacaaaaacatttgggttctcccccttccgactgctactgccgctgcctcctccccctttccgcctgccttcgctctcccccctttccgcgcccccccacttctcctccgtctagggtttcccccgcccgccgccgccgccgttgcccgatccgaggcagatgccgcccgcagcagccatggcgctgccgtcccaggccccgtctaactcaggtacgcacgcgcgcgccagatccggtcagctccggcggcccgctgctttctcttcctctctgcttcgtgttcgccgtcttttccccgcgggggctcgctctgatggtgccttgctctgttcctgtaggggatccgctgtacccggagctctggcgcgcctgcgccggcccgctcgtcaccgtccctcgcgtcggcgacctcgtcttctactttccccagggacacatcgagcaggtacacctcctcctcctcccgctgaagcttagcttgctccccagctcctggcgctgattttgggtgctctcaggtggaggcgtccatgaaccaggtcgccgggaaccagatgcgcctctacgatctgccctccaagctgctctgccgcgtgctcaacgtcgagcttaaggttccctcctcttcccgccgtgttcacttttttttaccttcccccggatttttgctgccaattccgcaccttgcgcgccagcttcccctgcggcgagcaattccaggcccggtacttacgcgttttcccggttttggcaggcggagacggacaccgacgaggtctacgcgcagatcatgctcatgccagagcccgaggtagcctcccaagtcccaactcggaagatttgtcgtcggcacgtgtttcggcaaaaaaatccctgggaactaggaggttctcactcctctcgctctccttgttcgttcatgcagcaaaccgatgtggcggctgagaaggcgagttctgcgtccgctgcgtcgccgaggccagcagtgaggtccttctgcaagacgctcaccgcctccgacaccagcacacacggaggcttctctgtgctgcgccgccacgcagacgagtgcctcccaccactggtgtgtttcctccatcccctgtggacttggactctgctattaatagaattagagatgcgcgtgcttctgcttaagatttttctcgtcgggccagctgatcttctttgtttcgtcggcaggatatgacgcagtcgcctcccacacaggagctggtggcgaaggatctgcatggcatggagtggcgcttccgccacatctttcgcggtaatttgggctcctctcatttgccgtggttcgtacctgtcatgtttgctacgggggatgagtgatttgttaccccgttactttcgattgtctgtgtgatgtcgatttattcagtattttttgtttagtttatccatcagtttttctgcgattcattgcatcttttatgttaattggaaagctcaattgtttgttcctgatgttgatgattgttaaccgggcacaaaatctgtcttcttcagggcaacccaggaggcatctccttcagagtggttggagtgtttttgttagttccaaaaggcttgttgctggagacgccttcattttcctcaggtctgctgtgtttcctgcctacccagcatgaaagcaattcccgatctggtgctaaatttctgttattccttatgcagaggagaaaatggtgaacttcgggttggtgttaggcgggctatgaggcagttgtctaatgtaccttcttcagtcatatctagccaaagcatgcacctcggagtccttgcgactgcatggcacgccatcaacaccaaatccatgttcactgtctactacaagcctaggtatgttgacatgtccgcaataaactgattacatttctgagactttacatattggtttaccttgattatcttgcatgaggctataacatgcaatttgttcttaataaaggtagttaacttgttgctgatctctaaatatcaatgttaggacgagcccttcagagttcatcataccatatgatcaatatatggagtcagtgaaaaataactattcaattgggatgagattcagaatgaggtttgaaggggaagaggcaccagagcagaggtaactgtcttattgtcattctggattttgtagattcatgtcacctggtctcatcattgtacctgctcattatttgtagttacttattcctgatgcaattttatcttgtcttgtaggtttactggtacaatcgttggctgtgaaaatcttgacccactatggcctgattccagttggagatacttgaaggtaattgcttatccaagtttattgtttccattatggtctaaaacttatgctgatgaaggtttattattattatttctaggtgcgctgggatgagccttctactatcccacgaccagatagggtctctccttggaagatagagcctgcttcatcacctccagttaatccactcccgctttcttctagagtaaaaagacctagacaaaatgctcctccaccttcacctgaagcatctgttctcacaaaagaaagtaagtttactagattgttcagttagaagagcaatggtgactaaaatatagccactctaatcctttacaaatcatcttgtgcaatttgtaggtgcagccaagatcgatattgactctgctcaaacacaacatcaaaattcggtcttgcaaggtcaagagcaaatgaccttgaggaacaacctgactgaaagcaacgactctgattccactgttcaaaagccgatgatgtggtccccatcacccaatgggaaagcccacactaactttcagcagagacctgctatggatagttggatgccaatgggaaggcgtgaaacggacttcaaggactcacgttccgccttcaaggatgcccgcactgcctctcaatcatttagagatacacaggggttcttcatgcaagcttatgatgacaatcatcaccgtctttctttcaacaaccagtttcaggatcagggttcagctcatcgctttgcggatccatacttctatatggcccaacaaccttctctgactgttgaatcaagcacaaggacacaaacagcaaacaacgacttgcgtttctggggcgaccagaattcgatctatggtaatccaggtgatcaacagcagcagggtttcagctttggacaaaacccatcaagttggttgaaccagccatttccccaggttgaacagccacgagtggttaggcctcatgcaacagttgctccatttgatttggaaaagaccagagaaggcagcgggttcaagatctttgggttccaagttgatacaaccagtccatctcctgcccagttgagctctccattatgtgctatccgggagcatgtggtacaaacccgaccatcggcaccagtgaatgaattgcaacctgtgcaaaatgagtgcttgcctgagggatctgtaagcactgctggaactgcaactgagaacgagaaaaacattcagcaagcccagccaagttcaaaagatattcaaagcaagtcccagggtgcttcgacaaggagctgcacaaaggtattgttgtttttatgtttgtgaccttgcacttgtatactgatgttgttcaatttgtgcatgtgattggcaatatattatcagttattggtctgttttttaaaaaaaatggttttgacctctttagataagggaatattgctatgtggtttataaatcctggggtttggatcctaattgtccatatctgctcaggttcttgagtatcccatgcctcagctgtaattttcactagcactgatcaaatctgccaataatagtttggtgggcttccaaggttgcctaacattttcatttgatagaattaaattaagtcaacatgcccaatgatacatgtcatggatgctttcagtccatgtagaatggcttgattgcatcattatagttgtatgtataataatattgcatgattgtgttgtggctgagcctatattttttctgtagtcctatcctttgcaatttacacatctgctttgaatgattttcaggttcataagcaaggggttgcgcttggcagatctgtggacctctcaaaattcactgactacgatgaactcaaagcagaattagacaagatgtttgaattcaatggcgaattagtatctgccaacagaagctggcagatcgtttatactgacaatgagggtgacatgatgcttgtgggggatgacccgtgggagtaagtccttatcttagtgggagatttgtatgcgtatgagcttttgggccaatattgacatcagttcattatttatgagcagagagttctgtagcatagtgcgcaagatctacatctatacgaaggaggaggtccagaagatgaactcaaaatcatctgcgccaaggaaggaggagcctctaacagtgggtgaaggatgcgccgccacaaatgagtaggatttgcctgcctgcagcaagcaattttagataactaggtaagtcctccttcgatccttaatacttgtttttgcacaactgatggcgaatgggtttttcactgaactaaagaaacatcggatgcctttgtttattgactgtaaatgcttgcttaattcagtatgccacagacatggctcttctaatacttgtcacatgatgttggttcttgataccgtgagcctctggccacgagatacttatgtttggcatgataggctgcagtgaaaaaggaaatgcttgctaaattcagtatgctgtaggcgtagctcttctaatacttgtcacatgatgttgattcttgcttatttttggcatgataagctgccgtgaaaaaggaaaaaggggctaatctttcggttgtcgcttttgccttgtgtgtaggttgtgtgaaggaagccgacgatgcatgatgaactcatcgtgccaggtgcctgggtcccaaccaagtaactcctgaaatcttttgcttgtccgtagcgaggttttagttgtgaacgtagtagaactgtctccatttgcttctccgcagtttgctcttggcagcaagtttaagggccaagtcttattactattgttattgctgatttgctcttctgccttctgatgtaaatatttatgtactcagtcccagcctgtagtaagtagtaagtagcaagcagtggcagtacctttggtattaaccagcagctattcgcggcattttaatcccctgtaagtgtagctctgtagcgcgagataaatggcaaacactggtatatgtatgtctgatcttctcactgaatgtattataagagttatagaggacctaacctgtgacctcccccgtctgctctgaagatgctgtgtgatgcatatgcttagtgcaaatccgtgtcgttcacactgtcttcgtggcgatgacagcgacctaaaggcacacactgtctctatttgccatccatttgcatgattgggggattggaatgcagggcgagtgtatggcggggcccctttgcccctccctccctccctccccttatcttcttgcctgcctggtgtctggtgatgcaatgcaaaggaaatcaaagcaaaccgaaaggcaaaggcatcaaggctcgctgggcagggcaactggagataggactctcctgccgttggcgcgattccctgtcccttttggtgtgttttgttaacgcacggaaccgaggaagtggtggtgcagccgtgctatttttgcagagaagaaagcacaagaaagggtgccgccgtgccggggcaaccaaccaaccaaccaaccaggcttgtgcggctgacgcccgcggcc

SEQ ID NO: 4409 - DNA, 3682 bp, Sorghum bicolor
aggtctgttggctgtagccatgagtgggggtgctgagatggttgccggagctgttgtacagcgtgtggccggcatgcttgggcaggccgcctgggaaagggtcgagcttctgtggacgttcgaggatgatgttgaggagatgaagaacaaattggttactgtgcaggccgtgatggtggatgctgagaaccgctcccatggcagtgagtcggtgcggctttggctcaagaagctcaaatctgccgcctacaacattgaagacacgattgacgagctggaggccaatacaatgatatggaggagcaccacttgcccggtagcacttccatcctgttccctgaatatataaagcaagcttattatttcatttgagatagctgcatctgttatgcaatcattttgcatcaatatatagcaacatgaaaaacaagtaagaagtttgatgacatctttattgaagttgcagcctctcatatcactaagccattaatgaaagttccctgaaattgtctggcttagatctaaaataaattgtatacaatatacatctttcttcttatacattcagtattccttgaccatggaggtttaattaaattgattgtctcgcaaagaaaacgatttctaggcaataactaaatctaagccttcataaagttgctccaaattgatggcatgacatccgtttgtgtgaaaaaaatagtatgtattcattttcttcttagcatatatataatatatgtgaaatgaaaagaacaacttctaccatatcgtttgcagatagtgcaattgtctacattggtttaaaaaaaactaaatttgccaaatatttatgagtatttttttgatttgttgtgcaactccaatgtttaataaccatggacacaaataactaaaattatttattgtagaccatgcccatgtacaaagccacataaattttaaatagagatgcattttataaagtgatcctgcttgatattggcatgaggtctgattcaaaatatgatttgtgggagttcatgttacaagcatgcagttgtgaaatcatttctaaaacatctattacattttggtcactcactctggagtcttatggtgtgtttggtttgaggaatgaggttgtccatcatctacttattcctcactttttttgtttggtttgtgaaatggaataggttgatgtatcatcatttcattccttacaagctaataattagtactagtataaggaatatagtcattccactatatttgatgaatgtacttatgatgcaccacctcatctagcatagagtgtctcctcaaaccagacaccctagtgggctactcctggttgttttagatcctagagtgtggttgtaacttgtcttttcgtgtgtgttgggtgtgtttgggagtggtctctttgatgtctcatctgcacttttaatgctctcttcttataattagataacatgcagatctcttgtattgtttgaaaagaaaatctaattatgttattttattatatgtcaatcctataagcagaaggatacaatattttagacatttctatattctacttggccattttataggagtaatggcattttgaatggacatatatttagttgaggatattcaaatttaaaaaggtttgttatgaaaatttaagaacaagacaagtttgtcttttgtagtcgcatacatgcaacatatgcattttgtagcccattttccatcctcccagacgaagcaaagttttcaattttgccattttagagataggttacaataagcattgtcataaaaaagtcaatattaattcagttatttaggatgcaaattatatatatattgcatagttactacttagacatattactgtaatcagcaaatgcccacataatagggggaaaaattaaatctaatgttctataactaactatgcactgcaggctaaactggtgtccatgtcattcaacccactaatcacacggtttaccttgtcatttgagatgagaaaagtcaaggaagggctagataaagtagtagaggaacaaaaaaattttaattttctgcacctcatagacacaaggcagtctgtgaacataaaaaaccaagaaacatctgtggtttcgagtgataaagttgatatggtaggaagagaaagtgaacaaagaagggtactaaatttggtattgcagaaagacagtcaaacaaaaatatccattattcccattgttggacttggtggtatgggtaagactacacttgcaaaatctgttttcaatgctaaagagacaaatatgtttgatgtgaaagcatgggtccatgtatcaatggagtttgatgtgaagaagattgtagcttctattatctctcatattgaggttaccttccaagcaaatgatgctacactacagaatctgaattctcgcattgagcgcatactctcagggaagatttattttattgttttggatgatatgtgggagacaaggggagattcattggataatttgatgaaaatgttacaatatggtaatgaaggcagcaagataatagtaacgacacgaagtgatcaagttcctacagcattgtctatcatcaggacttcagaatatcatattgtttcaccaactaaattgaaggccttatcaagtgatgattgcttttctattattaatccttcaatgcaaggaagaaataggctggatgttgaccttataaaaattggagaagaaattgctaagaaatgtggtggagtaccgatagttgctaaagctcttggttatgtgatgaataagcattgcacaaaagaatcatggaaagcacttaaagacagcaatattcttgagataaaagatgatgactataggattatgaggcgcttgatgctaagttattaccccatgccctcacttcagaaactatgtttcatgtattgctctatctttcctaagggccataacatagatcatgatagcttgattcatcaatgggttgctttgggattcattcaagatgctcatgaggccccacttcacctaattggtcaggaatatattaatgatttcttagggatgtctttccttagtctttcaactacccctgaggtgagctgcattcgtcatataattgtattactgtatatactattttctgattttgcttttacagatattccccaaagctagtgctacaaaccatgatccgaacaggaacacaacttctttagcacctctacctcctaagtatgcaccagcgtcaataacaccttccacatccaaaaagattatccaataccaatggtatacacaaatcagttaataaaatttcaccatacgtaatcccactttgatttcaaagacaacatggtcttaatgtttctacttcttcaatataatatacatacgaacaaacctcacaaactcataattatgtttgagttgtctaaaacctttggaatgtggaaaaatttctgtttcgtgtgtttttcctataaaaatgaactaattcctatgaagttcttgtatgattcttgtgagatttctacggtccaaaggaggcctaaaagagtgaagccttgggttagttatagtagctaaaggccatttggcaacttgaaccaaagcacgagtagtttgcataggaaaatttggatatcttttcattcctgtataccgctcttgtctct

SEQ ID NO: 4410 - DNA, 8377 bp, Sorghum bicolor
aggtccccatgtccttgtccaccattcattccttgggtccagtgtcaccctttgttaccatctgccaggccgcggtggaacccaggttttccttttttgtttcgcacccaaactgacatcactgtttattattatactactactaacctgaaatgatttcctaaaaaaaactaacctgaaaccaatgaacaggcccatatactactatcatgaacagctcaactgctcaagtgacacaccaagaggcaaggagtgaatgaacagatttcaaagtctttatttttcttttcacatgggccttgtttagttccgaaaaaaaattcagatttcgctactgtagcactttcatttttatttgataaatattgtctaatcatgaactaacttggatcaaaagattcgtctcacgatttacagacaaactgtgtaattagtttttgttttcgtttatatttaatgttttatgcatgtgccgcaagattcgatgtgacgggaaatcttgaaaactttttggatttcggggtgaactaaacaaggccatggttggttggttaatagtagctagctccagtgttttatttcgttcctcgagcactcatgctgcataataagataaaaggagagttcaattattgaccatatcagattaagcacacctctatcatgtcgaggagtcagccagcttagccggtcagggctataagagcaactcgaaaactaggctcctatttttaatttgggtgctctcactacttcttgggactcaacttttttgcttcaactccaacagtagcacctaaatttgagcctccaaacctattccagagagaatgacagaagggacccactcgtcagtgtatttttcttcttcctctttcttccttctttggacgtggacacaattagaatatcgagccggttaccgtagggtgtcatgcatatgcaagggtagagagagagagggagcatgcgctggggctagaacacgcgatggagaatgggggctgccctgttgggccaacaagaatggggtctgggggagaaatatgggtggccagccaaatatggggtctggagtaggggccctgttggagtaatgtttttagcctgggcatctatatttagctattggggcttaaatagagaccatgaatattttagctcatctagtggtggatttacaatcgttccttttttttcattccaagaaaattacatcaatgtgttgaatttgaagtggtcatgagtgctacgcatgtgcaggtcttgtcactgttccctctcacggtaaaaaccggtggacaaagattgacccgtcacacgtgtttacctactccgctaattatactgagagagagagagaggaggaggaggagtaataacagcatgcttgcatcagatatggattctaaactgagtactaaaatatatgttttttagaaggatatagagaaaatatatgtgtatacatgtatatgaacatccgtacttaaataaaaatccaagcactttctttcttgacgacgaatatataaaggaaaacagaaataaaaaaaaaaggcaaatgcatgaaaccgttgcagcaaggtagggaagacaacctccatgtttgtctcccaaaacaaacagaaataaaaaaaaaccaccaaaatgtgggagagagtagagtatggaaggaggaggctgaagtcatgattgcagcaagtagggtagtctcaggttcaaaaaaaaaaaaagtaggggagtcaccaactgctgcatgcatatccattaggcattaattattatattatattatattatattatattatattatattatattatattatattatattatattatattatattatattatattatattatattatattatattatattatattatattatattatattatattatattatattatattatattatattataataataaattgctccgtctccgcctccgcctccaactccatcacctcctccaccacctaaacccaaaaacaattgttggcagcgcaaccgcccgcagcgacgaggcggaggcgacccgacccgcgcagcggcgccagcgacaagcaagcctgcggcggaaaccctagcagcagcggctggagcaggaggcagagcgtccaatggcggaggacggggacaaggccgcggcgtctgcgggggaggcaggaggaggcggaggaggagggaacgagggcggcgaggaggagaagagcgtcaagctcttcgtgggccaggtgcctaagcacatgaccgaggccgacctgctcgccatgttccgcgaggtcgccgccgtcgacgaggtcaccgtcatcaaggacaaggtcaccaaggtctcccgaggtgcggatctgcctggccccggatctgggctcgccaccctccctcccccgcgtctgctctcgctcgattcgctgcaatgcctgccgcgctgttccctcgctcgcgccttgagctcgagtgctcgctccgaggtggttttgcttcgctcgggtttggggagcaatgccgcacggtcggaggaatctgagctttttggttagacaaatctgtgctagcgtttttggcttggttttttctgcatgtgggggatcgatttgctgcaatgctgcggggagatctcgcgtcgagtcctctggttgttggggtttcagcatggattcgagtgtgctaggcctgaattgtgttagcgtagtgtatgtatttgctccattgtgtgtttttgaatctcttcctttgccatttctgtttttgaaatcattttctgttggctccctccatattttcattttggatttttgtaaaatatatatgtcgaaaaaaaaagtatgcgtctctgctgtggcttcagcttgttttcgagcaatgcaggcttaaatgtgccgtaattgtgtggaatctgtgctatatttagctgcttggtttgggttctcaggtaaacttgcttcagatggcaatttggttggcgttggcatttctgatgcggaaatttagttggcgttggcgtttctgcataactagaattagaaaaactaccctgtttcgcctgaaacctatttgttacgttacacactgacatgctataatttcgcacttctatgctatttccttcaccttgttctgctccagcctgactgtgtttctcattttgcccatctgcttctcgatttcactttagttttacatgctctgaacataatgcagggtgctgcttcgtcatatgcccgtcaagggaggaagctgacaaggcggtgaatgcctaccacaacaagcgcacactctctggggtatgccgagcattctactgatcttgttctggtagcaggttccttcttgccaactgcctaggtggaattgtcagtaactgaacccactgtagcacctttagctccttctggattgctaattatgaaagtatcccataatctggttggcaggggccacattgtcagctaatgtttgcttttggctgtccggtgggatgggatcagatgagtctttcgtggggcactttagagaaactgaaattagtgactgcgactttggttgtcggttcaaaatttttgaattgggtttgtttaaaattttgggctccaacttctaaccactaataggtgtgtgcaaataattgcaagacatgaacccattctcagtttgtagattctctggggattgtttcatttctgatttcaaggatatatctaaatagtgtcaagcccagtggcgatcgttttttctttctttcttgtgtatccaataagaggaatgtgcactttaacttctcttgaatgagttcttgctgaatgaagttgctcggaatctgtttcctagtgcagatacatagtagtgcttttaagagaatgctaagtagacaaaacaaatacacatgtaatgcaacaacccttcatgagtagcctttaggttggctaaatcttttctttgttactttgagtaggataatttgacaaaccattgcagacatggattatgaatgtaatgtaaaatacatcttctgtaaggctggtctgcaggttgctattatgatatttatccaagctagtcagtttagcctcattcctagaagcataatgtctgcggtttccaacattgtaagctgcggaatgagttagtcttatgtaggataggaggaatactagagattccaattcatggtccagccaaatgcaggaatgttgataaagcatgttgaaggagcatatacttacctgggggtaatatgaatgctttagttgcaatttttggtgccaattaatagacaagattcaagaggaagttcttttctcagtcctctgcagtgtaatcctaaactagtcaaaatatctaagccaactgacaaattttatgtttggttggagcctgcattgcttggcatgctgcaagtagcaaatgaaatgctcttttagggaacaagttgggtctatgactatgacagctgaatactgattctggtcaccaaccatataatggcctaggcttgtctctgacgtggcacacctaacagaaattagaccactgagtggccataacactttagcatctatcttggtatgcaaaatcaactttttgtagcttcaattttctggcacacacctaactgtggctctgaaccaaacagaaaaatcgatatggaaaaccaaactctgggtgtggtcaattgcggcctctgtcatataaaacatgaccacacttttaggtcactgcaacagttgggtatgaataaagtctctggattaggtacatgaaaatgcatgattctgtctcaactagcatcagttacaatagaaatatattgcttttgacgatgtgtatcttcttgaatgtttgttattatggtgcacaatgaattgcatcagagagtgactacatatctaatcccactcctgctaagatgcgttctttgttcagatatgaagtaacactgcatcatttcaatgtgactagcactaacagaggcaaaagttcattcaccaaatgaggatggtgatacaaagcatgctgtcaggtcttggttgttagagatctatatatcgtggatggacaaaatttaaaatgccttatagttggtaaacgtggatactagtattttcttgtagtcatataaccagttaggagttagctacacttttgatgccttgtttggatatggtgatattggtgacacttttctagacactcatcaaatacatatcttgtatatttgtctctgctttgagagtccgattacactcttctttctctttaactcaggcatcaagtcctttgcaagtaaaatatgctgatggagagttggagaggctgggtatgtttactgtttaagtagaactttctctttgccagtgattttgtgtggggatatccaaacagtgcactcatatttatacttgtcatgacttccagaacataagcttttcattggaatgcttccgaaaaatgttacagacactgagttgactgatttgttttccaaatatgggaatgtcaaggatttgcaaattttgagaggttcacaacaaacaagcaaaggtaataacctgcagaaaagttgctttccttatcaatagaatgataagcattgcctcaagtgtatattgtcagttaactttgctctttgcagctggctgtgccttcattaaatatcaaacaaaagatcaagcattggcagctattgaagctctaaacgggaagcacaaaatagaggtatgtcaaaaatgagttcggatataagtaacaatttatgttcactctagtccaatatatataactccaaaatgatgccattcaggacttttgtagccaccctgttttcagccacttctgcaattattaaatttagtttgattatctaagtatgcaaatctattcacactcaaccttaatttcttaagttgtcctgaattttcctagcaaatcctacctgattgtttttctgagcgagaatcctacctgacttacattctaacttccatatggtgccatgaatagctggcaatgcggcaaagcctgaattttatggctgtttaattattatattgttattattcaatgtgtatataatatatgaattacagttctttttgcattttcagatagcctatttgacacttaccatatgaattttctgcatttctttaggaaacccatgtttttttccctaaatattccaacaagctcaaatatattttgtagggttctagtgtgccgttggttgtcaaatgggccgatacagaaaaggaaaggcaggctcggaaagcacaaaaggctcagttacagctatctaatatgcccagtgcaagtccaatgcagcagtcttcagtatttggagctttacagatgggatatatgcctcaatacaatggatttggctatcaggtgtcttctgctgttcctttagccttctttacattttgcaaccatatatcatagaaaatgcttaatagttctaccaagggcagcactctaatggtattctgctttcaaaggtttttttcttcacaaattgtctccaccaatcctgttcagaacatatgatttgttaacttctgttcttctcaccgataacatatcacctatttggattgcttcctgcttgttctttggtgaacatatgttgcaaacggaaaagatctatccattcaaatttttgaaactcttagctttactccctttgacattatatattgattcttaaataatacatgttatgagtggaaactccaaaaaacagaatctttgccgtaaacgatgatcaacagtgaattaattgtagtgtgttttatttcctgtgcagccaccagggacatatggacttatgcagtaccctttatctcctatgcaaaatcaaggccccttccagaatatggttcaacctcttaatcaagggaactcgataagaggagtcaatcctgaactgtctcccagttcagttcaaaggtcctttgcaatgcagttagggagcccttatcctgctatccctggtatgcagtatcctgggtcatatcctggtggtcccatgaacaatcgtccttttggaaattctcacaattcaatttcaattaaagttccaaattcgaatgccaattccgccatttcttctagtcccagcagcaatgccggtggacaggttgaaggttagccacattcgatactctatgtatgtctattatgtgcaaagggagaaagattatttgctagagagttgatgtagtcattagcatgtactttttgtctctcaagtctatgttaagttttctagtaaacatgtcatacattttctagcatgacgtgcacgatcttttgttttgcaataatgcacttcagtacgtaggacaaaaatgattggtagcccttattataatagctgtgctatcaaaatccataaggaccataacccattatacaatcaattaatttgtctaccacttttataactgatactgttttgtgttttaaaagcaatgtaacctaattatcatgctacaggtcctcctggagccaatctatttatttaccatatcccacaagactatggtgaccaagagctttccagtgcctttcagagttttggtagagtactaagtgctaaggtgtttgtagacaaagcaacgggtgtcagcaaatgcttcggtaaaatctcccaccctctatatcttccagtgcacagcctgctaactttgctaaccgattcatataacctggatgcaggttttgtgagctacgattctcctacctctgcacaggcagccatcaataggatgaatgggtaccaattaggcggtaaaaaactcaaagtacaactcaagagagaaaacaacaacaagcacagtaaaccttattgacaaaaaggcagcagctgttatgaccataccacgccatccggtccttggtacatatttgtcggataattgaccgtcaccacattgtttcctctgctcccctaccccctcaggcagctagtgagaccagggcctgtggagagaccgtgtaccctcttttgttcaattcacattcttggagattcgtcacctcgtgtaattcattgcagcagccataggccgtagcagcagtttgtaccttgatcagaatcacttgtacacaaagacttgccgattcatttaattgttacctcctctaactgatagccagttttcatgctagaattcgctgtggtttactgtgatttattgccgcgtcaaaacgatccatggtcactgacgcggtggcgcccccatgttctgaggaagttcaggacatggttagtgggggcactagaagcagcatggatgattttgatggctggacagaacataacatgtttttgatgtcctggagatgagta

SEQ ID NO: 4411 - DNA, 6281 bp, Sorghum bicolor
atgcttatgcaactaaaatgtagggcaccgatcaatgtgaagctaaggccttgtttagttcaccccaaaagatttcccgtcacatcgaatcttgcggcacatgcataaagcattatatataaatataaacaaaaactaattacacagtttacctgtaaatcacgagacgaatcttttgatcctagttagttcataattgaacaatatttgccacaaacaaacaaatgtgctacaatagcgaaatccaaaaacttttcgcatctaaacaaggcctaagttcgtgtagtacaatttttttagaacttttgaccctactttcaagtgtgtgttttcctaaatggatgaaagtagagagacttttcgcaacggtttcaatagagacaaagagcgggaataggtttcatagttgttttaaccaaacaacttactgtttttccacaacgtattgttcaaagttgcttttccacagctcataactgaacaaagagacgctagagtacctaaagtggctcatgtgtccatcgctctccaaccagcgctcctacaatgcgatctgactgctaacatgcagattgacaaagagaagaagagtgcaagcaattgttcaaggtcccaaaacttaagggcctttacactaagtcataattaatacagtaatagctaatcctttaaataagaaaaaaatgtggaatattcaaacaaacctgtaattgattgtttgttattaattggaccaattcaccaatgtaaggtccagtggcatgtccaccggactgcttggcttcctagcttccaacttgaagtgaaaaaaaaaatgatttggctatgcctcctttacttttactttagactatctccaacaatcgtcacctaaaatacaagactcatttgtcctttaggtagcgctacagataaaaggtttcatacctatttttagtcttctccaatcacaagacctaaaagacaatactctctgcataggtctcgaagagagaggatacccaaatttgagttatgcctctcgtgatacccaaagtgggtcttctgtatgggtactctgttggaggctataggtactgtattggagacccattttgggtttgggttcccaaatggatttggtgttggagacagccttaagtgaaagaatgccctggttatgatgtttttttttttcaaaatttaagaccccatcatgattcagggcctccaaatcttaggtacagtcctattcctaatcgccgagttgtgttagactagtaatctttgttcgcttcaacttatcaccatcaccagaattttacagtcagccagcaatgtttttctttcacaacaaatcagcatcagcgtcattctttcttaatttgtgtactcggagtcggagctgaaacaccatctgttatctgttatggagggagtaccatggtggaggttgcaactgacaatcaagaaaggagctagaaatgtgcttgagactctgagagggacgtcggtatctttggcctccatggagctgagctagaaagctgcaagctgtaattgtccactcccgcatggccgcatgtgctgcatggcatgtagtatgtgccagtgtcaacgaagacagtgatcaactccatctgttgcctgtttcgtgatagcatgccatcccaattcccatacccccatctccgtcgttgttgctggctcatcggtgtcgatcgcagcagttcgtttcatcacatcactctgcctaaaattccatcttcgtcaacaaccagctcgggaagcaagcagcaagcgaagcactgaagcagaggactgtcttgcatgccccgcccctctgctcctcctcctcccccactccactccacgtctccgctcccggccctcgctcgcttgctcattaatggcgggcactgcatggttggcgccatccatgcccatcaatgcctccacccacctccgggccgccccgcccccatctatctacatatccacgccgatcgggcgcttgcttccaatccagcgccggccggaccgttgcatccatccccatccccatccgtcacccaccccgcgcccctcctcctctcccaatgccggctgccggccagctccgtccccgggatccttgagctggaggtgggtggcgacgtaaaggtagccgcttgcgttactactgcggctcatctccttacttatccatcactgcaaccctgctacacatcggcgcggtgccgtgccgtgcttgattctgttctgtgctctgcttgccgtttctttggtttgtaggtggcggtggatgaccagctctcagagtctgagcggaggatcggagggcgtttcgttaggtccgcggttggtgagcggcggtcggagcggtctcgcgcgcggcggggtcgttgggtgatgcaggaatcgggctctgggagggtgggaatacctcgcgctcgcgctcaaggtgctcgattaattacctagctagtggagcgcgcgcctgtgagccgagcccttcctgctgcactgactactgggcttgggagatggttgggagcgtgcacgtcaatggatcggtccacggtggcaatggcacggccacggaggagcggctggacgagctgcgccggctgctcggcaagtcggagggcgacttgctgaagatcgtcagcgtcggcgccggtgcgtggggcagtgtcttcgcggctctcctgcaggatgcctacggccatttccgggacaaggtgcagataaggatctggcgccgcccggggcggacggtggaccgctccaccgcggagcacctgttcgaggtgatcaactccagggaggacgtgctcaggcgcctcatccgccgctgcgcctacctcaagtacgtcgaggcgcggctcggagaccgcacgctgtatgctgacgagatactcaaggatggcttctgtctgaacatgatcgagacgccgctctgccctctcaaggtcgtcaccaacctgcaggaggccgtctgggatgccgacatcgtcgtgaatggggtgccgtcaaccgagacgagggaggtgtttgatgagatcagcaagtattggaaggagaggatcagtgttccagtgataatttcccttgccaagggaatagaagcctcgttggatccaatacctcgtatcattacacctactcaaatgattagctctgcaagtaagaacctctcttgtctctgtcttgtccctgcctgcgtattttaaacttgaaagattcaaccaacaagtttccttaaggaagttgaatagtcttggttgctgaaaaaagtttatgatttgtgacatgcatgataagctgattgagatagtgtaataattaaatagcagaattctttatcagtgtactccctcctttccaaattataagtcattccaagaatcttggagagtcaaaacattttcaagtttgacaaaaaatatagagagaaatataaagatttatgtcataaaataggtacactatgaaaatataactaacaaagaatctaatgatacttagttggtacaaaaaatgttattattttgctatataaatttagtcaaacttgaaaaactttgactctccaagattcttggaatgacttataatttgggacggagggagtacaaaatgttatcatgtggaaagttcatttgtgtactgcacatctctgacaaacgaacctgatgtctgtagtctatgctaataatttcattacgttaggacagcatgagcccatttactgcttctcttctataccataactagatagtaatttgcacaattaatgccattagctgctgaacacagttagtttgtggatatgcgctcaccaacaatccattcgctccatgatatagtattaaaatttctcctccatttgaagactgtactgaattctaattgatgtgtttacttgtctgttccaattctttatttaccatgtgttttatgtatactgtaagtcaaacacaccaaggttgtaaatttatggcatgatcatgacatggtgcttatcttcattcttcaatactctgatggatggaatggccttgatcttgacatgcatctggttgaaatgtatagtcagttgttgttttttctctgcttaatgcttggcctgcatatttgagctcaacagtacagtctgatattttttagggatgcattgcagctggagttccaactgagaatatactgtatctaggaggaccaaacatcgcctcagaaatttataacaaagaatatgcaaacgctcgaatctgtggatccaacaagtggaggaagcctcttgctaagtttttgaggcagccacatttcattgtctgggacaacagtgatcttgtcactcatgaggtgatgggtggcctgaagaatgtctatgcaattggcgctggtaaaactaacttctatgtctttttagctgtcaacactattgtacaattggcattctactccttgacattgaagaaaacatgacaaacagggaaatgtttttctttgcttaaattttagttgatctcttaatggtcatccatcgggccatcaacatgacctctttgcttgaatagagtatgggtggggtacactaaaatcagaagagctccttagaattttaataagaaaagaaacaatcgaattggaaaaccttgaaatagggaatagagttaaatgcttgctgcttactttttgataatttccattctttgaatgaacgttgagtacctattttatcatatttctctttatgtttcaggaatggtggctgctttaacgaatgagagtgcaacaagcaaatctgtatatttttctcattgcacatcagaaatgatcttcatcactcatttgctgacagaacaacctgagaaactcgctggtcctctgctggctgacacttatgtaactctcctaaaaggtcgcaatgcatggtatgggcaaatgcttgccaagggagagttgagtcctgacatgggcgatagtatcaagggaaagggaatgattcaggtaatataatgactgttttttttttgtcctgttctattgattctgagaatctaacaaatgttggaaggcaacaatttcagaatatgtcgaagtttcctagatatttgataaccctgacatctgcaaccataccttttccttatttacacaccgtgatcattttattattccattggacagggtgtctctgccgttggtgcattttttgagctgcttagtcaacccagcttaagtgtgcagcacccggaagaaaacaagctggtcgctccagctgagctatgcccaattctgaagaggctttatagaatactgataaaaaggtttgtgctatgtatcaccattactctccacataactggagagatttacagtgtgcttgaggagtgaaaagtgaccgcttctcactcatgcatttcactgctttcgttttacccttctgatatagtatacctgacttgtgtgcagggagctcccagcaagggacatcctccaagcactgagggatgaaacgatgaatgatcctcgggaaaggattgagatggcacaaagccatgcattctaccgcccgtctctccttggaaaaccatgatctagttaatcctgtaaattagtagaatataaacagacgctgtgcttcgagcaggtgtctcccctgtgcttgctgtcctgtgtccgacctgcatggggctttgtgagttgtctaattctttgtgcttcctcattgctataatgtacaagagattactgaatcaataaatgttctaagtgcatattatatgaacacccaatttgaaaagtagtcaaggaagatttcttgctggaaattggcatcgtgcaacgtgttgtgtgggtgtgtctgattttcacggtcaagatgggcttgtttgcggatgcttttctcagttttctgcaatattcctgcagcataaagatatgtaatgacacaagaactcacaagatgagaaacttgcccgtcaggtgctggctgaccgatatgtaactctcctaaaagagcacaatgcttggaacatgccaatggttgccaactgccaagggagagaattagtcttggcatgggtatatcaaaatgctacggagtactccctccgttccaaattataagttattctaagaatcttgaagagtcaaaacattttcaagtttgcccaaaatatagagagaaatataaagatttatgtcataaaataaatacactatgaaaatataactaacaaagaatctaatgatacttggttggtaccaaaaatgttattattttactatat

SEQ ID NO: 4412 - DNA, 3884 bp, Sorghum bicolor
  misc_feature (1823)..(1922): n is a, c, g, or t
gctatggtgcaggaagaacacagagctagagtgaagcgcataccagctgcttagcaattgcctgaacttgttcttctggaaggcatttatcatcctcaagcacctcaaacagttctccctgagacaagcattttcactgaagttagacagctctaaacgattgaaaccagtcatgagaaaggacgaggtaatcaaactgagttcttgtgtacctgagcaaactctgtgacaacacaaaactcctgaggggtttcaaaggcatcgatcatttctattatgttctcatgtttgagtttccttaggatctacagaattgtgtacgacagcaagcagtgagatggtatcagtataatgagataagaaacaccattgcttaatgctaatttgctatgtactacagttgcaagcacagccgaatcgcagcagacaccacaccaaaattatagttttcatagccactcccaatccttttgtttaacaacaaaacacccaaatccgaagtacatgtaggacaaaacagaaatggtttacctcaatctcctgcctaaggttgtgtatatccttatcggtcttcccgtgcttaagaatgaacttcatggcgaccgtctgaattggaagcaaaacaggagaaaacaacctctatgaaatccaaatcacacaaaggagttcatctaatcatcagatgggcccaaatccagcgggtccaggacactggaggagcgggggacgctaacctggcgagtgtacttgcgcctgcccttgtaaaccttgccgaaggagccctccccgacgaggtcgatgacatggtaatcttctatccccatctcgtgcccagcaggcgcgataatcttcgcaaaatcgaagtagatacttgtaaatagatcagatccgattacaactagccgttagggtttggatgctcgatttcgcacagcaggaaggggagaaaggcggcgggcgtacctggttggtgctcgtcgccggcgaaagcccagaaaacggcccgggcacctggcgtagggcggcggcggtcgcccactcggtttttgaaattttgcccgctcctcagtcctcagtcgtcgccactcgcggagtgagagagagagagagagagagagggaggacgggagaagcgagcacgcggcgagctgaacgggagaagaaaatttgaacaaaaggcttgcccattctaactgggcttgcagtcgaacttaagcccaataaggcttgcccagtctaactggacagcccagagcagcccagctttgcaaagatcacaggaaccgtgtccgtgagtcccgaccgcaaaattcaaatcagttcgagctacgaaccatttcaatggcgacctgttcttccccaccccttcaccccaaaccctagcggatccagcagcccccccccccccccccttcatttcaaagtggaaaacccctcggaaaagggaacccccgcggcgaatcaagtcaaagggcgtgttcccaaaaaaaaagagggccccccctgccttccccaaaaacggctgtccaataaggaacaacccgcccgttttaaagaacacccggaccccccgttttccaaaacccaccccaaaggctgcgccccccaagagcccctcccgaatcccaaggagttctccaaaaacaaagacccaattttttcccccaattccccaaaccattttttttttgtcccttgctgaaaaaaagccgcatttagacaggaatttgaatggatttttttttgcgggtccggttggggggaaatgaaaatttcttaattgaaccggaattagacaggaacccgaactaataaactgtgannnnnnnnnnnnnnnnnnnnnnnnnnnnnnnnnnnnnnnnnnnnnnnnnnnnnnnnnnnnnnnnnnnnnnnnnnnnnnnnnnnnnnnnnnnnnnnnnnnncctttccccccaaaccctaggggatcgagcagccccccccccccccccctccattccgagctgcaaaccctctcggaaatggcagcgccggcggcgatgcaggtcaaggtgcgtgttccagagaacgaggaggtcgctcgctgccttcacgagaagcggctgtcgatgagggagcagccggccggtttcaaggagcacctggaccgcacgtttgccaaagcctaccgcaatgtctgcgccgccaatgagcccatccggactctcaaggagttctctaagatcaagtaccaattctttcctcctacttccccaacccattctttttttgtccgttgctgagtaaatgctgcattgagacaggagtttgattggatttttttgtgcggttcgtgttggtgggaattgagattctcttatttgagctgtagttagacaggaaccggatctaataaactgtgatttcagtaaaatttcaggatttctgtggttagcttactttcatatcttgagcttatgggctaatatcagaaatttgtgtttgcattgctaatcaattctgtatcttttgttagcctacaatccacaatgtgcattatgattctatatacatatatttgttataaactctctctttttttcgtggtccagaactgtattacacaaaagatttaattgtagtccagagctttttgaataattttgatttacatagctggatgtttctaatattctctcactgtttacagtggtgtggggccatggctaatacgttgtatgaaaggcttctttccagagtccaaacaggattctccaacgaaaggtaatgtagcaggacagtatgataaccgttttcatgcttaactgggtgccgtttgaaaatcctttcctgttttttttctttaggcaccaattctctcttctgtagaatatgaaatggttttgtttattttaacaggaaagaaaacaagagtaccaaaatgccctaagccaaagaagaatactgctgctgctgctgcttcttcttcttcttcttctcttggtagcattatgcttgctatttcgatagtataatatccataaaaaacattatactttttgtttaattccaatacttcttttgaaggcaagggacctcctcctaacttaaattgtcagaatattcagtttactcctccattttcatcccaaggaacattggagctgcaatcgtgtggtaaaacggtatgtttgaattttctatggataaaccttgtgctgcacagtacacctttcagaatttacatcagagtataccgatttttttttgtcccagggttcttctgacttcagtatggacaaggatgttgtatcaatggacaattgtatactggctatgccaccttgtcaatcaagtgaagagtttcttgaagcttacgaggttgttctgatattggatgatcgtgagaattttgggtttgtatgaccgtatcctactcatatataagcattatatttgtccagatacatcaaaattttgctctcatgattattacatttttgcataggtattcctcaagaaaagttgcttcaaaaaaggttgcggataacattagttcgcagtttaatgtacctgtagaggttagttataaactgactctgattaaattttttgtggcctacaatcctacatactgtttcctaagttcataaaattgtgggggaattcagtattctggaccactgcagcctaggctacagctggtagtgcaactcgcgtgtgtaaaagttgtatgctaaaccccttcttatgataaatcaaagacgggtgatgggatctttcaaaaaaattgtggggaaccttgcaagttgcaactcgtgtgattgtaacttgcttataaatatcttaaacacaagcatgtcggtgatgtaccaaatgtgtttgttcttttttaacatatataaaaaaggtttatgatgcttata

SEQ ID NO: 4413 - DNA, 3726 bp, Sorghum bicolor
tcgtcggtgacagcggcggcacctattcttgccttcacatgggccacacccttgcgactagcggtgccaggtgtcgagcccacggccagcaggcagcaacgatggcggtcgtcgcctagcgttgcccacctaagatcatagacacgtgaagcttcgtatttttctccactaccatgtaatagtgcatgggattttatagagcctagtgatcttgtttgatctttttaggagtgtgagatcttgttctaagagttcgttcctttttatgactttttctccttttttgtaatgatttttttacaccatagtctgcgcactcgagaaggctcactcgatggaggcttctcttcagcagacaacccctagtggtcaagtgccaggaccacaacgatgttaggtgacgcctatagtagttcccattgactccacgacaatattgaggtccatctgtgctgcagcagcaccctcctggactccggtgcacaaaacctatagactatagcccacaaaccgccttgtacctgaccttccccaagatataagggaaagatcgactcccatagatgagaggatcttctcccttccctcattcattaggaggttgggcggtcgagcttggacaagaacagagcaaccaagaggaacaataatgtccctcccagcaaaccagcaaaagagaggagtgcttcccttactcgttgggggaagcaatgacatcactgccatcgagcgatcacttgtcaaactctctttctccttcattgtaacctcccaatttgggtgctctcgaataaaaagactactcgctactctaatgggtgttcttgagtgatcgagccatcggagacccacactcctgatgtccgatgaacaacaatgtttgtcgcggcaacgaacctgcgagagctagcgcgccaggtagaggagcaggtggcctcgccctagaagacaatgtccacctcccctgcgagatcactatcacagtcagggccttcgcccctagccaagttgtcaactttgggagctttcgtatacattattgcagactgctacggcgagcttcactcaggtaaagtaaaatttgcccctaaggacacatgccttcacaatgtgaaatacaagattcacagtgaaattggtgcccaacatgagagagataatattctattatttttcttctatgaatctcagtacaaatcatgtaatccacattatgagagctaggccttgtttagttcaccccaaaaacaaaaacttttcaagattcttcgtcacatcgaatcttggggcacgtgcataaagcattagatatatacgaaaataaaaactaattgcacagtttgctgtaaattacgagataaatcttttaagtctagttagtctataattaaataatatttgtcaaataaaaacaaaaatattacagtgtcaaaatccaaaatctcttcggaactcaacaaggccctagtgtttatgaaaaaaatactgtgttcgcttcacccgctcatgaagagcgagtcggtggacaacgagccagtatactttggcagttggcaaaattttggttttttgggttaccgtagcacttttgtttttatttaacaaacattgtccagtcacagagtaactaggctcaaaagatttatctcacaaatttcaggtaaactgtgtaattagtttttatttttatctttatttaatgctctatgcatgtaactaaagatttgatgtgacggcaaatcttggaaatttttgcgaactaaacgaggccattatattcatcggtggacaaccagccagtatattttatattcatctttccacatgcttgcatgcatgtgtacgtcgtccaatccattcagtatgtgcgatggaccggcctgtcaggtgtttttttatgataagcaactactagtactagtatactccaactagctgtctgggagccaccggccaccgctataaataccagctgtcctccctcatcgtcctcagaccaacccagccatttcccctgcttgcacttgcacatatagctcactgccagtgccaagtgccaactgctggcttacaagaagcgtggaccaaccatggccaacatgctcgctacttccctcctcgccgccgccgtcctcctggcgctcgccgcccctgctgcagtgctcgccggcgaccccgacatgctccaggacatctgcgtcgccgactacaaatccctcaagggccgtaagtcatcgagcacagaccacaatatatagcaacattgttttgtttttcggtgagctccacactatatatatatacaataactatatatgcattaccagcactgcggctgaacggattcccgtgcaagaggccggagaacgtgacggcgaaggacttcttctccaacgcggtggcgatcgccggcaacacgagcaacgcgttgggttccgcggtgacgtcggcgaacgtgcagacgctgccggggctgaacacgctgggcgtgtcggtgtcgcgcatcgacttcgcggcgtggggcgtgaaccccccgcacgtccacccgcgcgccaccgaggtcatcttcgtcctcgagggattcctcgacgtcggcttcgtcaccaccggcaaccgcctgtacgcgcgcaccgtcagcgccggcgaggtcttcgtcttcccccgggggctcgtccactaccagaggaacaacggccgcggcgccgccgcggtgctctccgccttcgatagccagctgcctggcacgcagtccgtcgccgaggccctctttggcgcctcgccgccggtgcccaccgacgtgctcgctaggagtttccaggtcgacgcaggactcgtggaggacatcaaatccaagtttccttccaagtaggggctgctgtctcatgcgcctcatcagctcatgcatggaattaatgcaagcaccatgcacgtacgtactatatacgtactatacacttacgccgatcgatcaaccgagtgtgtgatttaattgaacaagtgtcgtcatcattttgtattctagctgtaaaagcaagtgtgatgggtcaattaattcgttgggttctttttagttcttggtgaggtcgtgatggccatgcatggcttcaccgacagttcactgttgttgcgtttcaatttcttccccatgtgatcgagacttgtaaggtggtgtgtttccgtgtcaatttgcaaatccagagtaatgaggtgtcctgattggtgcctgatcaaatacacatcatcatgcatacacatcgtcattcagaatttggagtcgtcaaaactgtgagcaggcgccattgttctcaaacgcgtgtaacaatgttaacagctagcacatcctccgtttgaaagttggactcaagctagcaagaattaatcctgacatcattaatcttgccatagcatgtcttccgagcccaaatcaccactatactaaaaaggatgaagttgatgatatatatatagggagtgactattctgtacgcgcgtaaagttcgaattatcgcatcatttagatcccaccactcacagcccacgctgccgcgcacatctttcttgccaaactaaataaaccaaatataattgtatacttcagagttacaaattaattaattacagctccccacgcttcccctccacgtcctttctaccaaattaaaacaaatataaacctgcgcttattgtttgaacatgtgcactgaatctttccttgactcaaacgtt

SEQ ID NO: 4414 - DNA, 3663 bp, Sorghum bicolor
atattattggtctcagatggttacgtctaatatattgggacagggagaataagcaacaacacaccggcataagtataggacggtggcgggttgagtaaggcgtgggtagattagctatccacccttgtagattagctatccgcatagagaattttacatctatactgtacaagttgggtaagatacatgagggttagagcccgaatagaatatatagaattcattgtattttaagcatcaatggcaaaacgacatatccaaatatgtatccgtcggtagaaatggcactcatacttgcacccatagtaaatttttatattgacacccatcaggtgcaatacccttgggtagggttgtcatcactatgtgcatgtcatgctagtctccgattgcacttgtatttcatatggaaacatagaaatagtgtgctaggttaagattaatatcgaatgggtgtaacatgacttgaacttttgtctaacatctcgccttgctagtaatttggaaagtcttctcacaatctaaaacttataaaagaaattatatgcatttttcgtggattttatgttgttcaattggaggtttctctagagtaccccttccttatcaattcctaggttaaatttgagtcattcatgtaatttgatagtcggtctgagtccatttttctttttttttctctttttatttgagagggggagggggcacaatcccctcacttgataatatattaactttttaatctcttgttatgttgttaaattagaggtttctctagattgccccttccttatccatcccttgttgtattaaccctataccagcagtgttttccattcttcacaacaaactagctaaaacaccctcttacatggacacatgcacataatgacataaacatgaagtacaactcgccctagctatttgctagcatattaaacatcgcatatgcacaaccatcaccagctcaacaatcaccacttaccttgtttagttccgaaaactttttggttttcggtactgtagcactttcgtttttatttggtaataattattatccaatcatggcctaactagactcaaaagattcatatcaggatttacaggtaaactgtgcaattaatttttattttcatctatatttagtgcttcatgcatttgccgcaagattcgatgtgacgtgaaaaattagtctctgcctctgctgcaagaagttcccacagcgcggcagccaccatgagaggcaatttccttgtgtcaaataagagatatacttgctccattcgaaatgaaagaacagtttgacctccgttgctcttatcaattttttcaacctaaatttcttgggcgtacatacatttggaagaagaaataaaaaatagtaaaaatccacatgtcggcgtggggggcatgcagacgcgataaggcgaccaaacagcggccgactggcatctgtcatttgtcaaggagtagttgccacgtccatctgagcggccgagaagataaactgaacaccaacgtgacgcacgcgcgtcaggatcacccacccctcttctccgctggcctggccatgacaacaatacacttgcagagttgcacgcgcagccgaaaacggaggccagccagccagccagcacagagcttgttccacctgtcgccaagtcggcactcgcgccgacgcgtccaacggatcggagaagcctcggaaggaaaggaaaagaaagaaaaatggccgtcacctttgaccactgacctggcctgcctgagccctgagctgagccagcacagagagacacctcccctcccttttcttcttccaggtcaggtcaacctccctccctccctcctcaccaccaccacctcctctctcacatatatagccacccgcctgccacagtttattacaagcccggccatcccgatcgagctcgcttcaattctcacaccgtacgttgcacgtggatccatccgatccctaggctctcttcagacattgggacatggggaacggactctccttctccccgtcgtgcctgcacctgccggcggcggcggcgcccacggcggtgcggctggtgtactggggcggtctgtcgaggcagctggtgatcacgggcggcggcggcggcgacgtcacggccggggacgtcgcggcggagctcccggcgccgaccgcgggctacgccgtgtgccccgccgacgccttcttcgtcggcctcccgatcccggccatgtctccgggcgaggagctccttcccggcaggacctacttcgtgctccccgccgcgcgcctcccctgcctcaaggcgctcacgcccgctacgctcgccgcgctgtcgtacggcgacggcggcagcaatggcaatggcaatggcaatggcaagaggaagcagcccttgtttgcggtggcgggcccgtgcccgttcgagcacgtcaagggcgccgacggcgccgcgcccctcatcagggtcctcccggagttcatcgagaagctcatcacctgcgacgcagcaggtggccgcggcgccaactcaaaagccaaggacaaggacgcggagctgtgcagcacgcccgagctgaagcggcattacgcgcagctcgtcgggaccggcaggagccgcccctggtcgcccaggctggagaccatctccgagcgcaataggagccgctggatgacggcggcggcgaggaccatgctgtcctcgcgctaggcgctagctgttaattagctccaggagatttccgcttaattaggaacgaacgatgaacaccaacagcaaaaaaaaaaatgtatttttttttcactgtgtctcgccattgttcatcctgtccacgaactgagacacactggctgatgattgacgccatccaaatgcatggaaggctgcaatgtgccgccgccgccgcgtgtgggaagcctggaattggtcggacacgcgtgggaggatgggagggactcgtcgcgtcgaccgcagtctcatcgtcttctccggttgaccgggccgcgtccgcgtcccgccgtctccttgtccttgggtagtggggtggtcggcgtcggggaaggaaacttcgcggaaagagagcatcggccaggtgggctgggcctccttttgcttttgcggcagagcatggtcaggtccacgggctgtcaacgaacgctcgcgctcgcgcgcggctccggactattacttcgaacgcggccgggccgaatttcacccggatccgcgggccttttgaggatgcaacaagcaggctagcccgcttgcatccttctgctcttcctgcacaatatttcagtacaagtagaagtagaggacttgtagcgcttctcctcatacagtcatacccagaaaagcaaaacaaaaacaaaacaaagggtctatggactctggctaacagaaaaccatatactatgcatccattggtattttgcagtgactttcacaattatcatatatatattcttctgtgtcaacagaacacacacacatggacacaccatcagcacgcggatgcatgcgtgcattagtactgctactacatagtcttcccaggtaaacagtccatcatttacagactaaactagaataccttattagctagctgcatgcatgcttatggagtagcacgccgttggatctgcaggaatgctgatcgaatgca

SEQ ID NO: 4415 - DNA, 6098 bp, Sorghum bicolor
cttagctcaactgcatgtatgctctgttcctcccgaggtgcccgaatctcttgcggcccataagtataggaataggaatacgaacgaatgaaggcccggcccagcccagccgcagccgcagccgcaatgtttgagatgcttcgacacgtacggctcccgcgacggaacagaactgaagaggtcgcttcgcttcgcttggcagttggcgcacgcgcgcgagtgaggccggcgaagggggtgccggaaggaaaactgatggccaggagcgaccctacgttgccgcgccaccacaagggggaagaaactatcatcgaccggaaaagccaaaaaatatctcaccacatacctgcattgcattgcatgtatcttccgcgctgccaacccgctgccacgtcggcacgtcccgacgaacacgcaaccggcctcttatccccgtgctgggccccatctatcgctacgctggccaggccctcttttgccattcagtccctacgcttctctggaattcacagtccactaataataagggaacagatcattcgaattcatcttagaattctgttgtgtcgcgtggaattcaaatatgcaaatccaatcgaatctagtcactactgactaaatgctagtttggcacgcctactcctccaagtactctttcataaaatcggctcctcctgagatgatatttgatgtggtttcttcatctcctttaacgaagctgctatcggatccgtgtcaaacatgttctcgttctaaaaccatgtgacttttctttgatgtgaagttctttttgaagagtagattccatgtgttatgattgtgtatgaccctttttaaggcatagttgtgttactcgcttagcgatttttttttaacatcacatagcgtatccttgacgcggacaagcgcatccaccactgcttttgtgcatgtcctcgcagccatcaacctttttccccctcttttatcaccgctttttctagggtgttgcacattgtggtgctagcaaaaaaagtgttatgaggctgcattgttgcgcccaacgatacatcataaacccttgtagatttaaaggttgtttcgttgactacattgcaaaattatctaaaccaggcgacgctttgaagccttaattatttgcataggcatgaaacaaacacgccctttaatcgttcgtgttgaatataagaaaaaaaaagcttctaaatttgattcctagaaacaaaatccatgtgtgcctagagagttactatctcaaattccaaattaatatgtatctaaaaagacaaaacatcttatagttttaaataatgagaatagttcatttaattttgattcgaaccgaattatagccaatcctaatcattccaaatccaaaaacaacactatataaaattccaataattcatataggatccagaatgtaacgcttatgaggctatctccaatgtgagatctattgcgatatctaaatccaaaataaatctctaacacaatgactatagctcccaatagagtatctatatgaaagaatcattttagatgtcaggaaaaatataacataaatctgagtatcctctttcttgaagatctatttatagaaaaggttgtttttagatgtagaagattaaaataagtttgtttatagcactatttataaaacaaatacgtcttgtattttaggtcgcgaatgctggagacccgagacagtcttagaatgcgcggttccaaatttgccttgagcataccgtttggaccctaatctcatattctcacaaagctaaaggttccgtatggcagttttccaacccgggtgccgccactattgcggtagatttgtgggtgcagaattccggccgcgcaacccttggtgctcgaggccgccacgtcggagctcgcgcctcgcgccggatcacacgtggcggcgcgtgtgaggctcacggagatcgcgagcaccttccggcctcttatcgacaagcccacttcagacgccggatttcatttttcgggaaaaaactagacacaagcagcttctttttcccgattttcgttttttcttttctcttggattggattcaccctgctcaaaacttcggcggcggcagtagcggcgccggcgaccttctccatgaacacggtgtcttcgctgtctttggtgccgcacctgctcattaagccctccatcgcctgcttctccagaaaggttggttctttctccctcttcctcatcgtttccggcttccgtttcttccctgtttgttcttctctgactgatgccgtcaatagtgcaaagacttttcctgtgcggatcgattttaagttcagagtgaatcctgcttctcgctgggttcttatctccttcattcgttcgcgtcaaaattgttggaattggcaatctgctggatacggaggcctatctctgctcatcgccgagctctccccccaccagttgctcttaggcctttctaattctgacgacggtgatgctgctatggttctgcagggcgttggccgctatggcggaatcaaggtgtacgccgtgctcagggaagacggagctgagttcgccaagaacaacaacctggaggccctgttccatgtggatgaccccgggccgaggtgccccatcaagaagggcaagttcctggatgtgaacgaggcactcgaggtggtccgattcgacatccagtactgcgactggagggcgcgccaggatctcctcaccatcatgcttctccacaacaaggtaccataagttcagttccttcagttccagcgctgctaagctcagagaaacacaaccttggtttcagttgagttcagttgctatcagatgttcagccatggatgtagtgaggaattgacacagactctgtgccatggtgcattgctgcaactgaaatgcaggtggtggaggttctcaatcccttagcgagggagttcaagtcgatcggaaccttgaggaaagagcttgccgagctgcagcaggagctggaaaaagctcacaatcaggtatgctaccataccagaacaagcttaccaataccaccacatggatggaacctagcctgatgcttgttttacatgtctgatgcaggtccatctatctgaagctagagtttcatctgcactcgacaagctagcgcatatggagaccctggtgaacgacaggctattgccaccagatggagcctccggtacttccacagccgagtccacttccctggttccaagcacatcgtccaccgcccatgtccgagccaagaaacagccacgtcggagtcttaacgtgtccggcccagtgaagccgtacaatcccagcctgaagaacttctggtacccagttgccttctccagtgatctgaaggatgacaccatggtaaactaaaccacttaatatgtctcaaaagccattacagagtcagagttgggagttgctgaagcgtgtgtgcttacttgatgagctattcatatgtgtgttctcaggtgccgatagattgtttcgaggagcagtgggtgatattccgaggaaaagatggaaggcctgggtgtgttcagaacacatgtgctcacagagcttgcccactgcatcttggttcagtgaacgagggtagaatccagtgcccttaccatggtaagattctagggattatcttcttttcagaagtgtacctgcttgtttgtttaccctgtctgaactgaattaatagtaacagttacatagtcatgcatacagaacacaaattttttctcttaaaggatcatgcacatttagttctacaaccttaaaagtagttgaaaatgttctgacaaaggaagagatttgtttcttcaacattcttattgctctttatgatatcgttttaaaaaaaatatcacaaaaaagcaaggatgatgcataattaacatctaggatttataataatcttcaggttgggagtattcaactgatgggaaatgtgaaaaaatgccatcaacaaagatgctcaacgtgcgcatccagtcattgccatgctttgagcaggaaggaatggtttggatttggcctggggatgatccaccaaaggctacaatcccttctttgctgcctccttcaggatttacgattcacgcagaggtaaaagcaaatcctcctatgatgcaacgattttattatgtggcacaaatgtattatattgtaacggtgttctcttgatcatccaacagatagtgatggaactaccagttgaacatggactcctcctggataatctcttggaccttgctcatgctccttttacacacacatccacctttgccaagggctggagtgttccaaggtatattatataccttccataccacttcagaaaactgactgatgaatatgagttgtaatgatcatggtgatatgtgtaaaataacatgctgatgccatgttgtttctgtcagcttggtgaagttcttaacacctgcgtcggggctccaagggtactgggatccttacccgatcgacatggaattccgaccaccgtgtatggtcttgtcgaccatcgggatctcaaagcctggaaagctagaagggaagagcacccagcaatgttctacacatctccaccaactccatgtctgcttgccctcctctaggaataaaactaggctgctgtaccggatgtcactagactttgctccatggctcaagcacgtaccgctcatgcacctgctgtggtcacatttcgcagagaaggcaagttccatgctcttgacaactactttgctaattttcctgagcttgtggttaatggtggttaagtctattcaccattgttatctataagatatcagtcaatacgatcaaggaaatactgaattaaaagtacctctctgaatactggttgtaaagtaagccagaatgcagctggaattgattcagaaaatgttcttgaaatctctaatatctgatcgtgctactcctggatgatcattgtgcaggtgttgaacgaggacctacggcttgttcttggtcagcaagagcgaatgatcaatggcgccaacatctggaactggccggtatcatatgacaagctcgggatccggtatcgattgtggagggacgccgttgagcggggctctgaccggttgccattcagtaaccaagccgagagtggatcatagccggtagtctctttcttcctcgtcgcattttttcgcgagacgacggacggccagaattagttaccatggcgtgcgtctctgcgcggccagatgctgctgtgccttgaaggattctctatctggaaggtgaaagctgatggagaggatgatgggaaacatcatggtctcttctctggtgtagcaatgtacactagcgacggcatcgtgggatgcaattgtgatctgagattgatgtcttttttttttctctctctctcttcttttttttcacccttttgtgtaaagattcagcaaatgttactctgtcaaagcatgtataatcatactaccaactacggagacatgttcatatgagaaatggcagtcgtctaatcgagttgcacattaggttttgctttgatatctggaacccgaaaaatcctatgtaacaatttgaaagtgctctaggtattctttttgcacattagcagttattacctcctatattatacgaatatttgtgaaaaatgtaacgaactgaaagaatttttacaagtgtttgtgccaaacaatacagaaaaagcgagttgccatggatggaactgtcccagaggtcagagttagggggtgtttggaactgctctacaaaccctgctccataaactccactatgaagcggctctaaaaaactagagtttgtggaatacctctttaggtgctctcacaactctacccttttttctcgaactgagtgcgtagagctgaaaccgtttggctaaaaaacgtagagcgaagctaaaaaacgtggagcggagcagtcccaaatacccctcccaaacacccctccctttagatagacagacggattgttggaacttggaaagggagattacgagatggaagtgcagcagtcatctggaactggaactggaagcacatcacgttttgccgctttggacatcggg

SEQ ID NO: 4416 - DNA, 5165 bp, Sorghum bicolor
aaaaaattcaatatttatatttatattttcaaatagatttattataaaaatatatattttatagttaatctaatgatacttgtatgggtgtattttatatactcttggaatagttattcctatgatcaataaattacattgcgtatgtatacatatccatttataagttataagtttgagtacgttgatatattcatattgtacgtaatactctagggggaggagatatgtgcgtcggggccagtgccgaccccaaggggtaggtaggaggtgtgacggccgagggcctaagcaggataggagcctaaacccaagtatataagatttcatatcctttaactataatccattaggatttagattaacaagaaggtatagtgtctcatcagcaaaaggagtttttggcctctttctttctaggaggcgaggagccgagccgtcaatgtttgcaggctcacacacgacacatagtcatcgcgacttctctgtttcgcacttcggcacttggtgagacgacgacacgtaggcacacaacactgatcagatcaccatacgatcaacatcactagcgctgatcaccaacatcttgacgcctgagttccagaatccagacgatgatgttctagatgacggcggcgactaagcagctaactagctgaggcaaagccttctgtccttgtgtcttttttgtgattttgtgaatcttgattctgaatcaatttatgtctaaattatataagtcctaggtttttttttccttattccgttttgtctagtactttgtactcataaaattatatttttcttagagaattagtctatgaacttgttatcttgagcttatatgccgaatctaccaatcatttcagaatacattagcatagtactttccactatgacttttaaacaagcaaacataccctatatagtataagattttatggtctcccggggctatcgcgacgaattcgttagagaaccctcgaaatcttagctggtcggggcatgtctaggtccatgcacgtgtcggggatgtgactgcatgctaccgcagcccatcgtcggctcccgccctctgcccacgcacgcccggcctgcgtcgtgccctgcccttgaaagacgctgcggtgcctatccagccgtcggcgtcggctgccgctgctctgctgccaccgtacttcttcggaccacagcgcgcacgtgggcgtcttgcagaacgccgcctaggctcctgctgccacatccatcttggcgttctcctcaccagagcaaagccgcctaccgaggcctcaattaatcgccgatgtcctttcttcctagctagctatattctcctctacacctggcctgtgtgcaaggtatatgagcttccctcctttcctcgatttcctactgctgccgagtccgtttcttcatgcccacctagtttttctcttccataacagtgcgacatgcatggagcccagacgcaagcgagaatgcatgttcatcttgataatccatgccacggtaagttgcccgcgcttcgcacggggttgctcactagttacataatatatgagagggttcatttgagatgttcattcatgcatctttatttgctaggaaaaagaaaaagaaaaagaaaaaaaggaaaacgacaaagagccaaattaaggagaggagaggagatgagaggagacgtgtgcggtcgtccttgtacagctgatcgacagtacagttgtatgccaagccaaattatggtatgggcaatggagagggcggggggtagagtcggtaattggcagcgaccgacatgcggaagtggtggaacacgaacgagtccctcagaacctctccgtcctaggctcctcctatataagaccgaccgacgtccccaattccccttctcccacctccgtcccgtccgtatatatttcgaattcccccctcctcggctcctcctctgcctcggtgcctccctcagcgcctctcctccttcccctccccggcgctccgcgtcaagacccgccgttcctcgtcgcccgatccgtgcacgtccgatccgccaggtgagcctcgatcgtgtaaggccttcgatctccggagtttctaggcgggttttgctagctactagctacacgccccgattcggcctccgccgccgcgagtttcagttagggtttgcccctgcagtcgtcgtcgtcgtcatccggttcgcgggttacacgggtgatcgattcgtgattaatattgcggggggatttcggttacttggttcattcgtttgtgccttgcaatggaatgccgtacgtgctagtctgagtttctcatcgtgacttgaacttgagagatgtccgatccgcgatcctgtttaatttcctgggtgtgtgtgtgttctgacgctcttgaggcccggcgcggcgtggcgttgcatgcaggggatggccaccttcgagctgtaccggaggtccaccattggcacctgcctcaccgagacgctggacgagctcgtctccagcggagccgtcagcccagagctcgctatccaggtccttgtgcagtttgacaaggtctgacgacattacagtactatatatgggtctcaaaattaacaggcccagagcttgttttgacacccttctcttattgtctttagtccatgactgaggcgctggagatgcaggtcaagagcaaggttaacgtcaaggtacatacaatcgatgtgccctttctgttgattcagatatatatggattcactgccataggaaccataggtcaatctagagctttgaaggggaatggtatttagattcctttttttgttatgcacctacttgtatatatagatatagctaataaattaactgttagttgttagccacctaaaatgacccttttcttttacacaagtagcaaaattcacgcggtagaaatttcagactatatattgtgctgatggtgaatgatgtacacttagaaaattaaactagacaacctctaaccattttgtttaatcctgtgtgctacaatgtgtattggcttgtactttactgttgtacacaatcatgttatacactacatatttattggttttgtccgttaaccgctgataaagcaaataatggctatcaaaaactgtacttcctccatatgtgggttaaattttgtagtatgctggaaaaattttggaagcacttgtgttaatgtttacctttgtagcactctttgcactgcacgtagcctcacattattttactgttagccttgctattttccattgttgtgatatgttttgaactgttgtccgaaatcattgatttgcccatgtaccagtgacatatgtgcttgctcttgactttaacatgtattcaattaattagtctctacttcaacttcctctgtttgttagatgcagtacattgtaccatgaactagttgtcaactgtcacgctcgcaggaactgttctagcgtgctttaacaatgtattgtacatcgtatcaccagcatcatcattatgaactgctaccctttccacagtgttgtgcatatgtgcacactgcttctgtcatgtcgtaaaacaagtgtggctagctagtgcagtctgtggcttgtcattttttttatataagccaacacagcttcgtgttcttgtgagaaaaaacctcaacttgtttaatttccaaatttggcatctggttcaaccttctgtataactgggtctgtaaataactgcaaattgaactttcctacctaatttattggactatgagttcacacattttcttgggtagccttttaattgggaacctagatagttgtctttctataataactggtattctcttttatgttttgaaaccatgaagcaatttttgaggcaaagggccttttttgtatgatctagaacgaacttcggtgatatccttctttgttgaaggtgatgttcatgctaatagcttcacatactttgtgcttgctattattttgttcgacttcaaagaaaatacgagagcctctggcctcataccttaatcttagtgtttcagctagggcttgttcctttttgagtccagtatacgtgcttcctgcttctgtttgatagtttgatactctaaattctgtaagttggggttcaaatgttacaattaaaatcgggcgtggaagtttccaaacactcagtactcagtatttcttttcactttggcatttgaaatcttatcagttatcagactagatctgtgacggctttccttgtcgctgtacagggtcatctgcacacctacaggttctgcgacaatgtctggaccttcattctaacagatgcaaccttcaagagcgaggagattcaagaaacactgggcaaggtgaagatcgtggcctgcgattccaagttgctgcagcctcaacaaccataaaagaaccaccacctgcccaatctcgatcccgtccagtttagctcagtttcatgctattattggcgccacccaaactttcctagttcatgtgaatttgccccctctgaactttgtttgtgtgaagttaagccatcggccgtgacacttgactagactagagtaccatggctgccaacatgttatccgtactgaatatggaatatggttttgctgctttctgttgataatttcacatgaatgactagataaaagcgttgaatttgacattaattcataatcgtgctctggtttaagtgaccaatgaacaataacagctgttgtttaataagttatagtccagtggactaagctacattgttgtattttagttaaatcgttttccgagatgataaaacaattcaagacaaactttgtcatgattcaggatcatttcataagtatatatccagaaaaatggatatgcaactgcagatgatgctgaagaattttccctatattgatgctcacagcgagagcaaaaaaatcattctcctgtagcagtacccaaaaaaaggaaattaaaaaaaaaggctagtattcacatccgagttcaagagaacgtgaacatggattcaaggggcagctcttcacagtggaacttgagctcattctgaaacctctgcagcacgaagtgctcatcctctgttataagggttgtcacgccgcattccaacctggagaaaggttctctcccagttcttccagcacggtgcagatagtctgtcg

SEQ ID NO: 4417 - DNA, 5209 bp, Sorghum bicolor
taaacaatgtgttggcttaatactctttgtgatgtcggtgtccagaaatactacaaaaggcagcttaacgcttcgtttcatctgatctatctgaattgggtcttcatgatatagccctgcttccatccgggggggggggggggggggggggggaaaaagggaaattttgggaaataaaaaaaaaaaggagaggcaaaaaaaatagggacaattatatttatatcttaacccaagaatctattcatgtatttcgttccatgatgagaaaaagagttgttattgttattatactattacatgtctaagatcttgatctacacaaatatattacatgtctaggataacattgtattgatgcgtatcttgcaactacttcagcatccaacgattctttggatggatcgggccaccaaaaaaggatttcaaattaggagcaaccaccaagacacttccagggcagcaggccagcagcttattttaagctctagccactacgtactagcctgcagtaggtagttgcagagggcacatccacagggatgcatttggagatggggcgcaactatcagattaaggaacattttgaaatctctctcattctttcttgaccgacataatccagtggcttgaattgagtttgcgtcttctgattgtgatcattagtccaaatcgttttttttttgagcaagattagtccaaatcgttattccttgcagatttgtactggaatgttactatcagcctatcaggtttccaaaatctgtcctgttttgattgattttttgttttggacatttggtaacatggcaactgcatgctaatgttagaaagcttatgacaagttcaaccccgggaataatcattcaaaaacttggtgtgaacatccagcctgagatccctgaagactctaattaactccagactcggcatctgtcactcacacccgacattacaggccagatgtcgttttaagttataatccagtgttcaatgcctcaactagaacattgcacctaagtacagccaatctcgttcaaggcctacttcttcttttttcctactgcacatatagtgctgtaggttgagatgtctcctatcttgcaagctgctgcattgagtgtgctagtattttcttttggaaagcaagcatacatttgtcaaacaattgttgatagcttctgccacttcattggaattgcctgcattgcatataagctgccttcttcgtctatcggttcttagactctctctctctctcccccccacttttcatctttcacgcctctttggttctactttcagaccaggatacctgtcgtttttgcctgaggcaatttgagttaggttttttcttgtaattttagctgcgtttggagatcatgtgttatgtgttttcaagagttatggtatttgattagcatcaattccacagaaagcagaagattgtacatccattttcctggttgctgtcacttgttgatcatggtctatcatctagtaggatttgtagtcatactttttgagttgctgtaatgtattactttatcccaagtaataagttgtgaagttattctaaatttttactcattattctttgtttatatatttttttttgaaagaaactggaggggtttgcacccctacagcagttattattaagaaaagcaagcagttcagttacaaagcaactaattaaaacacaggaataaaagactcaggaaacccaaaaagaaactaagaagagcagttcagagactgctcgcatctgtttatatatttttgatacagttagtcaaccatgtacttgtttaatatcaaaacgtgatgagacttgttcattgtgctctgcatgtattttggtggtgttttccattactttttttctcagcagtcaatggtttcaaacatgctattcttacctttccatcattatttttcagatcttgcactagatgggacttatttgatgttttcgccattctctacttcggtgcgagctaatggatctctacatgaaacttctcctggcctccctcagctgtattctcctgatgcaagcagcatcatgtggtaagttctacagtcctcatgaatgtacttctattttcaaagctgtcatgaaaaatgttgggttaaaatgactaaatatgagtgattgaaaaggaaacaatatctgatacactagttgttgtacagatggcaccacaggcgaaactgaaacggcaaactggacatgtgtatgcgcagctcatccactagatgaaccaaactctaacagcagcctgttgtccaattgctcttcatcctgccattgccaacaaggtaagagcagtggatcatatagcttgtcaacatctcattacaccacaatggcacctgaattgggtgttgcgggcttgtggcagatgataatggtggcacagggtcatggaactgcacatgtgccgctgataagggccttcagaaagaagaacatgctgtgctacgtgccaggagttgcttcacttcctgtaactgcacatctggtattggtatgtgattttcttgtttaactattcagaatttcagatacatgaattcttttatggactaaatgctcaagtgaattgggttactgaatatggtctccattatatcttcaggaagttcagaggaagggaaaaggcatgtctccagcaaaacagtcataattacgctcctagtttgtgtgattctcaccactactgctttccttgtcaccaccgtatactacttccgccgcaaggatgctctctctccacgatcgcagatatactccttcgataaatacactagctggagcagcagatcgaaccttgtcagcaatcgatcgtctccacttccccaattgaaatcaaaaccaaggcttggtgttttaaaaggcaagcttaacctatacactttccctgtctgaatttttagaagttttgcttgactgaattgcctgagatcggtgtcatgtgtttgtttgagaacagtgcatggccacaccctgattcttgtttcaacttcctgctacagagtttctgtgtagctgcaacctcatctgcgggggcgaaagcggcacgttccctggtgtcattatccggttttcatacgcggagttggagcaagcaaccgggaaattctcagacgagcatcttatcggagttggtgggtcgagcaaggtgtaccgaggccagctcggcgatggcaaagttgttgccgtgaagaagcttaggcccctaggaggtgcagatgaagacttcgaattcctatcagaggtatgcaacactgcagacagcaaaagcaacaatcttgcatatgtcatccattgcaattcctctcatttctcaagtgtgaatgtgctgatgcgtagatcgagctgctgtcgaggctgaaccactgccacgtagtgccattgctggggtactgctcggagagccagggccggcagctggagaggctgctggtgttcgagtgcatgtccaacggcaacctgagggactgcctggacctgaagcaagggaggaggcccatggactggcagacccgggtgagcatcgctctcggcgccgctaggggggtggagtacctccatgaggcagccgccccgcgtatcctccaccgtgacatcaagtccaccaacatcctgctggatgacaagttcagagccaaggtcagaggcttgttactgattcaggcttgctactgaatgctgcagattacatattatgctgaggctttgattcttgtgtgtgggtgcagatcactgaccttggcatggccaagtgcctgatgaacgacggcgtgacgagctgctcgagctccccggcgcggatgctgggcacgttcgggtacttcgcgccggagtacgccatcgtgggcaaggcgtcgctcaagtcggacgtgttcagcttcggcgtcgtcgtgctggagctcatcaccgggcggccgcccatccacaagtcgtcgtcgacgagggccgacgagagcctcgtcatctgggcgacgtcgcggctgcgggacagcaggctggtggtgacggagctgccggacccgacgctgcagggcaagttcccggcggaggagatgcagatcatggcgcacctggcgcgggagtgcctgcaatgggaccccgaggcgaggcccaccatgacggaggtcgtccagatcctcgccaccatcgcgccactccagcagggcgccaagcgccggaacctccccatcgccgccgccttcaacctcacggtcagctccttctcctctcggccatgtacacgcacgccgcaggcggtctgtgctctgacatcgcacgcaccgtgcacgtacgctcaacgactctgcaggcgtcgccgcacgttgggaggtgcgacccggagcctaaggacgacgacgacgacatcgagaggcaacagctgcagcagcaggagtgctcgccgacgacgcccgtccagtggaaacagcaagcgcggcgcgcgccgtcgccgccaccgggccgcgcgtcgtggcccggcgacagggggaacgttgtgagcagaggcgcggtggtgtcgggcgagctggtgaacgggacgctgctgatgagcccccacgggcggggaagctggcggcggccgccaccgccgcctggcgacgacgaggaggcggtggacgtggacctgacggagcctcggatggaggcgttcacgcagccggcggcattcagatgacgaaaggattagcaggatcgggaggagatggtgatggttttgattgctgcatcagcggcgggtgctgtacatcttcttgttcatggctccacgatccacagcagcatctgcttctgcttctgcatctgcgtccatgaatgtacagtacaggcgaacgcatctagatcgacaaggggaaaagaaatggtattgagatcgttgtgggatagggatagataggttgaagttgaacacgagatcaatgccgataggatggccaatcctccatggctgaagtgaatccacagcgcacgagagagagatccgacagcaacactgggtatccagcgattgtaacaaaagcagatgtgcatgtgtgtatcatcttatactctgtcaaaagaaaaaaaaaatgcaactatgagatttgtgcaagtcaaattaaattaactttaaccaagtttatagtaagataaagtcatgacatgtgaccatgtgggcccatgtgtcagtgataggga

SEQ ID NO: 4418 - DNA, 6092 bp, Sorghum bicolor
gtgtccaaagattcgatgggatggatgaaaaatttttgggtggtgaactaaacagggagatcgctaggggaaaaaaatagatttgtagaccaagttttcaagaagtcaattatgctaaattattagagatatactctttatttccatcttaaattattttagaagttgacaaacaccatgaatctgttggaaatgctcccgtataatagatcaacctccgtataatctctaaaaatggacctcgtgaccatagaatggagtccaaagccagaccagatgaagcatacccttccctagcccggccccatggttcctgttgtcggtttgtttggagactgtggcccgctggtgccccatggctctgcccgtgccctccttgtgaacggtagtgcgtgcaccgcacgggagaagacaggtcctcaatcaaaagagagtatcattcattcattcatgttgcggcaccatcgcaaatgtagatgggtctataacctgtatggcgaccttaatttatgaaggtctctaagtttggcagaagttttcaaattaataatatttgcatagtacaacacgtaacggtttcgtggtgtagttggttatcacgtcagtctaacacactgaaggtctccggttcgaacccgggcgaagccaaaatattttagtttgtgttatttttctttttttcaccttttgtttcccctgcgattgcagtatcagactaacgtcgtgttctaattcttgtaattaattcttcttcccatatttatatatttttttcgtctagccttttcctttcataaatccacgtgttcttgctttgttattctgccggagttgcagcaagggcagcaactggattttcagcataaggtcgttagttgccctcttgcatgtgatggatttccgtccagcgaaccggctaaggccttgtttagtttaaaaaaattgtaaaattgtttagatttttcatcacaaagaatcttagacacatgtacggagcattaaatatagataaaaacaaaaactctgtaatttgcgagacgaatcttatgattgaataatatttaacaaatataaacaaaagtgctatagtgattattttgtacaaaaatttagaactaaataaggcctatgtatgggcggaaaatcccctgacacaaaaaaaaactaggctggttttgattcaggtcttatttagtttacctaaaatgtaaaaaaaattcaagcttctccgttacatgaatcttatggtacatacatgaaagtattaaatataaataaaaaataactaattgtatagtttatctataatttacgagacgaatgttttaaacataattagtttatgattggagaatagttaaatacaaacgaaaatattaccataactattttgtaaaaaaaacttgcaacaaaacagggccataatgatgaatccattcgttaccgatataaaccatcggtaatcaaacagattcatcacggaagggatagacagtgtgagattataaaagaattaatttataaatcacgacgaaggggtccgacacaaaggcacagctggagggagagccctgtgtcgcactcgcacgcagacgcagatcgccatctccacgactccacccaagccccccacactggctggcggctggctggcgactggcggctggccgctgcactgagcagtaaccaccacagtcctcctcctgccgtccagccacgccgagcgtctcgcctctcaaagattcgattccttcctccggtcctcccacatggccggcgaactgcgccaccgccgcgtaccgtcgtcggacggggacggggacggggacgaggacgagggcgtcgtcgcctcctctcaaagactccattccgcctcttcctccgccgccgatggcaacggtaagggaaaggccggcacttcgtccggcggcggcgagggggcggagccgcggagggagaaacgggacgcgctggggtggctggagtggggccgcggctggatggccgtcgtgggggagttcctcttccagcgcatcgccgccagccacctcgccaacccgctcgagctgcccccgctcgacggcgtctccatcgtcgtcaccggcgccaccagcggcatcgggctccagatcgcaaggtgcctgcctgctttcccccctccttcctctcctttgttttcttctgttctacccacaccacgagatgtcatggatggatcttttagccggccgttgcgattcgcctgccccgcgattattatcctgttcatgtagtatatggaacaactacttaactaattaattatgtgtttggtttatgtatactatatagtagtatactagcatagtataagtatatgttgttgttaatcttttatgttaaatcaaatgcttccccaactgtgctgactgctggacactcaaatcttcatcccccacgtgtagtaccttaacatgccctgtgctgctgacaaggtttagctaggcgctaggcggaatctaagcgctgacccattgcctagcgcctagtcgggagtactcgcgcttaggcgctcctaggcgttttcctaggcgttttggcaatcaattagacatgcagtcacagacactatcagagcggaggcggggagcaggggaggggacacgggacaggggagcagcctgagagggaggggtgaagaacatgggaggggagaggagcaggggagagcagctgctggcggaggaggggaaggggattgaccatgggacggggaggggtgcgccggcggggaagacctcgcgcctgattccatctgcgcgcgcatgcccgcggcgtccacctccgcggggaaaccttcgcgccctggcccgctgcggcaaatttccacgggcgcgtgcgttcgcatccgcttccgcgccgcttccacgcccatctcgcgcgcctctgtaccgcttccgcacctacctcgcgccgctttcgcgccccttagttccgcctatcgccgagatgggcgactacccacctagtcgaggcgacgggcttcgcccagcgcctagtcgtgactagtcgccgcctactcgccgcctagccgaactatggctgctgatctgaaagcttggttctttgtattacatacatcattaataagaataaaacatgtcaaacggttccacaaaatctatctatttactcaattttatatctgagcacctaagtcttcgtgtcatcatcagttgtatgtaaaataaaagtaaaaggccttcttgttgtcttccatttcacttcaacctgtggggatattttattggaatccatgtttgcacaaaacatggcacaaaattataaatcagcaagcaggctccaaataaggagcttgcatcttgttctcaaactggaactggtggtagtggtagtatggcactaactggatccttttaccttaatttacaaaacaggcaactcgctcttgctggggcacatgttgtgatggctgttaggagacccaaggtggcacaagacttgattcagaagtggcagaatgaaaattcagaaacaggaagaccattaaatgccgaggtaattctgaagatacttggtgtgcgtccctggatgatgaatgaggctatttaacttgattaaattttgtatggcgtggcctggttgttgtctgcagacatattactgttcttttccaatctgatgcaattaaacataagtatgagcttctgctatttgtttaaaatgacttccatatgaatattaagcaatactacttaacttactacatatattgcctatgtgtatgttaaccacactttgccacctgtccaccatctataatcggtcaccagagacacatatcatgattggtaaagttgaaaggcacatttacaagtcataacttcagaatcataaatttgatttactcgtcaattttacattatttacaccttactctttaaggtgatggaacttgacctgctctccctcgactcagtcgtaaagtttgctgatgcttggaatgctcgtatggcacccctacacgtgttgatcaacaatgctggcatcttcgctataggaggtcacacaatcttttgggttttgacatactaaatctcaggtttcaattaagcatgtatttaaattgtagcagagatatcaaccttttccaatctatgtagaaccccagcgtttttcaaaggatggacatgaagaacacatgcaagtgaaccacctagcacccgcgttactggcgatgctgcttataccttcccttctccgaggttctcccagcagaattgttaacgttaattcaattgtgagttttcttgtctcacaagtcaccattagtggtattgcaggcacagttttctaccatgaatgcacatattttgaattctaatttcaatttagaatcattgaagttgcaactctacaattcttttgtgactacattaccattatctgacctgtgtgggtttccaattgcagatgcacactataggttttgttgatgctgaagatatgaacttgagaaaacataaatatagaagttggttgggatattcaaatagcaagttggcacaggtaactttttgttaaagactgctgacaaaagttgctccattcaaaatgctatttccctttttgtacctttgaagtgcttatttttctgtccatcagaatagaagtgtgtacctttaatctagtagatctgaattcttcttgttgcactctcaggtaaaattcagtagcatgcttcataagaaaattcctgcagaagctgggatcaatgtagtttgtgcttctcctggaattgtcgacacgaatgttgtgagttccatttccatttcatttgtggcccgatcatttgtgctgtttcaggaggtggattattgtatataacatgtatgcctacctaacattcacattttgagaaacatagaggtttggatcgtcgtcacttatgattagttgaacacaatgatagaaaagaaaactcaaattaaaaggtgcatatattgttggatgattgattcacttgtatcataagttctactactccctaacaaagtatatttattactcatcctgatggacacaatttagcaacatattcttctttgtctttgttgactatatataaatgttagctcaacacttgttacatgacgcaggcaagagaccttcctaagattgttgtagctgcatatcatttgattccctacttcatatttgatgctcaagaaggtgaagttactgaacttctgctgtcgcctcctgtcaatcaacagcttgcgcatcttctgatatacacaaacattctgttttggatcccattcaggttgtaggagtgcattattcgcagcatctgatccccaagttccagaatactgcgagatgctgaagtcggaagactggccagtctgtgcttgcattaactatgactgtaatccgatgaatgcatctgaagaagcgcacaatcttgaaacctcacagctggtctgggagaagacgctcgagatgattggccttccgccagatgccctggagaagctcatcgccggagaaacagttcagtgccgttatggacaacaggaggcagaataggatatcccacagatccagaccataccactttttagttaacagtttagaggtggtttgttccagcctttgattagagcgcctatgttatatcatttgatcctacatttgcaggggggaaacacgggggagcgaagaaaaagaatttgtttacagctacagtctttgctcttgtgtgtgtgcgcgcgcgcgcaaaatgatgttgtaaaagagtcgtagaaacacatctccccccgttatttgactattcctaatcgatgatatacttgagacagaaatcaagacatacctatcctgggtccttttttccctctaccaagcctttttctggtatgctcactccaagtgcaaacattgacggacttaatttctagttccactgacaaaattcatggaaaaccgaaagtgcataagctggcaatatagagatgatttaaagattgaattcatcaagttcttttcctgctatgcatgtgttcacaagctaaggattggaaaccaag

SEQ ID NO: 4419 - DNA, 5977 bp, Sorghum bicolor
caagggtagaaccacacagaatgtcttggttgtctgtgacttcgacatgaggttcagttttgtccttgctggatggcctggatctgctcatgatatgagagtcttcaatgatgcaacatcaacttttggtgatcagttcccccatccacctccaggtatattgtcgtatggttacatgttgtgcctgttatctaaattggcatgtttttgctcatagatatggtactgtaactacagggaaatattaccttgttgattccgggtacccaaaccggcttggttatctagccccatacaagggaaccaagtaccatatgcaagagtacagaaacgtcggccctcaaggtaaagaagaaatcttcaactatacgcattcatctcttaggaatgtcgtagagagggcatttggcgttatgaaaatgaagtggcgtatgttgcgtgatgttcccccatactcgaccgtaaagcaaagcatgataatatgctcttgtatggcactacacaatttcatgaggactagtggagtgcatgacaggtactttgagtagctcaatagggatgctaactatgtgccaccagaggcatttgagttccagccggatcctgaggtcgtggaggatgagtggaatgtgatgaatcagtttcgtgattcaatcgccactatgttgtgcactggtgtttgaaagatctttttgggatgaacaattttgatcttcctgtgcttgtattttttgtactgggttgaggactgagtgtggatgtgtgaataatctctgtatttggcatacaatagtgatagggacagtggtgaataatagggttgagtgtttgtgaacaaatacaaattattgttgtttatatatatcattgtgattaaagacaaagcaacttttcatcagtgacaccgttgtggagtgttgcatgcggcatgcaaagcaacgtttgcatgtgcatgcagtcccaaacacagcatttaatgcccttctacctgtgtctgcagtctacattttgtcaggaaaaaatttgttcaactaaacacctgaaatttttttgtgtgtgtcagatttctctgctcaagttctcacaacaaaaaaatctaccactttggccaaaatttttgcaatctaaacagggccttatgtaattggacttataacatttcttaacttttttaaaattatttgttttgcattccaagtccaagattaactccaagggtctctttatatctttattttattaatagaaccaaatagtttggtgaaaaaaagatacactccagcgtctatatcttcaaatattacattctcaattacaaatttctcgttaaccaaatatagagagcgaactagctctctagagtgcacaaatatatataaaaaactgttgtatggtggaaatatttagaaaaacaaatttattcaaagggctctctaaaatagtgatttagaggttgaatttaagaaagatttttttaagatgtcctaagtatttttaggaggtgattttatgtgatgtggtaccatgataacccagagagagcgttattttgttccctgggatattcgcttgtcagccatggttttgcctaagcccacaactaatgaagtttagaggaatgtgactaattaagtaactatagttagcaaatcggcaccacattaaataaaggataattgggctcgcttcccaagagaagcatcatctgggggtgtagctcatatggtagagcgctcgcttcgcatgcgagaggcacggggttcgattccccgcacctccaaatttttttggcccacctgtcagtagactgtccctgcggcagcgtgtttttttgctcgcttgcttcacttgtaagcatggtcccacatgccactgagacgagaggttaatcctggacccacctgtcagtggactgtccctgcggcagcggcagcggcagcgtgcggctgtcaggctgtgccgtcgtctcgtctcctttctcctccactcgtcggctcgtcgcagacggcagacgacgctgccgcctgcctgtcggagcgcacgcacggccatggccatggccgccccgccgccgcccacggctgtctgcgctcgccacttccggctccacctcccctgctcctcccgcctgcccatggccgccgcctctgcctcctcctcttcaccgctccggcgccgccgccggctcgccgtctccccgcgcgccgaagctggtacagggactgggacggggaccgggaccggggacgtggaggcgctcagggccggggtgtccgtgtacaagccgcgctcctacgacgtgctcgtcactgacgccgcgcgctccctcgcctgcgccatcgacgacggcaagacccggctcgagatcgagttcccgtgagctcacctcactctcttcgcttgctcgagttcctgccaccgttcctgcattatcttctcaccgttcgttcgtttccttgttgcttcatgccttcttcctggcctggacgactcatatgcttctgtattgtgacgatatgtgttatatatatatatcatcaaggcctctgccaagcagcatatcttcttacaaggtacatctatctactcatctctttatgtccatgcatcactctatccttttttttagagtaaaggtttctccctttattgatcataaagcgttcaagacagttaagttccagcgaaaaggccttaaaagccaacaacaccactaccggaatacatttttgattactttgtgtcaccatcgagtcttcattcgtgtgatgaggagaatccaaacagccccgtcccaaaaacgatttcccccccattttcaaccttggaaataatccccatttgagcagcctgtatagcccacatcacccctttccaaaagggggaagtcatattatcagcacagcacaaaacatttggtctgttagtcctatgtacttatgggctacaatcttttttttgaggttcatggtctacaatctttgtccaaatagaattggtttgtaaatgatacctatagatccaggactcaacaacgccatactaagacttcttaaatcagggattccaagactccctaactcaacagttgccgaaagaaaaccaatgaccattacttaattattactgtattagggagagggttataggccactgctattctctgtctatcccagctgctccatttctgatcatcctgctggactcctgcagggctcctcagatgagttcatcgatgcgaacatccagcttgctcttgttgttgctaggaagctcaaagagctcaaggggactaagtcctgtatagtaagtttaagcttcatacactatcctccctgatgcagacacgctccatgcctgcaaaaccgtgctcatttgtattcttctagttgatttcaggtgtttcctgatcaacctgaaaagcgcagggcgtcacagttgttcaggacagctatagatacggtaaatgatgttcttagaaggctggttttttccccttaattgacctctggtatgacttgcttcactattctagtggcatgtaatttaattgctcgtttttagattgagggtgtaactgtcagttccctggatgatgtacccaccgaccctgtcaacagcttcttcaaatcaataagaaacaccctggattttgacttctcagatgacaatgaaggtaaaatatcttgatccaaatgcagtaatgaaagcaatagccatgcgactcctagtctaaaatggcattgtcgatgatattattttgtcaaagagtttatgacactcttttgcacggaagccatctgctcagaggaactaactgaatggcgatcactttatgccaaggccaggaacacgatacatgttgatgaattgtcagtttgtcacagcttgaataaaatggaaatgaaatggccgattagtgtgtataaatcaagcataagtcccctttccatcatcgaataacgaacatcagtcagttttgatgatattattatgagataattctcatacaaatacccatgaataagttcttcataaccagttgcctggtgtggatacagatagatggaaatctgatgaaccaccgtcattatatatcttcattaacagcagcacacgtgaccttgcttctatagagaagtatgtggtatgtctagaatataattcttcatttgttggtgatgtgcatgcatgtgttattcgcacattcagtttattctttcttcgtgcttttgctaatttcaggaaaagtttgccacatctgttccagcccttctattcaatcttgaactagatacattgcggtatgtctcatatatcccaaaccgtagcctgttgctttatgaggcagtgacttatgcaattcatggtgcagttctgacttggggcttctggggtttcccccaaaagatttgcactatcggttcctttctcagttcaccccagtattttatatcagacaacgtgactattccaaggtattcatttgtcattttatccatatagacatatccttgtgtttatgacttcctgtaccatctgtgactccttaaccatgtagacaatcgcagtcgctccatacatagtgaattacagtggagctgtattccgtcgatatccaggtaattattggagagcttatttggatttcttcacttgaaaagatcatagtttggaagatagatctgctgtgctgggtatgcaatagaagatcaaactaaataattgtgcagagtcaatcttttggcgggtaatgtcatcctatttatcagcactgtcagctactgagattctgagttactgtttgttcaggcccctggcaggtcatgctgaagcagctcgatggctcctatgcatgtgttgcagagagtgaagctcggttcactttgggacaggtcataccataagttactttgtctactttttttttctgctttcttgtgtgtttggggggaaaaaaacactgacttcgttcgagcttgttgggttgccatgcaatttctcttctttcaggcgaaagaagaactattgagggttattggtttacaagaagaagagggaagctcacttgaatttctcagaagaggatacaaggttcatttcatcctagttaaacagttggttgcagcttcaaagcacctgcttgcataaactgcatttgactatagcacatcatgggttttagtaaccgagtttctgtgatgtagaatgctacttggtgggaagagaacgttgatcaagagacgtcggctgcgtggcgaacttgagacgctgcagctgctggctgaatgctttttctgacctgggtgtggaaaataggccaaacgaaacgagtgtccatgtcttgttgtatggaactgaaaattctgaaattacagagagagaagtccatgtacagcgtaataatatttgcctgtgctgatatcgtatcgtatcattattgttatgtgaatacgaagtaagagcttctgagcactaagaacttcttttttcaatggtgactgtaaatttgttctgtttgtggccttgggctcttcagcttgaaggtgcaagtgtaaaatgcaggggactctctggtttcagtccatatatactcaatccatcccaaattataagtcgtttgacttttttaatatcaagtttgaccactcgtcttattcaaagttttgtacaaaatattactttttgttgttgttgtgtattggtttattaataaaagttcttcaagaatgacttaaatttgactatatttgcacaatttttttgaataagacgagtagtcaaacttggggtaaaaaaagtcaaacgacttacaatttgggatggagggagtaatatatacacacttgtgttttcaataccgcaaaaaattaacttatataaatatttcagtttccccagcttgataagttctttctggccgtgaaaaatttctgggatgcagcatgcctgaaagataggaaaaactgagtggagt

SEQ ID NO: 4420 - DNA, 8868 bp, Sorghum bicolor
cgaatagtatttttaatcataactttttcttaaaaaaaacgaaaaaacagctgtgcttctgactgaccgacgaacttttttttttggccgttgccgtgggcccgtgggcagtgagtcagggaccaagggagaggcgcccgaccggccgtactatccgacagggcccaatagaaagaccccatccacagaaaaatgggccaagtggcaatagaaaaatcacgtccatggtccatgctcccattgatggatggattcatctgtgccccgtggtcccggtcgtgtccgaccggagtcgcccagtcacccacgggccacggcggtggccgcggcctctgcactgcagcctgcaccatacacgggcgcataccagtttgtgctactgccacatggggcccacggacctcgggcctacatggtagccaccgctttgcacttgcacgcgcacattcagccagacggttgcgtccgcggcccctcgcctttccgctaatttcactcgcctctctctcgcttctcacgttccgcaaaaaagtcaaaacaaaaaaaacacacacacaaacggttgtatatttcctgctgaaagaaaaaggaaatcaagaggcacgacacggctggggagcaaatctatctcaagtctttcatttatacctattctttatattccgatacgatacactttgtcatttcattctctagatagaaaaagatactgtgacccagacgtgctagttttctatataataaaaaaggattatctatagggaatccatgtcccatcggtggagtagatacggaataaatttgagagcactaataacaactactcacacacacacacatgtttcggtgtttggtcaattggtccatcttccttcaattccatttctctggtttctttattacaccctgaataatttttttccactaacaaatacacacatatgtattttccttaagatgtgataaaaatagacttctatattttggccttgtttagttcacaccaaaaaccaaaaacttttcaagattcttcgtcacgtcgaatcttgcggcacatgcatgaagtattaaatatggtcaaaaacaaaaactaattacacagtttacctgtaaatcacaagatgaatcttttgagcctagttagtccataattggataatatttgccacaaataaacgaaaagtgctacagtagccgaaattttttcattccagcaactaaggccttgtttagatgcacccaaaaacccaaaactttacaggattccccatcacatcgaatcttgcaccacatgtatgaaacattaaatataaataaaaaataactaattgcacagtttacctgtaaatcacgagacgaatcttttaagcctagttactccatgattggacaatgtttgtcaaataaaaaaaaatactatagtgtcaaaatcaaaaaagtttttgatctaaacaagacctaaacaaggccgccttcttcttcttctccactaaaaagacccaatgtattgcattcctgtcgagtaccaaacacatacagccgtgaacaataataccccaagccagaataagagaaactcaaagagcttagctaaaattagtagccaaatttcattatttagccattttgtaaaattaaaagtttcttaaaaaagaagatgtacacaacaatctcactatttttacaaaatcagatagctaatgtcaatggttagctatatatagccatcaaaaatcaagaatagctaactttcaattttataaaaccagatagtacatctattgaaatctaccttttgctgtgaaaattctaaaatagtctccacaacaacaactttttcttttttttcccctgaaagtgacgcggaataataactaggaaaggcacatgtgcctggtggatcggacactaatacggtgcaaacggagggaccaaaccgcaaaaaaacgcacggttcccttccaacttccattcattccgctccgttttctcctcctcttgttggctccctcctctcctcgtccccgtcagaccatcatcccccaccctgtgacccaaccggggcgccggcggtcgtctctctcggccccgctagatcccagcgccaatcaccacacggcacgccgcctcccacgcgcgcgtgctcctcctcttcctccccttcttctttctttccctccctctttccttccttgctcccttccgggattcggatttggggattgctgtctgtcctgtgcgtgccaagaagaagacgagggggagggagatgggttacattggccaccacggcgtcgccacgctgcggcgctacaagtacagcggcgtcgaccactcgctcgtcgccaagtacatcctccagcccttctggtcccgattcgtcaacatcttcccgctatggttcccgtaagcccgccttcctcccctctctctctctctctccctctctttgattcttgcttccccggccgtccgtgccaacctccagctcccccccgttgccaaatgcgcagttcgagtgatttgttttccggcaacaagctaggattgttttcagaccccggtggcggtggtgtctgcctgcctccaccattttgctgccattctgttgctatcggccacgctgtgctgatctggtcttgattcattgtataccgacaactccagttactgcatatttgtgtggcatccggcatgtctgtgatttgatttgggcagttcgagcttagctggcgctaatgttcggtaactcggagtcccgacctttagcttaggctgaggaatcatctttagctttggtgagcatcttccaggggctgctcacagccatagagcaacggcttttgcttagtggttccatctcgcaaagctgaaaaagcttggttcgcatatattccgtaacgctgttcttctggattagtttaaagagccatgccttcaatgtggcatctgaggattattctgacccatgtactttaataacgctgtcatttaaactttatgcgatagcgactaaatcaagccttgccattctttgattctgctgttcagttgcttccttggttaatggaaatggggtatgccttgatttttttataaaaaaaagtatcctgtcatttgctgtttacctgcaaagtttaccactccaatgaagccagtcacgtttgcattcttccttcaagctattgcttgcatacatcaagacatcgaattgttgcttcttttttcctagttattattattatctgcgctgagcgctaaccttattttttatttatttatttatttatttattttttggttggtgctgggatgatctgcagaccaaacatggtgagagttcaattcacatgctgttacaatgaactatgcttcttttgttgaaatcctgataagaaagtattgatgcgtttttttttcagattacactaacaggcttcatgtttctactgacatcagcattccttggctttgtaagtatcttactacagtaaagtttttgataaatatggtactgtattgttcttacatatatatatatgtgtgagtttttctttctctatgatcacagtactacaataatactaattcagaaagcttgagccttattactgcttccattctacgcgcagttatattcaccacatctagatacagcaccccctagatgggttcaccttgctcatggactgcttctcttcctttatcaggtttgtcaatcattatgtgctcatccaaatatgcattgctctactgccatattttcccttcacagcataacacaagcatggcattcagctagtaccctaatttgtcaatctgcacttctagcactttttttttaattcaaagcatctactgacccatggtatctaggtttttataatcaattttgtggatcttaggatccctgaatatctttcggaacatctgattgggttttccagttttcctgggatctaatagcttcattttttaattgaaatatcatgtcaaaccttccacttttttagtttacatggaatggtgtttatgcagacttttgatgctgtggatggaaaacaagcaaggcgtaccaactcatcaagtcctctaggcgagctttttgaccacggtaatgtccagttggaatttaagctggtgtattcagtttaagaaatctcatatgatgctgacaagtttgcatcctgtgcaggatgtgatgcgcttgcctgtgctgtaaggcccacctgtcaatccttttcctttcaagtgcaatgattttgaaattgttgtgagctcattattttcttattttatctattagtttgagtccttggcttttggaagcacggcaatgtgtggaaaggctaccttctggttttggttcatttcagctgtcccattttacttcgcaacctgggaacagtgagttcttgtgttcttgctttgcccaccagtgatgaatgaaacatcaagctgtcgtaggatcattcattgttctaaaccaatatgcacacttaatacttttatattatacatatatttgccaaatgggtaatagttctttagattaatgtctcccaccgtcccatgtgactcaagtcctctggaggcgctctctctctctctctcaacaaaaaaaaaacacaatatattttcctttattatcctctatggacctcaaaacttgatttcttacttttgttctagtggttcatttggttctgtgctgttgtgtttgtgcataatatatgttgttgcatgggaagtgctttaatgctttctagaaagtgaaaagacacttgtgtaattataaatatggatataatgcagctacccactatcctgctgagatttgcacaacttagcttctgcaagtgcgaagcactactcctgtcaagcttcataactatatacattttgttatttttcttgatgctatcttctctattttttgttgaaatgatttcttgttttctcctatataacttcatgcttcattgctctgtgcagcttttttacaaatacacttattcttcctatagtcaatggaccaactgaaggccttatgctgatctacttgtgccattttttcacctttttcacaggtataatttggtttaaactgtcaattttcatgcttataaggtccctgttgaattttaaataaggggtgttcctctgctaattcactgtgcatatgtatgaggcctttactcaaaaccatgtggtttgtggtatttatagctcatcttacctttgtaggagccaagtggtgggcacaggattttcagaagtcaatgcccctgctgggttgggttccttttatatctggtatggatgctacaagactaattatttattttttatatttatatttatatttatatttatattgtcatatggtcaccaattattttattttagcgccatctatatcacttgttcctggcgtttttctttttcttaatactctgtaaaagcttaattgtgaaatagaagacaaattgactttacctatactgaggttttactctcattgcctctttccccagaaatcccggtgtatgacattgtgctatgtcttatgattgcttttgctgtaatcccaacaattgcatctaagtaagtactgtgtgacaacatgtattattttcaagtggtatttttgtgctatctggtgttctatatcattttttgtatattatatggctctgtaatcttatctgtaaaggcctctaaattacgttcgtttttatattgtttgtcagttttaaagtcccaagaaacaataagtatattttaatatgtatttctgcatattgtttcatatgtaagattaatttatctttccgataaaaaaggaatagtttaatttttaattgatgtctggctatgaagtgaaatgattaaagtgaaatcacagttgcaaaatggacacctgataggctggtacatgaatatatagtgccagagctagttaatgctgcaacaaactaattgaatgaattgatacccttttagctgatacatgtttctgtacaatatatttaaaacagcccctatcaaaccaagtgattttagtgctctagttgaagtcattatcagacttgtgcaaaaggtacctaagtttagtttttgttttgctttttcattttttttaacgtttgcgcatagatctacggatggaaaggcataatagaccaactgctgaattatgtactcttttggtgcttaagcataagcatgcacattgcatctaagatctaggtcttggactcttggttagatgctctagtaccttcttgaatcgctagcgaagcaagtattgctgatctagtggaacactacctcatttacttaatgcttgagcttatattattttataattttgagtttttgtatcattgaaatataatataaggttgataaaggtaatgttgcaactgtacagcattcacaatgtatataaagtcgttgaagcaagaaaaggaagtatggtgctggcactagccatggtaatctctaaatttatcctcttttccacttttgtgattctctttcattaatctgatattcttcatttgtgccagctctttccttttggtttgctcttggctggagttcttgtctggtaagacttttgagacccttcgttgcttcacgtgtatgcagttatgcatcactctaccaataaatttgaactgggcaatctaagctaccagtttagtagccactagtttatcactgaaggatattgcatttttatgcaggtcctacttttctccttcagatataatgagaaatcaaccacatttgctaattattggaactggttttgcatttggatttcttgtggtaaggccaattgttgtaactgcttttgtatttgcatttgtacaatcaatgccttgtgtagctgtgtcgttttctttgcttctttgtgtatatgatcgttttgtaaatgacactttcctgtttaagacttgtgagcattgtgtccttatgccaaaaatatagtttagaccctgatctcatgctatttttagtttgttctcacagatgccctttttcagatactgtagtgcagtaaaaatatgaacattactttatatctgcttatattgctccacaggggagaatgattctggctcacttatgtgatgaacccaaaggtctcaaaacagggatgtgcatggtatttgcttggaaagcccaatcattctttgttctttttttgcaccatcctcatgtatggccttgctaaaaaaatcatctttatctttctacagtcccttgcgtattttccatttgcaattgcaaatgcgctgactgcccggcttgatgatgggtttgcacctagacaccttttattatcctttttgttataataatttatactccataaaattttatgttcattgattgttgcagaaatccccttgttgatgagcagctagttctcctgatgtactgcttatttacaggtactgcgttatttattctcatgattatcttttctagcaaaaagcgggcagttctcaattgtgcgctgaagtacttttttttgtgtgtgtttgttgctcaaagagcaacattcttttcggtgttctatttatggaagactaaacctgctaaatcatcatgtttagagtgtttctggttgatggtttgaaaactttagatcagtagctcaaagcttgccattgcatcaaattgaccacattcaaaaattcattgacgataggcttgtcgctcatcttacgttgtattgtaagagcacatggacactggtctgactttttttttgatgtttgcagtggctttgtacatgcattttgctacgtctgttattcatgagatcaccaatgcgcttgggattcactgtttcaggtttttaatcctcattaccatcatcttcctttgcacgtgtttgtatcatctgttggttgacacaaagtttttcttttggcaggatcactacgaaaaaggcatagttctccatccatggaccatgggcatcagcgttgccctggattgtaatcaatcacaagtggtgcctgtcaaacaagcaacttttcatatttatctccattacacatggatgctgcttcccgtatcacgtttgcctcgtccattacggtgatggtgccccctgaaaattcacatcagcatgaagaacttgcagatgagaaaacagtgtatttttgaaacaattagtaacatgttgtatcttaccttgagcatgtgtgctcatgtaatgctcggcaaaaatttttgtggaatttgttgagctctgactgatagtgatatattgcaaattaagaattgctttgtattgttaaaggaatgttcctccgtgcattttgtgtgctatctttttgcccaatgcattatccatgttcttttgtttgtaggaggttgtccttgttattttaagaaacccatggttgcatctgcttctgattgaattattaatattcgagtttggagcaatgtgcgaaaaatatcagtacccttgtgtggaaaatgtttcatctgagcatatgtgcagctattgtcgcgggaaaaaaaaatacttgataatcttgtaaatataatctagatagacactagtagaaattatttgtcgaaatcgtgaaaaccatgaaataacacaactaaagcaccctaggccatcaatcagctcagctcattctagactgatttatttattcatgactctggctgacctctgctggagagttgtaaagtataaactcaaaagctttctcttcatcggatctacaaaattccaacaaggccatgatacaactcacaacagcttcatgagctgtttttttgccaaacacttatttccaaaacagctttatgggtgaagttttt

SEQ ID NO: 4421 - DNA, 4328 bp, Sorghum bicolor
atagttggcgatggccccggcccgataatttggtgcgctttattatctggttgtgtggtgttgtggtttactccgttctttgcgcttattatatagagctaggatctgggaggtaccatttggaagcggatcacgacgtacgtcttgttggcatggcataaaaatattttagaccgtatcagaatgatacgaatacgagggccgtgccgtgtctagaatgcagggaacacgaaacccacgtccttgtgacatcatgaggggagagccatatgagcagatagactcgctagctaaggctgctctactctgatttgcatgtagtgctggtactacagcaagaaaaccctaaagccaaaaaaaagataatctaaatctaaaagtggagaaagaactgaaaagcttgaagccaaaagaagtgtactgctggcaccacagaaagaactgaaaatcctgaagtcagtttttttagaagaaatcaaaattaaaaaaaaatagaggaagaagtgaaacgggaaggggaaaaatctaaataaaaaatagaggaagaaactgaaaatcttgaagtcagcttttttagaagaaatcaaaattttaaaaaaaaaatagaggaagaagtgaaacgggaaggggaaaaatctaaataaaaagtagaggaagaaactgaaaatcctgaagtcagtttttttagaagaaatcaaaattaaaaaaaatagaggaagaagtgaaacgggaaggggaaaaatctaaataaaaaatagaggaagaagtgaaatctaaataaaaaatagaggaagaagtgaaaagggacggaaaaaaatatcagaaattggagatgcggggtatcgatccccgtacctctcgcatgctaagcgagcgctctaccatctgagctacatccccagatttgttaatggtacaagtaacacactacttgaacgtagaaacaacatcagcagtcaatttgttcttcatgcattgcaacaccgtccagtcaattggtgtcagctatagaagactccggctccggtggccgggccgctgccattgccaccgcgcgtatgaccactgtgtcccggcactacttcggcggcagcgcgtccaagcacccccacaacgaccttctaggtggcggttgccttgctgctgctggtgccctatggagtccaggaacccagtcaaaatgcttattactgatacaagagttggtaggaacacaaaggccctggttgctggtgtgtctgaaagagcatctaggcatccagatgctatatatggcttctgtctgccatgcagtgaactctattagtgaagagctttcaaagcattgttgagttagcggccgaggatgaaatagccatcacctctaacgaggataagctagcagagcttatggagatgaaccaaggtttgcttcagtgcctgggagtcaacattcttctataaaaactgtgctgcgaagcactctgaaatatagcctggtttcaaagctaactggagctggtggcggtgcatggctgtgtgttgactctaatgccgacatgtatccttcttttttatatcccctaattgcatcttttccttcatggttttatacaaaataaacaccatacaacttagcgtgtgatttctgttaatctttaacatttcaactcaaagcttttcagaaatctgggccttatatgcattaataaagaatcttacaggataggaacttcagaactacaatggcctgtcttgtacaccctctgtttaaaatcgtagacctttgtcgtaagacaaatttctttaacttggaatggacagctcattacttaatactcccttcatccaatttataagtcattccaataatcttgtaaagtttgacgccacggtgacaatgacaccacggacagccaattgagcttcaaaaaatgcgacccatcgtcgcttcaccaggcaccagcgcgtcccctagctcatcacgagtcaactgcttggacctgtcacgaggcaactgcatggaaggcggcggcggcggcggtgaccgggccgctgccacgcccacgcgtatgaccaccgtatcgcggcactacttcggaggcagtgcgtccgagcgccaccacgacctccgggtcgacatcatcgaggtaccgtacccgcagcctgccatctcgtccctctccagtctccacgctcgcgtcgcatagctagccgagagccacagctccgctcatatctcatatgctggggcctggggccgatcgtttcgtccggactgtccttacgacgtctttaaacctcgatcgcgtctaggaggttgccattgctggtgggcggtggctgaaggaatgcccagcaagtgcttgataaattgctgctaagccgcttgctgcctggtggtgctacacgaagcacgcgcccttgctttggattctttagtttttacccatgcttctcttgctgtgctcttgtgtcctgacttccttttggttgggtttacatacagaacatcgaagaggactacggcatgtttgtctggccatgcagtgtcattcttgcagagtatgtctggcagcagagatcacggttctctgcttccagagttgttgaggtactactacttcccatctttgtgtttgttcaacttcccatccaccagtcaccaacattgtccacttgctattgtcaccaagtgtaaatggcagttcactcttcactgaaaaacttagctcaatacttgctcgtatgtcccaaggccttggtattattctcaatgtctgaggctgaaaaatcctctctttatggaatccggcattcctattcacgtacattattgttggacggaacaatactacagttatgctcttatctaatttttgcacgtatcatttgcagcttggtgcgggaacctcactgccgggattagtagctgcaaaggttggagcagatgtaacactaacagacattgcacagaatacagaagtgaattccaattccaatccatcttaggaatccttatcatttcatccttgtcagagcttcagtatggttaatttgctccttgtttttactgactataggtactaaacaacatcagaagcatatgtgctctcaataacgccagttgtactgtatggtttgatttcacatacagagatttacatgttgcatcccatggaattcagagagcttatcttcgcaaaaacaaaaaagaaaaaaagaagaattcagagagcttagggttaatccataaccatgcaggtttcaggacttacatggggagactgggatgaaacggtatttgatttacgtcctgacattattcttggagctgatgtactttatgactcatcaagtgagctaccattctactctaccgttttcagtctattactgctatttcttaaatgtggatgatcatttgtgtcccatccattcactgaatacctacctatttccatttgtatttgtcatcattttggctgactgacataccactgcatctattttggcaagattttgatgatctgttcgccacggtgacctttcttctcgaaaattcttctggggcggttttcataaccacataccacaaccgcaggtaccaacgaatcatttcatccctgttgcacttggaagaagtgtggcaagcaaaaattttgatgaatcagtttcatttctctacgcagtggtcatcatctgattgagtttttgatggtcaagtggggcttgaagtgtttgaaactcctggatggtttctccttcctcccaccatgcaaggctgcttcacttcaggggaatattcagcttgttgaaatcacgcttgacaaggaaaaacataaatgaccctggggtgaggtgagggagcttatttcatgggtcagaaaatctgcaagcgtatgtgattcagaatgatttatgcttcgtgggttacacgttttacaggagttgatgaaaagcacatagaaataaaatgccatatttggtcctctgcatacatgatgtagcgagcggctccatgtcaattcatccatttggactgtcatcacaaggattttctttttaattttaaagaagtcatcggttcgttctaactgcgaaaaaaatgtagattgcctaaaaaacgtgcagagatgcccatctgtttattcatgtgttcgatgagctaaacacatatttttgcagaacgagcttttctcagcttttttcaaaaccatctttctttcttttttctttttcttttttgcaagaattccttctttttatgatgaaaccttacaggctgagtgaacaatataggttgtttgaagttttcaccatttactgttgttagtgcacacaatttc

SEQ ID NO: 4422 - DNA, 7093 bp, Sorghum bicolor
ctcgtgtaattattttttatttttatttttatttaatatttaatgcatgtgtcgaaatattgaatgtgacgaggaatctcatcgagtcacgactcacgacggctcgaccatcaattaattttcttgtcgctgtcgacgagcatgtcgttgtacagcacgcactgaaaaaaaaaggaatatccgtatcaatgtagcagccgaagttcatccctaacaggacactgaccatggatgcatttctcacggtgaaagtttgtatgattccagtcagcttcctttattcgcattcgcaacgcgttgcgtacgtccagatcgaatccaaaacacgttgccaattgctgctccttcggggggtccacgattcgtttctcactagttgaaggggatggatggacagagtcgatcggcattttcatcccgtccatatcttccgaaatttctcttgacgttcatatctctggaataagagctttattagctaggtagctgttcgatctaataatggaatcgatgcgaaaggtgtggcaatggcataacgtgcttgctgtctctaacctgtcctttatcagatatgtaccatagcaagttaagtgcttataagtggcaagagagcactcaccttgtgattccaatttcgaattgtctttttttctagacactaagatgctttagaaatgccaatcagagcatctccagcaattccccaatgccacctatcatctccacaaaactattacattgggagatataacgatgtgtttggtttgagaaataagatggttcatcttctcacttctcacttttgtttatttgatttgtgcaatggagtgagtcgatctatatcatcactttattcctcatatactaatagttggtatatgcattaggacgagttgatttcaccaaaatttatgggatgaactcatggtggatcaccacgtgacgcacggagtgactccacaaaccaaacacacctccgaatacgctattacatgtttgcgctagtttttgttgtggaaacagtctttctctacacctccgaatagccactgaggcggaccgcctcgtttcctccctcgcccactccccttggggcgttgtcgttgacatcaacgagaagttgtacacactctccgatggtattggcggcacgaaggagctggagcaaggtttcatgcgaataagaaggtttgtgattggggatgaggttgccttccctttccacgtgataacaactccatcgagtcctcagccacctcgcgcgtcggccagagatgatgttgtctctctttcccgcgcgccgcgtgtaggagtgcggcgacgacgaataggacgtcggtactcagtagcgcaaagaagatggacaaggggagaaattatggtgtgagagaacacatgttggatctgatcctacgatggaagaaagaaagagaagaatcgagaaaaaagaagaaaaaactgacaagtaggtcccacatattaaggctgattatcgatgacctgctgcagtaactcctctaatactccaaatgcagtattggtcatcaccaatatcactccattaggaatgagttattggtgtggttgctgaagatgctctcatcatcataagatgaacatgacgatgacgactttgtagtatgtatagaatatcaattgagtagtgactaaatatattcttaaaatttttcgttttgttttaagtattataataatggcaaaaatttccatcacggtcgctaaaaataaaatatatagttgcaaaaagaaaatagaccaattcaaaattaccgtcattttttaccgtagcgagcctgacccccgcatttggtcaacgtttagcccacaccaaagacacggacgcgttgggcctaacaactgatagagcccaaaggccacatattcaggcccacgggcgtggtttcctcgtcaaaaagaggaaggcccagcaacaatcgagtcctcttcaaccgcgcgtcggcccgcccacgtacacctccaccgtgcttcgccggaggtcggcggctccacctccacgccaatatgggcggcgggcggaagcggcggcggcgcggcggctcggatgctccgtcgatgcacccgcggaaccgctacgccgccgccgcgccggacttcgccgcgctggcggagctctacccgtccttccgccccttcgtctccgtctccgaccgcggccgcgcgtccgtcgacttcaccgatttctccgccactcgggagctcacgcgtgtactcctcctccatgaccatggcgtcaactggttggtgtcgctggctccccacctctctttactcttgctgcgttcggctcattccatgaaccctagcatgatcccctgtgccgaatttgttgctatatgtaatcgttcgctccaccttgcccatggtacccatgaagccagcaagtattatgatggacgaatgaagtttgaattgttttactgttgtctactttcagtatttgggaccaattgtccgtttacaaactgctgatgctacacacgtactctaaaagtgataacagagaactggaacttcgtacagtttggttaaaattcaacattgaattttaggtttcacctagttcccaatgcatgctgcattgcactatgtttctattttgtgcttagacacttcagtaaatattcctcactgcttttatcgggtagactgtttgatgtgcaaaatacttgtatggccacagtgaaactaacttttgttcttacaaatcacatccttgctaaaattaagaaaggtttagttaaaaaatccatcaaagtatatatgcagtaagcacactgttcactctatgttttggaggtgattctcatgcagtatagttatgctagatcattgtttaaacacaattttaattttagctactgttaggtggattccagatggacagctctgccctactgttccaaacaggtccaactacattcactggatcgaggatcttctctcctcagatctgataccaccaatatccagctcaagtgagagagtgaagggctttgacattggaacaggtgccaattgcatctaccctctccttggagcatctttactgggatggacctttgttggatctggtattcctttttaccttctgcactccaagttcagttttgtgaatcattgtcttgttaaatgagaaagatgtacatactcaattatgcaactgtcttttgtttgtagatgtcactaatgttgctcttgaatgggctcagaagaatgtggagagcaatccacgcctagcagaactaattgaaatcagaaatgcaaatgcaccgtcctctgagtctgaatctgttgtcagggaagcagcaagggagaagattttagagcctgcggaggatgtagctatgccaaagccacatatccttgttggtgttgtaaaggagagtgagagctttgacttctgtatgtgcaatcctccattctttgagagcatagaggaagctggtcttaacccaaaaacatcgtgcggtgggacagctgaagagatggtttgccctggtggcgagctggcatttgttacacaaatcattgaagatagtgtttcccttaagaactctttcaggtaattcaaagcttttctcactatggtaatgcatgctatgtttttgtattcatctgtacgatggttgttattttgttgtttagatggtttacatcgatgatcggcagaaaggcaaacttaaagttattgatctcaaaggttcgtgaggctggggcctcagtcgtgaaaactactgaatttgtacaagggcagacagctagatggggccttgcttggtcattcattgctccaagaccaagaaaaatggtcctcagctccactgctccagcaaaaaaccaccattcctttatgcttcaggttggcatcatttcaccttttgtccctttacacatgttctgtcattcaaattgacaagttaccaacaaggtcttgttaacaaaccaaacaaaaaattccagctcatatctgttctgtgaagctctgggtatccaaacttgcatagttgagatgttcagattgttttgtttatcattttacttatttgcctagttaaccttgcaataaggttgaagcaatcttatgactaacttcattcagaaaccttcctgtctacttcacctgtttctcaagtggctacttctgtttttcaagtggccatgtttatgttagaatcattgctactctgttactatgtttgctctttgtctaacctctcttttcaaatgtatatttggcataatgaaataagggccttcggcgtgaacatggcgcgttccaagttctgaaatcaactgaggctttctttctagcttctaatctatcatgcaaaactgatccgttatcctttgcggttgatgtaagtttctttgttagtatgacactaattcagcttcttaagtttcattgagatctatgatgcttatgcattgtgttctctgtgttaatactggcttgaaatatttctttaggtcacattgtctgatgagcagattgaggctgcaatattgcatggggatgattatgccggttctctagaagacagctctgcaaagttacaaagtgttgtcaaaggaatatcatttcgtattacagtatgttgactgcaaattgcgtttctgatactttgttaagtttcttttctaaaataattattgcaattttttttatcctcgtgtaggtgtttgaacaaattcctgggaccctcctaatcaaaggctcatcattgaataaagcattgtcaggtagtcccatggtctttatgtgactattggcatattacatgatcatactgaaacacctttatcagattgctttaagatatgacatgcatttatacacctatcaaatccatctcaaatagcatagtgccttcatgttgagctgtttatgtccttcacatctactgtatagaacagttgaatcaaatgaactatctactatgcattcatgacacatgagatctgaaatccgttctggtgatgctattaactcttgggtgtctaggatggtgtcttccttatgtattagttcgtcgatgcttttactacacgccatgtgctccttccctaatataatgaaatctgttcatcgagactgaaagttcgatgcaccaataaacgccaaatctacaggctggcatatgcaactactgtagcatgtctagtgcaactttgacaagctgtgctgggccgatagtgataaaataaaatggtcctgaagaatagttgcctatatgactatatcatgtaaagagggagtggtagtagtactgatgtctggctggctcttgcatatggcttgacaggcttgtcactggctctagacaaatgctagtggctaatctcacgatggagacataaatgccactagggtatcttcgggaccatttctagattggctgttggtctgtaggaggcagaacctgtacatctggatcatatggcatgttggtttgagagttctactgttaccgattgtcttggttctggaggatgcaactgtaaaattgtagagagacttaaaaatcaaaccaaacttatcaagtaatctcctgactaattctttcctatttgtttcatgaaagctgcacctgctacaaaatgtgttgttcatgtgtactatataagcatatgcatagatgcaaatattacattacccttgtgtgattactgttatcccaattgacttgcttaaaaccatgagcataactgagccaaacatctatgatgtgtcagatacgttttctgatggctctcttgcttattattaagttacatgtcgtggtgacaaggacactcattttactgtcttttttctgcaggtaccttctcatcattattctctcagttggaggacgcgttaaggatggaatgtctcagtaaggcacgataggtctttaattatgagctttgatgcctctgcatggataagttttttggacgctaaggaatgggcaaaatgaaatcatgagacagcaatagcttattagcttagccacgagccacaaacagagacgccgagctgtgatatgggaactcgatcttgcactgtggaaatcattgttgcccgcatcttttcttcaatgtgcagtgatggcagggttgtgaaaataccagcattatgtctggtgtgttggctttatttctcatctggatttggagaacgacttgagcggcatgcatcataagccatttcagtgacagagtaaatgacgacatagaagatcactggtctgtacagacagggtatctggtacacactgcattgcctccacagttttttttttatggcacggggactcaggtcaacgctttgaacttcagtgaagcggacagtgcatgaaacgctttgatgggtttctagaacatatttgtagtacaatgcctgtggcccggtagcagtggctaatgtaattgtaacactgtcagctgtgtgaagtatctttgtcctgtttgttgatgccatgcgatgtttttgtgtatcgccaaaatttgaacccgtgattcctaggatgtgagatcaatgttgcatgcatgagctgtcgattcggatcattggtgcagacgactaatgaagtgtccatcttaggcacctcacagtcacaggagcatgtttccccaagtagtttgatatttgttgcacgtcgcttttgttatccatttttctggctgttgttatctgtttggtagtatttgggagctgatgtatacaggacctatgtgctgacgtggaagcatagacaagctaaacatggcatgctgaggagtacccatcagcatcccagctaatggccaaaagattccttccgttctaatatttgcacactttggggaagaaattacactctaagaagctactcatctagggccttgtttagttccccaaaaattttgcaaaatttttcagattccccgtcacatcgaatctttagacgtatgcatgtggtattaaatatagatgaaaataaaaactaattgcacagtttggtcgaaattgacgagacgaatcttttgagcctagttagtctataattaaacaatatttatcaaa

SEQ ID NO: 4423 - DNA, 5650 bp, Sorghum bicolor
cttgtttagttctgaaatttttttgattttcgggactatagcactttcgtttttatttgacaaacattgtccaatcatgaagtaactaggcttaaaagattcatctcgcgatttacagttaaactgtgcaattagtttttattttaatttatgtatgtaccgcaagatttgatgtgacggaaaatcttgaaaagtttttggtttttgggtgaactaaacaaggcctcaatcgttttcatgtaataaacgtgctacaggcagaatatacagtgacttcaacagtgacgtctttattatgccccatatataatatatttaatagccaaagatgggaaatgtatataacgtctttttcttacacgatatcggggaccaattgcagtcacatttctatacatggagcttattggcagcatgcataatgcatatatataatatggtggcctggttcgaagttcgatttaatttgtaggatactgcatatatacatatacatatattgtactcgaaacaattttctattttcctcttttatggaaaataccagtgacattattctcgaaaaaacaaatacctgtgtaacaacaatataatcccagtgaaagaaaaaaaagacaacgaattaagttcaagaccagctagatcagaaaacatctatgtgtgtcgtcataacttgttagcaaataaagtgagaacaacggatgcacaaatatatatacttgagtaatttcagcctcatctttggaagaataatgtgtgatggaatcgtgtcctgaaattaagttccatttgtgtttcctgtaggacttgaggtcaacactatctatggtagaactacacgtacaatagagatattttatccattgcaacaagaaagaagttgcgatgtgagtagcgtatatatgcatacacacacgaagccaatgcaatgatcaaacattatgttgtgttaaacaatgtatcctaaaatcaaattgttaaacattattagtttcataactatttgtaagtgaaaaagttgctaaaaataatgcatatgaaagaatgttcggtggacaatcttctcataccatatttttatgtgttaaatcccaaaccactgatgtgaaccattagtcatcaaagtttttaaatggtatgaatgaagagagagtaattaacctgtaagcaaactgaacacagggacacataaatttgcagattttggtctcattcaaatgtggaatgacaaccgtttcctaaaaaaatgtatcacgtgttcccattcaggcctttccttttccaagtactagtagctagagtgctgtttagcaacgatagtagtgcttgtggtacaagtacaacgactattcaacctctgttcgcttacaagagctttcatatggtatgtagtaaggagaaacaaactgaaacatcacaaaagaattaacagtgtcttcaaaagcgattgcagaacctgctaactaagcatatgtgctactccatccgcttcaaattataagttgctttaaattatttatttcatctattttgctatgtatctaaacatattattatatctagatgcatatagaaaaaataaattgccaaaaaaatcaaagcgacttataatttgaaatagagaaagtaatatatatatttacttaatttgtagcaaatatatagcgtttgagtggcttattataatctgtcgacgtttcattcagaactagcttagtgtttttcacatgggtctcgcagaaggtgatgtatctgtatatatatgccctgagaagagaacgaacgaagagacctatcacctatactaacgacaggatttggactccagtttgatgctggcttcggaagctacatgcaaacaccacagctaacacggtatgtggctcacataaacaccatagcaaacatgtgtatcctagctaggcacacatgttctacattcatacgtactacgctcgccctataaattggccgagggcctgcgctcacctcgatgcatatcactcacacaagcagccatacaacaaaatcatacacataggcatcattagtagctttgcttggtttctgattaggttgtttagttagttcgagtagttgcactctctaccaggagcaataatggttgctgcacctgcgcgcatcatcttctccttctcctctgtggagcctcttctcattgcagcttcgccggcagcagctagaaacagccggcaaggccgccaccgtggccaattcatccgccctttggcggcatccaacactctgctgggcaatgattttgatctccaggtatagcctatagcaagccatatccatttcttttcattagttccagatgaactgatgtgtaaccctaactctagtcaattagactttcttcacaacataataatgacttgataaaaactgtagcactccataagtttcatatactatatgtgctcactctccatgaaacaaactaccttgtaggagggcctgacggacgtccaaaagattcttcatcaacgtcaaaagagcaaccgggagatgatggtcaccatcgataacctcaagcgcctctgcgtcgaccactacttcgaagaagagatcgagagcgccatgagtgcttgcatgaatctcgtccacagcaatgatctcttcgatgcaacccttgcattcaggctcctgagagaggcaggctatgatgtttcagcaagttagtaaacgcagacaataattaatcgttcctcccaaatgtatatatattaagctctttttttcatgaacatcgagctatacatattaacataattttctagaaaatgtactcatcgttattttcgaaaaaaaaggatatatatccacgtccaaattataaatggtttctacaaacatcgatgtgcagaagatgatgttttatggaggttcactgacaacagcggcgaattcaagcttcctcttagcaaggacatccgagggctcctaagcctgcatgacatgtctcacatgaacattggaggagaggcattgctcgacaaggcaaaagagttctcaagcaagcaccttgcatctgccattaggtacctggagccaagccttgcagagtatgtgaggcagtccctggaccacccttaccacctgagcgtgatgccgtacaaagctaggcatcacctcacctacctgcagagcctgcccaccagagacacggcggtggagaaactagcaattgcagagtttcagctcaacaaattgctgcatcagaaagaaatgcaagagattaaaaggtatgcaaatgagtgctgatcttcctagctagttagtcatatgatgcatatatgctattgtattatagatcagttgcgtgataatttcttcggaaatttatgtaaaactgtttaggaatttatattccagatttttttttctctaagagtgagtggtaattatttcctgtcttatgaattataatggtgagatatttcattatttgatgcagatggtggatggacctaggattggctcaagaaatacctgtggtgcgggaccaggtgctgaaatggtacatgtggtccatgacagccctccaaggatattctttctccagatatcgggttgagatgacaaagataatctcgcttgtctatgttgtggacgacatatttgaccttgttggcacactagaggagctctctctcttcactgaagctgtcaaaatgtaagattatatatatggtaaatgatatgtataattattattgtcatattaaaaatagcaaatttcaatgatgttaattttaaaaacataattggcaggtggaatactgcggctgctgattcactccctagttacatgagatcatgctacaaggctctttacaccattacaaatgagattgcagatatggctgaaaaggagcatggattgaacccagctaataatcttagaaaagcagtatgtttcttaataattttatcttgtatgcacttcttcaatttatctacataaatagtaataaaaaatttaccaacttaaaacttgctaaaatgattcataagaaaatttatttaaaaatacaaatgaaaccacactaacaattgctgacgctagaaattccacaattttctgcagtggacggtgttgtttgatggatttatggttgaggcaaaatggctagcaaaccatcaggttcctactgcagaggattacctgagaaatggtgttgtcacgtcaggagtgccgcttacatttgtacacatattcattatgctagggtgtgatcaaaatagtgaagcactcattgaccacatgccctctgtcatctcttgcccagccaagattctccgactttgggatgacatgggcagtgcagaggttagttgaataaacacttgttaaatgttttcaccttttgcacatcaaaattttcaaatcggcaaacctttagcacttttgttcatggactttttaggatgaatctcaggaaggattcgatggatcgtataaaaatttctacctcatggagaaccctagatgcagccctactgatgcggaagcacatatgcgtagcttgatcgcaagggagtgggaggagctcaatagggagtgtttatgcacgaggaccttctcctctaacttcacacaggtctgcttgaacatcgcgagaatggtcagtgtcatgtactcgtacaacaaggaacaaaggcttcttgtccttgaggactatgcaagaatgttgatactttgaagctttgctccatgcaagtccatgtgccatgcctaatttatctcactccttgttagttgagaccaatatagaaatcagagcatgtaagttagatagatggattaaaatatttgggcaaagaaggatgatatatccatcttcttgaaaaatgtattgttgaaatatgcaatggaagtaacagttttgtaagagccaccacaaatatgaggcatgtcaacaaggttaccaatggcattttagagctaccatgggtactatatacagaggaaggggtgagtgctagtatagacactaaaggaagatgtgtatggtcttgtgcaatactattgtgctgtaataaagttatgttcttgtaagtgttagtcaattgattaagttgtataatttggaagtacttattgcataagttattgtgatccattgaaagttggcatcacctattagactactactacaaaatgattttcataaaaaatccttttatttacagagtcgctctaaaaatgtatgggtctcctaaaatagctagtgaatttaagaggcaataggagcatttatggagacaaccgaatatgcaccatctccactataaacttacttatggagatagacgtttaacataacccctttgtaaatagaggcatttacaaagacagaaatattaggagatttgtccctacaaaatccatgacccattacaaaaagttcccaaccctaacttactctctcaatgcctctctctctctctctcatccccagcatgatgcagcccagctagctccctagcatggtcgactaagggcctgagcggtggcttggttagcatgagcggtgcgagggcttgcggcatggatgcaccaaggtgtggcaacacaggtggcctaggatgacgaaggcgacatcaactttgtcctcttgat

SEQ ID NO: 4424 - DNA, 11145 bp, Sorghum bicolor
aacccggagaggagactgcgccacctggggcccagcgtcctcgcgacccagctccggcgcggcgtccgccctctgcaaccccggtgtccccgcgaccgtcgctgctgtcctacttcgacactcgcccaccttggccggccacgagcaccaccaggacaccaggtattcatcccttgctgctgtccgaagccgtgcgcccaaaccctatcgtaatcggatctgaatctaattacagggttatatgcatgtattattatgcctaccaacttcgattgctttgcaaaattattcacgtggatccgaatctgatcagtccatttctccagaaatcgcagatgcacacatcggtggtggtcgtcgtcctggagacgaccgaagtgtacattgtgatcagcttgtcaacgaggagagatacccaggtcgtatacgtcgatccgaccaccggtgccctgcgctacctggggaagcatggggaggacgtctttgattccgaggcagcagctctcaactacatcaccgacgggtcaagggttctatccaagagcaccacatatgccaaggcactgctgggatatgcagtgttaggaagctacgctctgcttctggttgcgacacagctgagcgcgtccgtccccagtctgccaggaggcgggtgcatatacacagtggcggagagccagtggataaagatccagctgcagaatcctcaaccccagggaactggagagcagaagaatatacgtgagctggccgatctcgacattgacggcaagcacttcttttgtgagacaagggatgttaccaggcccttcccgagtcctatgacactacaggaaccagatgatgaattcgtttggaatgagtggctgtcgaagccttttaaggacataggcttgacaggacaatgcgtcatccttctgcaggggtttgccgagtgccggagctttggaggtgctggacagcaaggtgggttagtcgcccttattgcacgccgtagtcggctgcaccctggaacccgctatttggcccgtggactgaatgcatgttcaggcacaggcaatgaggttgagtgcgagcaactggtttggattccacggaagggtggacagcgtatcccttttagctcgtatatctggcggcgtggaactattccaatatggtggggtgcagaaataaaaaatgccatgtcagtagaagctgaaatttatgttgcaaatgatccttacaacggaagcttacaatactaccaacggttgggcagaagatatgggaataaatcatctgaagcgaatgtatccaggcaaaagaaatctggaagggttcctgttatctgtgttaacttgctaagatacggcgaaggaaaaacagagtcagttcttgttgatcatttcaaagaatctatacggtacatgaactctactggaaagctgggaagcacgtggattcagttgataaattatgattggcatgccactgtgaagttaaaagggcagcagcagacagttgagggcctatggaggcatcttaaagcacctacaatggtcattagcttcagtgaagggaattactatgatgtaaggcagcagcttagtgaatgtaaaggatcagttatctgcaatgatgatgtaaatggcgggttttgcatggagtctactcaaaatggggtgatacgattcaattgtgcagactctcttgatcgaaccaatgctgctagttactttggtgcacttcaagtttttgttgaacagtgtagtcgattggacatctcgcttgacatagatgcaatgttcgggttgtcaagtagatattctgaatatgatggtagaaacactcgttctttgccccctggatgggaggagcgctttgactctgtaacagggaaatcattttatatcgatcataatacacgaactaccacatgggaacatccatgccaggaggctccacagaagccttggaagagatttgatatgacatttgatcagttcaaaggctcaacaatgcttgctccagtgaaccaccttgctgaactttttcttttggctggtgatatccatgctacgttgtacactggctcaaaagctatgcacagtgagattctgaacatattcaaggaggaaactggaaagttcagtaaattctcagctgttcagaatgtgaggattacggtgcaaagaaggtaccaaaattttgtgaatgatagttctcgtcaaaagcagttagagatgttccttggattgaggctctataagcatctcccgtccatccccatgttccctctcaaagtaggtaaactgctcattatcagtgtatctcttgcaaactgatattattggtcttgatgcagtattatattatttatattgtacttttttttgtgataacatccttgatattgacaattcaggtgctatcaaggccgtctggatgcatgttgaaaccagttcctagtatcaccccaatgactgatggtggttccagtcttctcagcttcaaaaggaaggatcttatttgggtatagttcttccttaaagactcttcttgatgcatctggaagagtcttcctgatagttttctggtttatttaattattgccgtgatgcttttttcatatagcatgttaaagactcttgtgcatgcaggtgtgtcagcaaggtgcagactacgttgaactttttatataccttggggagccatgtcatgtttgtcaactgcttcttactgtctcccacggtgctgaagattcttcatatccagcaaccgtagatgttagagttggctcaagcatagactccctcaaactcgtggtcgaggtccttgtctctatcttacctcactggttttattataatatccttttcttttgctccagctgtttcatcatgtttatttgcaaataccaatttagtttccatacttttaagatttggcttgatgaactgacaacagtgtacccaaagtcaagaccccagaggtgcagacacaaaaaatgctgtccttgctaaaattgagcttcatgtgcattaactctgactttaagaccatgaaaaagttgcctgattcagaaccaatgctgaactgtgtgctgattacttttgctgagatgagattagctaaccacatttactgagtttggcctggattttggttaggttatcgtcaccatgtttaggtattgttgatttgaaattggtcattgcttctttttgtatcgtttaatgaatattaattgggaaattacttgtgtagggcgcttgcatcccacagtgctcaaatgggacaaatttactgattccagtcactgggagaattgatccagaggacttggctgttacagggaaaagtgctaggcccaatgttcaagagagctcctatcttcctttgttatacgactttgaagagctagaaggagaactaaactttttgaatcgagttgttgcattatcttttcatccatctgctgtatcaagaacacccattactcttggtgaggtaaaattgatgaattctctagattgaaatgcttttcaaaagttacttttggctttgactatttgtctatctttttcttgatgagttgtataaatttctttaacagattgaagtacttggagtttctcttccatgggcagacatgttaaccaatagtgaacatgctcctgaatttatggagtttctcaataaaaattcatcaagtgttcaccgtgatctaggttccaagtcttttggaaattcttccatgcctgggaatgattctcatggtattgatgggtcttacactaaaagttcatcatcagttcaaacaggtggttcggaaaatttgttggattttctcacaggtgattttgacaagtcggagccgcatataactgaaaatacttttggtaatggggaacaaacaaacttcttagatgatggatttgatgttaatccttttgcccctgcattggaagtgcctgttcctaaagtgaataagcaggttgaagaatgtggcagcacacagctttatcttaaattttttgaatccctttgtggctataataaggtattcatttgtaaaaatttcatctccttttatttctattcctctatgttctgttcttagtatactttcttgaatctttgttgagcattccttaaaaaatactttgaaattaccttatcctgaagttgccagtaaaatattgaattgcttctttgttcagataaatgagcaagatggttctaccattatagtttgaagttttgaagtttctagtaggaacactactgaacctcccccctcccctcccccctaacaaaggcagttctagtttgaagtttctagtagcaacactactgaaccctttttccccctaacaaagacaaggttcaatttatgacagattatctgaatctttaggtctattcaggttacatatgtttagagttctggcattattacttcctttgcttttcaatacatacttgcttattctgaaaaaataataatgaaggaacaaaagttgacctattttgaaaaggtgtttatgactttaaatccaaaatacattaaactttattcatctttccagggaaagggtcttgactttgagcaaatgatgaagcttgaaataaaacgtctctgtcttggtctttctgccgctgaaagggaccaggcattgttatcaattggtgtaattcctgccacattggatccaaaccgttcagttgattattcttacctattgaagttatccagcttagctgataatctggcactgctgggccatacagtccttgaggatcgtgttaatgcttcaatagggcttgaaaagggcagtgaacacactatagacttttggaacatcagtgaaaatgatgaatcctgctatggtggggcatgtgaagtccatgctctgtcttcgtcacaagctttagccactagagaaaaccagtcagtatttgtggaatgttttcggtgtgaaaggacagtttgcaaagcttgctgtgctgggaaaggggccttccttttgcttaacacctacagggagttgaagatttatggtgggagtcaaagtggtggctattcagcactcgcagatagttttgtgtgcaaatcttgctgcagtgaaattatcaaacgtgcattgtatgtggattatgtccgggttctccatagtttgcgcagaaaagatcgttcagagaaagcggcactcagtgctgtgaatcaggtctgccaactggagtacaggaaagcatctgatttttctcaaagtgttcaatttggtcagagacaattgaagcagatccttgatggtgaagaatccctcgcagaatttccatatgcaaactttttacaaatggtatttctcaacttcgtaccaagtcatcataaattgcactactgcatgatttgttgtcctgtgttgttcataaactctgatgtatttgcaagactattgatccatggaccatgaaaagcagtgaataaacttggccttgtgataacatcttctttttaagatccctcccccctttctctttttcttctatgaagtttgcttttaccatagataatgctttgatcatgccttattctctatactcaggttgaaactgccaatgactctgaaccactgctttcgttactggcaccttttggtactggagagtacaagtcttactggaaagctccgcaagataacacttcagtggagttctcaattgttcttggtggtttatcagatgttgcaggagttgctataattgtcagttcttgtgggtactcgacatctgactgcccaattgtaagttaggctactttactttcttttccttcatcatgctatccttattttttatctataaaatcagtacggacaatgttagccaggcatacttaatactgcatatacagaactatgtgtatatctttcatttccgttttcttaatgattgagaccgaagaaggatatttactggtgttaatgaaatcatattttttaatcataaaattacataacttgattgttcttcctgagcgaaggaaaacatttcagtacagctgtatctttgacagcttgagcatgctacattttaacaagggaagcaatatgaaaaatactatcttcatcacataattgtatgtcttgagagatgcctcatgctctagcccacttatttccaagaatgcaaagaacttatgttcgaaatcactccctctcctttcttcatggcctgtatggaacgaaggattgtaaaatgaaggaataggaaaaaacgtaggaatgacagtgagtgaaagctgaaaaaccgtaggattccaaaacgcaggaatgaaaatttttaactgtttggatcgcaggaaattataaattgcatcaccgcatgtccaagcaacaaaacacttttaattatttctgtttgggaataaattacttttaactatttttagatctgatttacatacttattaattggccaggcatgctattatggcatagtaatcttttttttttgaaaaccggtatagtatatacaattgtcttctttactcattttatcttattatataatagtgtgggacccacggtgtagttatgatctctcacctggttcttctacctcggttcatctgcatcccacgaccctttcttttctctatcctatacataaatagtcttgtcaaatcaatcggtattcaatcatattaaccacgtttagaggtcagatgacttgctccctaccgtatgcaaacacttcatagaagccttgttaccaaatcgaaggctacgggataggaaagcagatgtacgtgtatggtgccacaggcccagagctccaagctcctgcagtgaggtgctccccgactccccgtcctcgttcggctgcgctcagtcgtccccggcgcccgcgcgcgatcgccacgcccggccaccctcctcatctctccctcattcctgttgccgcaagcgcgggcacacagctgctgacgcatccactgtatagttcatggagaacacagctacgggagcgagcaaggccagtagtgggagagcaccggatcgagagacacgacgaagatcaattcccttgggtcatggtggctgttttatttcctgcgttttacacatcaaacattccctttcctttggaaaggatttcagctttccttcattccaaacgcatccgtaggatttatttcctctgtaaagttttcctccaaaattcctgtgaaaaacctttgatccaaacaggccctgtgtttatcacaaacacacactaggaaaactcccactgtcttcagtgtttatcacaaatgcactaggatatgactccctctatcttcagtgtttatcataaacacacactaggaaatcattccctcttcagtgtttatcacaaaacacacaaggaaatcactccctctacctctcttttatttgatgcggctctctcagccctcaccattttctcatatgtatagctgataaacatgcccatgatatcatcctaattactgcattcataactcctacgatcattccttagctactagctgaacatctgctagtactaaagactgcacctagacaccatgaacctggacacatgcatggacacacaggattttatagctgacaacttatgccttttgcaattcgatttactataacttgttttagcagctgtatgatgattgtggcttcataatttgtgtcgatcacctatctttctgtacatacagtgttgctatgaaaaacaaatatatcttgttggcataatctttgtctggagtttgtgcaatgtgcaagaactgcaataattctttttcatatatactgcagagttagctatctatgcacaactagtgaatcgtttgaactagcccactgagctatcttagctttctgtgttcttttagtgcattttcctgcaaaacattgtctccatattctgtcatagctagctatgtatgcataacaaactcctgttgagctgttttcatttcttctgttcctttgatgcattttttttacttgtttgctttgtattctaataatcatgctgctcgtgcaggtagagatatgggcgagtaataaaatacaccgagaagatcgtacgttcataggaaagtgggatgtacaggatatgatatcttcatctccacagctttgtggacctgaaacatctagtagatttagtgaagaaccaagacacattaaatttcacttcccaaatactattcgttgtcgtataatttcaataaaaattacacttccccataatggttctcgttcaaccaagtttagtgaggagtttgatcttctatcattggatgatagctcagtttatgaatcaaagccaaccaatccacagaattcatttatccatgcgaaaagaattgttgtttttggcagttctttgagaaaggagatggggcctgacacatcagggggaataatgagaatgaaaagttatttagacagatcaccacccttggggagatttagggtataccctatgtcttttgctgacagttttgagctttgcattctagctgtgactgaaacttttcttctttattttccagattccagttgaagctgagaggctgagagataatgatcttgttcttgagcaatatcccttagctaattcacctggaatagctggattccggcttgattttttcagtgttataagacctcgtgtgacccattcaccttcctcatcagaattggacatgaggaagttttcattgacacgaatggaggatagatttgtaaatccagcaattctttatatacaggtcacagttgttaaggtaatggcccccggtccccctttaaaatttttttacctggggggttagggtgggtttttttaggtttctggagatccccttaagggttttgtccctgaacggttaaaatgcccagggaaggggtccggggggtcatgggccctatttttttggattaaaccctgtttcccaaccatttttcctttttccaaaatttttcccccccccccccccccccccaatgttattagtagtaattagtggaatgtccaactgaactgccttcaaaacttcatttatttatagtggtggtagtcaaagctggcgaatggccacaaaataaaatattgttagttcacttatgtgatgatggtttttcgaggtcaaactatgataattttccacatgctgttaatcgagggttggaacttttgctacttgtagttttgtcagtgcctattttgtatgtgtgcatgaaacatttctgttgtgcttgtgattttgtacaggagtctggcaagttggttgtagaggaataccgtttaccagaagtaaaagcgaatacaccactatattttgatttcccagatctacaacaggatgctcgctgtgttatctttagattacttggtgatgtcactgcctttgttgatgacatttctgagcttgagaacttaaacttgcgaaatcttcctttggcatccggactgtctttgtcaaataagatcaagttgtactactatgctgatacatatgagatgggaaagattggcagtctctcagctgtataatgtatgtgaggtatgaagttctaactttgtaaatcctctcaaacgagcctgttttattacagagttcctaacttgttttttgacaatcaattatgctcattttcagaataaatgatacatataatatatgacaaagctaaaacgcataatacagatctgctattgagcctctcttccctagcttaagcctacctctacacgtggatggatgcctaacatactcaagttaaccacataaccaggccgttatggtttaggtcctggcccaatattcctatttcgagctagaattacatactgacgggtctgaatcctgttcatactgacttacccgaggccttagagggaattaagacttacccgaggccttagagggaattaagaatttagaaacacaaatcgttttttagccatggactcagcaatagagcttttttttttaacaaactcaggaatagaacttttactctgccgctggtgtttatctgaatgagaaacgtatgcatgaaactatgaaatggtatgtgtggattgttgtgtactaaagcctacatctgtttagttcattgtctgatactgctctttaacttggtgtttacttgtgtttaggtcgtacatgccaacctgggatgttaaccgtcgtccctagaagattgttgtaacctattgtttgtacgtgttgatgtggaagtaagagctgttgctacaaatacatgatgtcttttttagtactttttttttttgcttacccgattcaagggaaatagggattttgcctgtagaatttctggaaattcatctttttatgtagaatagctggaaattcaatacgatggcagtccctgaaactgccagttacgtttgtcaaaacctgtattgggacctggattattattatatagagctaagaaattgcattgaattttattttgtttcatacatattttaagcactggtttcaccagttgttggtgtgtatactggtacatggtcgtgctgcggtccaaaactttatgttatcgacatttcatttagtataaggccctgtttggctacctttttccccctcctttttggttaaagccaagcttatatataatgctataatttcggaggaccctcttcctcttcctgatgggactgggactgcccgtggttgatgtcatatgtagcctgtttgctagtcatggtcgaaagtactgtttgctgatttaagtatagtttataagacaagtgaacggaatggagctcaagaacaccaacgggtttcaacttcacctgggaagaatggattcgggctttcacctgcgctactcatgacctcgcaggagaaagtaaaatttgctctatgaagtgttcgtgatgcgtgttactgttacctcgcagtcgcaggagaaagtaaaacttttactcaaattattggatgtgcatcgttccgtgggcacagcacgagagagaatattatccatccatcggtgacaaagagaaaaactaggggctaccgtcgtccgtcggccgtatattatgttaccgactgatgatgccagccagccgatactatattta

SEQ ID NO: 4425 - DNA, 3890 bp, Sorghum bicolor
  misc_feature (1)..(19): n is a, c, g, or t
nnnnnnnnnnnnnnnnnnngaggtatgggatggtgaggatcttaagctctcctttcggaggcatgtttctgtggggcttatgggtttatgggaagagctaaaggttgctgtagagaatattatcttgagtaatgaggaggatcaaattttgtggtcctacaactccactgggaggtactcggtgcagtccttgtatgctattatcaaccacaggggtgtggttccagtgtttgttccagttgtttggaagcttaatattccacctagggtgcaattttttctctggctgctttctaataatagagtgctgacgagagacaatttagttaaaagaagggaagtcgaagactcgacctgcttgttttgtggggaaaatgaaacaattatgcatttattctttcagtgttgtgtggttaggaatgtctgggattttttatctctttggcttaacagatccatgggtaatgatttcatttatgttgcttctttgtggatctcaaataaaaagttcatggtgtgcaatatagtttcttcagcggtcttgtgggtgatctggaaatacgcaatgctctttgctttcagggtgtaccatggatgggatgaagatggtgtttgctatgttgggaaggatgctgagaaactggatgccaatgttcacaacggaggtctaggagagtgtggagcagatagtttgtctagtggaagccgaagcaagatcagcaccacagatcacgtggagagtggagttattagggttggctcaatcaactgctcagccttcggagggcttaggaagtgcgatatcctgtcagtgtaatagggtgcgtgagctagagtgtggttttcttccatagcctaaatgtttggctttttgtttggccatgtggccctgcccttgttggcacttaaactctgaacttgaactgcattactgttagctttatggcaataaagctggggaaaccttttcttaaaaaaatcactaacccctagtaatatgccatttaattaggaatgaaaaaaaactcccaatttattatgagaaaaaaaaatcactaagcctgttcgcttatgatagaaagtacagttgactaatttattatgagagaaaaccactactaagtggctcgcagattcagctaataagcttaagcgaacagggctagaccgttttcgtgacacgagtttgactcgatttgtagaaaatatatacaatatttatatcttcaaataaatttgttaaaaactagactcaaagatctttctaataatactaattatgcactatatgtattaatattttttaatatatatttagttaaagttatttaggccttgtttagttcgcaaaaaattttgggtttcgctactgtagcattttcggctttatttgataattattatttaattatagactaactaagcttaaaagattcgttttgcaaattataggtgaaccatgtaattagttatcttttttatctatatttaatgctttatgcatgtgttctaagatttgatgtgatgagaaatcttgaaaaattttgagaactaaacaaagctttattaggaaacgcaaacggcatttattttagaatggagggagtattggaagagactcctagtacttttagagtccttttggagggctccggccggctcgttgatataacatggttcgtgagatatattaaaactcaaaaaataatgtgagaaaaggagagaaaaatagacactctttttctttttttttctttttttgaaacatttactttcttctttttgatgaaaggggcagtcttttttcttttggccgtgcgatgcgcgcctatggaccgggcgcatgcagtgcggcgacgtggggtgggtgcctgcccttcgctgcgtcccaaagcgataaggggatgccggggctgaggttgctgctggcgcgcgtcgattccggtgggggcccaaatcttcccgccgtcgaacgccgcgccgccacgttggctcaagcctcgcttggtgccctgcccgccctggtcgggttcggctggccggggaccccctcgccggcggcgtcacatcggcacatcgccaccacaaaatcgggtcgccgtcgtgagtggcatgcaggcagacgccgtcgccatggcgtcccttaccaccgcgctcctcccccgtgccggcgtgcccctcctccgcgcgccatccgtgttccgcatcgccgcctcttcgtcgggctcggggagcaagaagaagagcaagaagcccaagagcggcagcaagggcaaggacaccaaggcgctggagcctccggcgcccgtagtccgccgcgcgccggcgggaagcgcgtccatcttccagcagcagcaggaggcagcgtccaagtccggaggcgccgatgggaaggggcccacggaggaggagctgcggcagcggcaggccaacgagaacgccttcctcctcgcctggctgggactcggcatcatcatccttgtcgagggcatcgcgctcgccgcctccggtaatatctgcagtcgcaatttggtctccaatttacaatgctgcactcactttgcttagggtgatgtgatggactgttggtgaattcagtttaaatgtcactatagttccccaaaagaggaactttagtgttgaactgtgtgagtacatatagctacatcaatagaggatgaggctttatttgtagcaatttttggtgaatcgatgaaaattgccatgatggtgaccctgtggtagcttttcagcccacatggcaaaagatttctgaccatcctataacttcctatggtaaatcagtaaatcacacacattcaaacatggaaacgaccctaacttttaaccgatactgcacctaacagaaatcacattatagtactaaagacacgagaaatcttcaaatggaagatgttggtgcagcaatcatcacaactctgtaattgccaggcgcgattcctgaatcctgaaccatgatgtgctgaagtaatcagtgatgtggaactgaatttttctgtagcatgatgcacaaaactaccaaagaaaatttttacctttggtcatctaaatgagagagaatgttgagcaccagaagcagtaataccattgtaagggacattttgctatgtaagggtaacctaactgctaagttgtgagtttgactcatccagtgaattatatgccaagcttttggtactgcagaactgttgagccaagtagtcatgttttgaacttgtatgtcatgcaggttttcttccagaggaatatgacagcttctttgtcaagtacctttatccatcgttcactccaacagttgttctatttttggctggtacggttggatatggtgtcctcaaatactttgaaagtgagaaaagcaaaagctagatgatagcatgaaggtgagactaaatatattcgtcttgtgaatatctgggatttacttctaattttgttcacagagtagtctatagtttatgatatgctatgcttccccagaaagtcaggattgaataatttcacgatagagctgctggtggataagtggatcttttattctagatatcacaatagaaatatagattgatgagtgaacctcttattccagcttcactataggttgttaagttgctctaaacagttttattccttgcatttgttttaataatgcataaagatgctattgtggtatctacaaattataaatcctgcaatgttgcagactaggtacaagaagaggcaaaagagagtaacaccgaatagtgaagtgcttcataattaggttctggatgatgcaccttcaatagctttttaaaggaaaaagtgggttcataatatcatcacaaagccttttttgcatgcatatttaatttttttctaaaagtttc

SEQ ID NO: 4426 - DNA, 7010 bp, Sorghum bicolor
ttccccaagctggatatccccatgagcattgcatgaactaaacagtgtctcccatgcatttatttgaaggtcggaagggattcttctggtaaaattataagcctgatgtacaaaacctgatcttcctaagaggtcaaccatgcacgaatagtgatcagatcttggaatcaagttccaatcttgctgcatacttctaaaatggtggcagccttcatatagataccctttgtgtgcacaagcagacaacacactcagaaacgttgcatgatctgggctaaacccatctttggtcatcctgtcaaagagtgtcagagcttcagcagctagaccatgataagcatatgtcgcaatcatggcattccatgtcactgtatcccgttgcacaatcaggtcaaaaacttgggaagcttcagtaattagcccacacttggagtacatggatatcaatgagctcatcaccaaagcatcgcgctcaaagccggttttaatcgtgcaaacgtgcaccattcttccacaccctagagcagcaagagaggaacagatagaaatagccacgctccaagtggcctggtcaggtctatatcctccttgggtcatttcggacagcaaatttagtgctccttcatctttgtaaccagagatcaatgtgttccatgatgcctcatctttctctggcatttttctaaaccaggcagtagcaccatccatgtctccttgttggacgtatccttgtaagattgtattccatgataccagatctctatcaggcatgtcagcaaacaatctcagtgcatcatccaacctctcactcaccacaaaaccactcatcattgtgttccaagcaaggacatcacgatcaggcatgtcctggaaaaccttccatgcagcatcgacatctccattctgtaaatacccacgcacaatggctgtccaagatacagtatccttttcaggcatctcatcaaacagtctctgtgcaacctgcatcatcccagcccgtgtgtagcctgtgatcatggcgttccaagaaacaaggtctggtgtctgcatccgaccaaacaggtcctctgcatccttcaggtaaccatgttcggcataaccggacagcaaagcattgcacactgaagtcgtcggtgaaggcgcacggtcaaagatctctctcgcttcacggacgcgcttcctcttcatatacccagagatcatcatgagccacgacacatcattcctcgccggcattacgtcgaacagatcccgcgccctgtcgaccatcccgttccacaagtagcccgagatcatcgcgttccatgagaccacgctccggtcaggcatccggtcgaacagctccctggcctctgccaccctcccacaccgcgcgtagcccgtcagcagcgcggcccacgagacggagttcctgaacggcatcgtgtcgaacaccccgcgcgcgtcggtgagcatcccgttcctgaccaggcccgagatcatgcagttccacgtgaacacgttccgctcgctcatttcgtcgaacacccgccgcgccgcccccaccctgccggcgcggaaatgcgccatgatggcacagttccatcggccgatgtcgcccgcgtgacgcggcggcggtggccgcggcgcgcgggtgtagaagcggtgaaggagaagtgaggcgcggcggggccagcggcgcagacgcggaaggttctggaaggttcctagcatgttcggaagccccatcacagtggaagcggccgggtagacgggaagcggttgtgctgttctgctctgttctccatcagatgcgagttgcaccgttcgatctgttattaaccgccgtgatcgagcgcccacgtggcaaaatggatccactccggtcgcggtcaaactgcagctggaaggagcccactccacggcgcagcgcagcagcttgtggttgcgggcatgcggtagctcggcgctcgcggccgcagatcggcgccggcgccggcgggtggaagcgacccagggccatgaagcacccgccgcagcgcgacggggagccgtccccgtcccctccgccgcagcggcggccgcgcgggttcgcttccacggcggggggttcgccgcggaggcgaggcgagcgggagcgggagcgggagaaagagcggacgaagctgcgggagcggcaccggcgcgccatcactagccgcatgctcgccgggctccggcagcacggcaacttcccgctccccgcccgcgccgacatgaacgacgtcctcgccgccctcgcccgcgccgccggctggactgtgcaacccgacggcaccaccttccgctcctccaaccaaccactcttgccgccgcctcctccccagctggtccgtgcaccttctctcaactcccaactctcctgcgctgcctctgttaattagtattactttaattttgtctagtaaaattacataccgcctgctaattttagcgctttactagtatatcctgcttataatccatgcattgctatcctaacagattgtaattggtgctacttgcagcatggagtgtttcaggttgcatctgtggaaaccccagctttgatcaatactctgagcagttatgtcattggaacaccattagattctcaggcatctgccctacaaacagatgacagtctgtcaccatcatcactggactcagttgtggcagaccgaagcataaagactgagaactatgggaattccagttcagtcagttctctcaactgtatggacaatgatcaggtgacctactacatcttatgttgaaataagcccattgtgctgatatactgtcacgaaatagttgtcattactgcaacctcctcctcgtgttgctcaagcaacaatttgtgcttgacgtatatcttgtgtgtctgtactctgtacatcaaatggaaacaatattttgttttgacactaaacgataagatgatacttcaattcatcctgctgataggactcaaggcctatcgttctttacaatgactcgggctttacgtgttccttctgtttgtgagctactgtcatggccatattagtgttcacattgttctagttccagctgcagtagtgttatagtcacatcatgcagcaatttctgtagcacctatccgctattagttactacactagactgacaatgtttctctgattgttgaatctgtagcagttaatgagatcagcagtattattccccggtgattacaccaaaactccatatataccagtttatgcttctctgcctgtaagttcccagcaaactccttagtccttgatttgatgtctgatgtgataatcaggtggtgtcaaattatttattttttgtctacaattttcaatatagaaaatgattgcatactgagtttgtattgtctggtcagagttctgaaattgttttactggatttgctagtggttgtgagcgcttattaaattgtatcagcatatcaccaatattagacatgctatattaagtttatgtgtttttaaaatttaaaataaatcttgagaactgaaaaggcaagggttgtttctgtcagtcatctgttctcaaaatttccatatatgtgacctattccaagcccttgtttttactgtttactgcagatgggcattattaatagtcactgccaattagttgacccagagagtgtacgtgctgaactaaggcatctgaagtctctgaacgtggatggtgttgttgttgactgttggtgggggattgtggaagcctggactcctcggaagtatgaatggtctggttacagggacctttttggtataattaaagagttcaagctcaaagttcaggttaggcatacctttctaaatctaccatgcattattagtactcattatgaagtttacttggaaacataagacgtcaaagtgtagttctggatacaagacatacattaaagatgattggttgtatcattgtatgcttgatgtcctaattcctatgaaggacatattctaacaaactatgcaaacataagggactttgattcttcgaacgtaataggaattatgacctccagtttctatccgtgaagtaaaagaactaaatttctgagtttatatgattattttctattaaaagcattgcgtgatattgtaaaatatttagtatccttttttaaaaagcttggtaaactttcttgtttctccttttcaccacacctgcttacattggctaattactgttttttggcaaacatctattaaggttgtattgtcatttcatgggtctggagagattggatctggtgatgtgttaatctctctcccaaagtggatcatggaaattgcaaaagagaaccaggatatattttttacagatcgcgaaggtagaagaaacacagaatgcctttcttgggggattgacaaagaacgagtccttcgtgggagaactggcatcgaggtattgggtcatccttggtaaattttcttctctcttcatctttttacaagaaataggagcaccattctccttacattactttggttagttcatcatttttcccatctttctgcactgtagcaatttaatttattgcaattgcaaaaccattttccttgtatcaaaatacttatgtacagtattaccttctaggttctacctaggtttgtttcagtgccatactataaatgaagaaaaaactagtacaccgaggcttaatgagatcatctgcaggtctattttgatttcatgaggagtttccatatggaattcagaaacttatctgaagagggtcttgtttcttctatcgaaattggattaggtgcttctggggagctaagatatccttcatgtccagacacaatgggctggaaatatcctggtattggtgagtttcaggtatttacttgtgcttaaataccaagttgaaatttgcaagggatttcttttgggaataatcttctaaatccatcttttcccctttagaaattcttacgttctggacataaacaaaccttgtttgcatccagtatttgtgtcataataattcttaaataacaacatggattttggtgcatcaacatgtcaagcatagggcatttaagctgctgtccttttacaagggacttaaagttcttgcattaggataaagaagcatgtcccacaaggaatcccttacaacatgtaatagaaactacatttcaaaaaggtttttaacacagcaacatatttgatcgctatgcatcgccatgtctctgtgtgtgacttggattactactcagattcaaagagtacatatatggtgtatgatagtgtaatgcatatggtatatattggctgcatttcctttgttgatttccatcgttgacagtgttatgacaggtacatgcaaaagcatttacggcaatcagcactgtcccggggtcatttgttttgggcacgtggacctgataatgctggctattataattcaagaccacatgaaactggctttttttgtgatggaggcgattatgacagctactatggacgttttttccttaactggtattctggagtcctaatggatcatgtggatcacgtgctgtcgcttgctagtcttgcatttgatggagcagaaatagttgtgaaggtgtgtaatgctggtctgtatacttattgtttagcatctgaagcattgttcttaacttctcaagaatcatgtcccctatggttgagtgccccttaaggtttagaagtatccttcatatttcctgtctgaaatgtctgttagttcatgaacccagcaaacggcacaaaaagagcattccttcttagcataaactttctagtttattctgtattgaaccacaccgctgtgtctaaagcagctgaaggttgtgcattgcattgcaaatttttaataggtgaatcaattcaagtcaaacttggttgagaaatattacctcaggcctggatctcaggatttaggttataagtcacaatacgataatgtagtactcggtagtcaacttgagtcagatcattttccatacaagtttgcaagtactatatcaagaagctaattagaatgctatgcatagattaaaggaaagtgttacacagaactggttctcgggctgaaaagaagccaaaagcttgtttgtctttgtgaaaatgttattatgcattagcctgctgctttgccttttcacagcataaacttacagggtataatttactgccctgataaatccagcagttgttgcacacattttgcgacttctttttacctatttggctgttccataacaatgcaaacctctttcatcaggttccatctatctattggtggtacagaactgcaagccatgctgcagagcttacagcgggattctacaatcctacaaatagagatggatactctccagttttcagaatgctcaagaagcattctgtaattcttaagctcgtttgttatggtcctgagtttacaattcaagagaatgatgaagcatttgcggatccagaaggtttaacctggcaggtggagatgttctaaatttctttgttggcatacagtaattttgatgccgcatactccattcaagagatgttattctgtaattttgatgccgcatactccataaatttcttgggctaattttcagtacacataaaaactgcacaggtaatgaatgcagcatgggatcatggactatctctatgtgtagagagtgctcttccatgtcataatggtgaaatgtattctcaaatcctggacacagcaaagcctagaaatgaccctgatcgtcaccatgctgcgttctttgcgtaccgtcaacaacctccgttccttttgcagagagaagtttgcttttcggagctctgtaccttcgtaaagtgtatgcacggttagtatcagacccgtcacttcctcatattatagtagtttcattaacatatgttctcatctacatatgtattactattaattaatggccactttctgtttaagatttatgcaaatactacttactgctgagttgtagtaatgtagag

SEQ ID NO: 4427 - DNA, 5483 bp, Sorghum bicolor
gattgcattcgactatccaataggtggttgaattgttgttttacccccccaaagaaaaaaaaacaattttttctactgtttcctagctaaaatacttattaattggtgggagagcattttagttaattgactactaattacatgctaggtttgcacaaataatgagataattgttagctaggtgcccagctaacagttgtttgaactgttacctgggcctgtttggattcaccctatctcatggagtaactattagcttgtcggatccaaacaagacctaagtcgaactcatggtgttcttttctcccctctcttgttcagcattattgtacaccttatcttatttttccacagatctactaatgtaatccattctgttatctgatactgttgcttgcctgctgatcatatacaggcgactgcgcaggactctctcggttctttcagagaaacagccttcctgcccccagttctacctgtacagttcagctgatcgagtcataccagcagagtgtgtggagagcttcatggactcgcagagaagcctagggcgcagcgtattcgcccacaactttgtctcgtcgccccacgtagaccactaccggagcttcccccacgtgtactccgccaagatcgacgagttcctcaagatctgctccacgatcaaagtatcatgaccaaccttcgatccgactaacaagcagccctgtcgagcagctatctgaattgatttggtttggtgtgttctcagagcatagccgcagctacaacaccctgatgagagttacctgctgttaattcgtcgaacaccttggttctactccgcttaagtcctggaggttccaccggatgcacgcattgaaaggaatagatgttgagccagaatttctgcgcacccatttttgttcatccttgttctgagaatggataggtatttggtttcccctctgaatctgatggtaggctcccaaagatgaaattgtaccctaattctttttgaacgcgagctgtacaatattcggacgcctaaagttgcttgctacggagtcccatagcgtcactctgaactctgaagttgtattaaggcaacgtgtgcttatgttcccatcattataccgtggcttcaccttcgtgggatgcaatgcaatcatgtggtggagcatcaccttcgtgcaagcttcagtccaatatgctctcataataaatcagctaacagtactcgggtttcatctctagtcgctgccaggacctcataataaatcagctaacagtactcgggttccatctctagtctctgccaggaccgggcgcgtttggacggcgttcaacggccgccgcagatcaccgagccgcacttgccaaacaccttcgccacacatggccaaagcgagttcattttcggcgtccaaccaagccaactgtttggcggccaaaacgtccggcgcgaacacggcgattgcggcggcaagcacacacacattctttggcctggagcagcagcaccacctaacagcctaccgctaggctcttggcgtcgcctgacggcgagcggcgaggtggaggccagcctacagtcgattccgtcctgggttttttttttttaatcaccaacaacgagtcggtttcaccgtgactgacgactcgatttcaccgtgagtttggcagtcactcatcacgtagtcgatttcactgacaaggccggtgtctaagtcgatttcgccgtggctttggcaaagtcatcacgagtcgatttcaccgtggctttgttaccgacgacgagtagaaccgggtaccttatgttaccggcgacgagtccgaaaccggacccatctatcagtgtcaaagtcaaacaggactagcagaggagagcctcaaaaccagagggcacccgcgacgccaacgccactgaccaacccctgaccaacgagccaaaacttgtttgttcggtcggcgcacgcgctgccgctgccgctgccgctgccgagagacgcgcgcacaccatggccatggaggagggatcaggagcagtagagaacggaccgatcgtgggcacggtggctgacgcctctgccgccgccgccgccgccatcggcggcgacggcaaagggaaggaggaggccgaggggagacggccggctccggccgcctacgctgccgtcgtgatcgggggcaccttcgaccggctgcaccagggccaccatctcttcttgaaggtacggtacgggcaacaaagaccctactctcgccctctgcttcttcttccttctctcttctgctcctcccgttactttcaccgcccaatcccgtccggctccggccagtacctgaaaccatgcacaagacatggatggatggatgctgcgtctgttcttgagctctttggaatcgaatcttgtgtgatcttgctctcacccttggtgatggtatcgtcctttctgtgccttcgtagcgttaaaacttcagttgatccttccttgggctcctgcttgttcttgctggtagttgagcctacatggaagaacacaacttctttttgtttgtttattactagtttatagtaaattaacaacgatgattttcttctcttccgaatccaaaaacatgtaaagaaataatgtattgacttttccaaaaacatataaaagaaatgatcgatgctgtgacaggcagcagcggagctggcgagggagaggattgtgatcggcgtctgcgacggacctatgctcgccaagaaacaggtcagctttcgcgtcattggccgatgcatatatcatcagtcactagtaaacaataaatctcgcttctacgctaataaaccctgaccatagtgttcagctgatgccacagcaacatcagctttttaaattttgagatgtgagacgtctcaactcctaccagctgcatgcctcaaatgatcccaaaaacatgcccagtcagttccaaattgcaaggcgtttgaagtttcaatcagaacggacggagtagtacatcgtttctagtttcaaactagagaactttatttgggtatcccattccaaagattatagagagggcaaaagtgttactaactatagcacaccagccaacgagcacaatgggaccaatatgatgaggcatggtggtctgacaaagtgacaagtaatctagtgcaatcagagaccgagagacaccacaggaataggtcgatatcaagcactaaaaccatgtcattatcaaatataatggccggatttagtatttcaggtgggaagttctactgattcgatatgcaagttcattgaacttggacaggtgccaaattggatgcctacctctcacaagtttggtagaggactagagtctggaggttgggtggttaaccaataaccactggctgaattcaacggcatattcccttcgaagtttgcatgtgagctgcatgtgtgatctgtggtcatgccatgcggctgaagaatctaggcttttagtattatgagcttagaaatttgatggcatctttcgctttggctgccttcttttcttgcagtatgcctacctgatacaaccaatcgagaagcggatgcaaaatgtcaaggattatattaaggtatcccccctgatccagtaaacatttcttatgcttggatgcagcttcatgtattgaaaatcaagcaatttagtgttagtgtatcacatgtagattttattttttttttttgaaacgggtgggaatttttattttatcccgccagtttctgtatttcggaagaaacaaactgaaaacagggagtaacttgaattagtgggatagaaaataggtgagggtttcctgcctgtttttaggtggtgagaaaaaaaaaacaaaccagtgttcattccattgtcaattccctatgagatggagaggtactacgtgagggcccaagtccaacgacactacccgctgggccaagaggccctgctctgctgcagtgctgctggcccagctttaaagtttagttctggttatactagataccaaataagattaaacatggactgatcacggacgagctaataggggctaattggtggaagaaaaaaatagcccatgatttgtccaggtttagaaaaaatatggacacggaaatggttgagttgctccctgcttccatccctatttacgagactacatttttttttgttggattggatatccatgcacataggtgcctttaagctatagcacaatggttgagtatgatgcagctgtgttcaacttaaattgccatgataatagaaacaaggttcgtgcacaaaatcatcttagccactcttttccatttgcagtccataaagcctgaccttgatgttcatgtggagccgatcgtggacccttacggcccttccatcgttgacgaaggtcttgaggccataattgtcaggtttggatgttttctgatacaatatttgttcaacagcactactattgacaacatttaagctgatgatgattgtacgcaaatcttgagcagcaaggagacattgccaggaggacacgctgtcaacaggaagagagcagagagagggctcactcagttacaggtttggttacagtgatttttaattgttatgagaaatctcacacattatcagactccagaccctctcatggtttaaaatcttgcagatcgaggtggtagagctggtaccagagaaatcgactggaaataagataagctccacagcattcagaaagatggaagcagagagggaactgcagcaacaagaaaccgcaataggcagtcacagcattcagaaaattgaaagcagcgagggaattgcagcaacagaataagcaaagagacatcaagcggcggcagtcacatggagcagaatgatgagctacggttttgcaacagtactcttgtttattcatgtgaaacttgaggtacaaaagccaaaaatgttctgttctacttaacatataaaaggcacgacgctctgctccatcatgtaatgctcaatacagaaaagttacagttcttttacataatctgaccaaggataatctaccattgagaaactaagaaacccccagcacagctgaagtgttatactgagactccaagagaggccatcaagcaatacaccaccagtctttgcagctttcaccatcccacgctcatgattaggcttgtaagaaaacggcagggcatgatgtggaccgtggaatcaagaatcacacttcttcaaattgttgaaacttatacaaaacagaattgttcttgagacttatctattgaatattaatcaaaaataagcatgagctcagacttcaaaatcaggttcacaccataactgtaattcaaaacagaatatgacaacagacccattgcatattggtgatgcagtagaaacagttggcaaattctgaatgatgtttgacaaacatagcaaaagacagcatttagtaacaatagaaccagcaagaaaaagatttaatcaactattcaatgaaacag

SEQ ID NO: 4428 - DNA, 2593 bp, Sorghum bicolor
acatgctcagaagatgacactgtaacatccaagatgatgatctatgcgtcatttgttctcatggtttactagaagacctggaacacttattcttctcctgcacctttgctagaagatgctggcaagccatgaacgtacagtgggatgaacagcttggcttactccctggtctggcacaagcaagagctaattcaggcctgccgttcttcatcgagatggtaatgatagcttcatgggaaatctggaaggtgaggaataaaaagatcttccacggcaagaaccccagttctagtatttgacttgcaaattttcaaaaatcaatgtaatcttcagtctcttagatttaaaggagagacccgtggtcttccttttgtgcgtggctagatgcattcagtaaatccccttttgttaatattttataaaagtttgagccaccgtgaggatcttccctacagtcttttcagtcaaaaaaactcaaaacagggtcgttccaaaaaaaaaaaagggtcagtatatgaacgtttgttggccggcacacttcaccaaatactaactctataagatttctgaatactagtaatttaggtaacaattaaattccttaaacttggtggtggagttttttttaaaaaaaaatgaataataacatggtagtatcttttagacaatggaacaaaattcccgcttctacacagcgtaataacaacagggtagaaggtagagagttgattaaaaaaaacgttcttattaattgttaaataataccaaattgattaacaatcttattaatcgataaattgattgatttgcactacccaacaagaccttaaatttctcatcaatggccatccctctcgttgagagttatagataccggcacactgcacacctcatcatatcctctcatcaaagataagcattgcaggacccaaaaaaaacaacaaaagtagatatacttcccgatcaaaacacagtgaagtgaaaacacagtagttttttcgtttgtatttgacaaatattgtccaatcatggagtaactagtctcaaaagattcgtctcgtcaatttcgaccaaactgtgtaattagtttttatttttatctatatttaatacttcatgcatgtgtctaaagattcgatgtgacggaaaatctgaaaaattttgcaaaattttttggaactaaacaaggcgtgaaagtgtagaaagatcgaaaaccaaaactgcacgccgctagtccccggtggccgtccgtcagcctctcgtgtgctgctgtgctgcaataatgcgaccttgttagatccaaatttttttgattttgacaatatagcacttttatttttatttgacaaacgtttttatttgacaaacattgttcaattataaagtaattaggtttaaaagattcgtctcgcgatttatagataagttgtgtaattagtttttattttcatttatatttaatgcttcatgcaagtgtcgcaagatttgatctgacagaaaattttaaaaaaatttagtttttgggtgaactaaacaaggcctcggtggtgctactgctgtacgtgcatgaagaacacgccgccgtcgatctcggctgccacagcatcgttgcctcgccgccggccgacgcgcgttgcttgcatccattccatgtcaaatttgctcttggtccactattggtttgcgacctgacctggtgccacaacttgacaatgctccagtctcctctttctccaacgccagcggctactggaaactaggccaattaattatgggatccactgagtaaaggcccagtaatgggacttgggccgtgaccttacacgttgggatggtcaattacgggcccaaactgctcaataaaccaaacacgcaagcaagagcaatgcatttgcgctgcgctaagccatgcttaatcttcaatttagtcccacctcgacagctttgagcgagttgaggcacaagaagggtagaaaatgagacccacggcaatgatgcaactcatacctttctcggccttttggctaagatcaagtgtagtatctgttcttatcagtttaatatctgatatgtggaccatgtgttcactttgatgttaaattaattttttgtggggggaggaaccaccgcaatggcttgccattgggtctctcaagcgttgcctagccgttgcactgctggttaggcttggcgcaccccagccaaatcataatgaaaatttatttgtccaagaaatgtataagaacatcccaaaaaaatttgatttttagagccattctaagaatcaaaacatctatgatggcatcaatatatttgcatcaccttgtagtattgatttgtgttatataaatattgatgctattttatgaagtcggtttaattaaaattagcttggtctaggacaacattagaaattgatttagtttagcacggatggattacattttttatggatggccttcgttcgtggatcctcaccaataaaacagatttgttattttttacaactattttttttacaacaaaaaattcctatttgtagacctgtgacatgaaaccgaaaggctaaggtttagatgggctttgtaccaat

SEQ ID NO: 4429 - DNA, 7321 bp, Sorghum bicolor
atatatgagcaataactagttttgagcgatactttttggagaaagcacttgacgccaaatagatgagagcagaagagtggccttctggctgcttagtcttaacacagtcatttcatgaagtatacataactttgataaaaggatgtgaatagcagaaaaactttatccaatcattactagcctgtaaatttctgagcacaagtttcaacatgttggatttttttttcctttggaggggagcgaacaagttgctcatggcagaacataccgtttcgtttatttccgaggcactgaagaaaatctgaggctttgtctcaagctttgcaagcctcgcaagtcattggcattagcagtttcatcatcaatgcaaaattctattcatgcttccatcatgtaaatattctctaaaggagcttttattccttctcagcttatcaaacaaagcagctgaagatgagaagacagatacagccctcgagagtgttctctggtggtgtgcaccaacacgtgtttcatgatcagggtgaaccatcgctaacagcaattgatgaaaaagtgcttctggaaatacctgataaatattacacaggataaacagttgaaaaatcactaagaattactgctaaaatgaattcaaagtctgtgctccaacaacataccttgttctgatatgacaaattcggtattgaagcaagagctgtgtgataaacagctgaggtagttgctatagcaacaagaggagtacatgatatgtactcgagcatcacagacatcatgtcaagaactggtccagcatcacctacttgatcaacaacaccaactaagttatgatctcatatagtactatgcaaaccaagctaagaagtaagaagcataatactggcatcaaattagcaagggaagaaaaggcaaagagcagcaagtacaaattactggtaaagtttcaattggagggaaattgaccttctttgacagctggattatgcattcatcaaaagccttgcggagtttgtcattccactttaccgcctccaaatctttgctgccgagagctaaatgcagtgtctttttcatatgcctcacaagatcactttatactagcaaccatggttgctgctgaagcctgagctcttgattgttctgcaagagcagctatcacttccacaatgctgagttgcatctaggttgttccagtatggccttgtgttcaaggtgctttactagtactgatgtcatcaaattaatatttgtccctgcaaaagccagttgtagctaaataagtaaagtagtcatgttaatgacaaaggtttacttaatgcgaattgggcacctgagttttccatgaacatttgcatgtccaatagaacacaaagggcaagaccattcttggatgaccatgaatcagcattatcgaagtggtgaaatagggactccataactcggcggaatgtggtcgcctccctggacagcttggccatgttatgcacacagactcttgaccaaaaataagatccttggcatagtccctacaagacaggagtcagttaagaactaaaaaacaagaggaaatgacaaacttaagttcaaagaatgttatattactatgattttttatttcatgattttttgttatttagtatgattttttaaagattccgccgaaataattaaaaaagaaaaatacaaaatcatcttaactatagcaaaacctccatctactgtagcaaaaccgccttcgaaacttctccaaagatataaaatgcacagttaaaaaaatttaatagaggtggtttgcccggttttgacgttgaaagagaaaaaacgaactttcgtaaaagttgggaggaaaagtagactttttttttttttgttttgcattacattaacccatccgggcccgaagactaatgcattcctcctcctgggccgcacgtcgcgggccttgaagttaaagcccgtatccatgtggagcaggcattttccttcctagagatccgtctctgcttccggcccattgacgtttccgcctgcgccgcccttctcctccgcgcgacctcctcttccttctctgcggcgggcggcggcgagggagctgcatctgccgtcgcctgtaggagtgggaaaccgatccgttctctccctctgttccacggatccaccctcgcgaacccctgcagttccaggcaggctgtagcgagcgccgcagccgcccgtgacctctccccaaagcacccggttgcagccgagcagctagtagcatgggggaggaagacgatgatcctgactggctccgcgcgtttcaggtaccatcaggcttcatctccctcctctaccccatctccatttgaggccaaggctctggctaaatcgtggcatctgccggggtaagctagttttcttattcctcttggagcaaatcttctcttccggatgcaggatgcgacctcttgccttggatttccaccccacttgtacaatcctgctcctcgtgaaactctagcgaaatacagtaggtcagcccgcactaactaaaccccggtgagtgacagactgacagtctagttaatctgtgtcgtctaatttaaaactcgcaagtaaatgaaacggagacaaacgatgtcgtactagcagttgatctgtgtctttgtgccaatgagctcattctgtgccataaattggttaatgccctactcaagaaagttcctgctctttctgaccccgtaggtttgagctctttctgttcgttcacttgtgtataaccaagattgtagctactagctatgcttatgctttttgtgaaacagtggtcgtccaccttgataccaccaagtaatgttaataatggtactagcatctaaagttttaagttggtgccagtgactgacagagctagcaccttgttcttgcagtacttattggctactattacttttgtctttacacaatcagcttctgccttagctttccagattttttttctttccaaaatcaatactttagataagtctattatgtagcagttactaccacatggattcaaacattttttttttctggggggcataggcaccaagtgtggcaccagtgatgctttcttctgggtcagatggctctcgtgaagctagtcctacaagaaccagtgcatctagagaacaagaaaaaggagaaaagcaggctagtccggatcatgcaggtgatagaggtggtgcttcacaaaataaaagcaaaatctctgcagctactagaagaaaaaccattggcagtaaaaaaggtagaactaacgtacctgtatattttagtactataaagattctgaggcacgactccttaagattttaatccatatttgtcacatggttgcttattgattcttttggcaaatatgcagagggatcaaccatggataaaaagcaagctaatactcctagacgctcggtatggatttgagtgttgttttagattcgctgtctccaattcatgatatcttagtaactagactggtattgtattgttgcttcatgcattaaaaaggataatatagcactactgtagtgcaggtatcatttgtacagattatctgtacctgtttgtggtgacaacatttttgggacctttttctttgtaatattcgatttctattgtgatattagtgaccatacattgcaactgttatgttttattttaatttcactctggcaagtagttataatctggtcctatattttgtagttaattttggcacataatatattttgtagactccaaagaaggatacggtaacactttcatctgattctgatgcttccctcggaaacagcccttcaagggctggtgaagataatcatgaagaggactcacttagcgctgcaaagagaaaggatgctcagcaaacaaagactaaaaaagcaacggttgctggaacaaaagctggtccagaacaagcaggtagtaaggcactttaatatgacttccatttcagttgatccttgataacttatcactcagatttggaatgacatgtgatactatttcatggttcaacatcaagacggagatgctgaggatgatatgcaagataaactcacagggaactctgtatgatgtcagctcacccatctcttcactttatcagctccttcaaatttggatgtgaagctctagcttttttttctctcgaaggaacaagctctagatattttcaattatatatttgcagctctctgattgagtgtatgttcctctaaatgccaggtctcccagaggttaccattaatatttcctgataaagttcaacgatcaaaggtatcctcaactctaagaggcactgtttatgtggagatcactctctcattaaaatttctatgtttgcaacaaaatgttatcaacatgcctgttatctcccccttatcatatttatattcttattctcggaagaaatgtcttcatagcatagctgtgtaaggaatatgttaataatatgttgaagtacaatcaggagacatgacatgacatagatacttgttattatgtatgtccacttgtagagaacaatgagttaacaattgaagtatggactaaaacacaatagccacaccctttttttccctcttgacaacgcatgatggcatgagagctgcatttcatttccttaattgatagaggaaaacaataaacttacaactgttaacccaatctgaaatctgaaaagaaaaaaaaagttaacgtctcacacagaaatttaaaagacgaccagaacaacacaatggaaagaatgccggaccctacttaactaacaactccagatctccagagctttggcagtgcaccaaagagccatatacttgtgtatgtaattcctgaaatgtttatctgtatctgtgttaaatgggactgtgaacaactagacttctggtgaataacttgatgaatctatcattccctgttatcccataacatatacctgcaaaattctgactgcatatccgaaattttgtttttattaatatttcccaagttataatccttattctgtttgtttgttttgtttctaggcattgattgaatgtgatggtgattcgatagatttgagtggagatattggtgcggttgggaggatagtagtttcaaatggtcctactggaaatcaggatttgttgttggacctgaaaggtaccatcaagtaataatttatcattttctgtacttcattggatactgaattgtaatgatgtaatctgtcaaaggatatccaatgccagatatcagtacggaagctttgcttaagcattagaaaccagccctgttctgtcttaaatcttgatatgtgcaatattccaagacttgagcatcttatttcttctctccaactcatacaggaacaatatacaaaacaactatagttccatccaggacattttgtgttgtaagttatgttccaaacccaagtacgtttattgttttgtgttggtgtttaatcctcgatttatttcctttcaggtgagtgtgggacaatcagaagcaaaggtttataaactaaattttgcatgcatatttgagctatccatcatgtcaatttacacatgtcataattttgagcatttagtgtgccattctgctggttaatttggtcgtgttcaatttctcaacaccacttccattccaaggcagctgctattcaccataatccacccactgttttttcctgtgcagatagaggctattatgaatgacttcattcaactggaaccgcagtccaatttatttgaagcagagactatgatggaaggtgcatacttccaacagttaatgcagctcgcagactaatatgaattcatttttccccagagcagttttagtgtataaaactggcatgcatactgtaaacttgtcaatagtagcatgctcctatcgttgtttgattgagttgtcttgttgcatgtgcatttgtagctgtagcttcagtcttttagtgtgcactatgaggaacaaccagacttttcatgaagctatgccccattatttatacaatgatagcctgcgctacaattttcattctctaatattaaagatctatcatctgtttaggtacccttgatggattcacatttgattcagacgaggagggtgacaaactctatgaaccacaggctagtcaaaatgatcagaacaatgaagatgaaggtcaacctaaggcgaagaccaaaaggaaagcagagaaaacagcggtgtgttttcttgactctaataactaacctgcaactatggatagttagaatcttgatagttgttatgtacagaagtttccaattggtggtgctgcagatttgcagtgattgcaaattctgtattggatgtgtttattgggaatttgcatgagccgtttgcagtagcactgttcttatttttgtatgcttccttgctgttgccatgttcgatgaagtaatcatttcacagaaccataacaaaaaaatgttgtaaaacatgctaccaaaagttggtaaatttggcaaagatagctgacaatccagattcagcttggtgtacacctgaagccttccatgcttgctgctacccgttagtctgttgctattctctcatagtagcccttacaaatcacaaattgatcttatgtaactacggaaaccttatttacttcaaataatgcttgtctcaacatcatagtgcacctgatgggaatctaatccgattcctgtgacatgcaggggaaggcaccaaagaaggcaaaggttgctggaaagggccctaaaaagggcgtaaggaaaacccaacctgcaaagagaggtaggaaggcgaagaaatgatgacatgttgattacctcggaaggggaaaaaaggaggcaattgggaacctgagatagtttgcaacaaagatgagaattcttcaacggatagccattgctgtgaggccacatgtggtctggcgtcgtcagttaacatcatgcagtagttgttttagagagagagagagagatcatacattattgttgtgttgtgtactctaggagctttcagatttggatcatgtccacattgagtttgtaaacttgtttctgagaaggtgtggtctgtagcctgtactgttcaactaatctgaattctagttttgtaaaatctcctgccaggtctgtagtctgtactgttcaactaatatcctgttcgtttaagcttatcatccgaatctaacaggtatgatccggagtcatttcactgtactacatttgtgccgaattcaaatctcatttcaccatgaaaggaaaagaaatgtctttgttataaaaaaataaattctcttaggccttat

SEQ ID NO: 4430 - DNA, 5221 bp, Sorghum bicolor
agtttttttttgtattttaagatggagggcccatttgtcagtttcgttgcattccttgttgtttgctgtccttgtcagtttaggatggagcagccgtcagcccgtcaccagcaggatccagtcgcctcgccagcttcactcaccatcctacacgccccccactactcttcctcctccaacctcccttcccctctccctccctccatcgcctagcggtggcagcgactgctcccccacccgcacgcacgcccgccgtgagcataaagccggcgcgcgcccacacgccattgtcatttccatcgtttccctttccaaattcaacgccgcggcagggagctggcacggtcacctccctgacccgttgagccgtcaattctgttccgccgccccgcgatttcttcagctgccgatcgagtggccggggaggcgcattgcctccgcttccaccgggagggcctcgcctgaccggcgctcccggcgccgccttggctcccatgacgtgcgcgcgcgccgaggacgccatctcgcccgccgccgccgccgccgccgccgccgccgccgcgggcgacgacgacgatgtggcggctgccccagtgtgagtgggactccccttcgtctgatgcgtttcttgtcttcttcgtcttgctgaatctttcttggactgtgcgaatgccatgcttctgcgtgggttccagttccaggggcggcttgatccagaaggtggctgccggcggcggcgggcggagatcggccggctcggcgcgctcactgcagcgctcggcacatctggcgaccggggacggcgatgctccggcgccggcgccggaggccagttgctccggggtaagctctcggttgacttgcttcttcctccaattagcgcggcgttcaccccgcacaaaattcacaaattttgtctggattcggtacgacattgttgagaaaaagttataagttaaattttctcggtggacaaaagcgagagtttaacggcaagcgtagcaaagttggtgtcctttcgcgagtgcgtgccgtggtgcggagggcactgtcggtttcggccgtactgtgtgctccccgcacttcattggggggacctgaatgctggatgaactgtcccttacctcccttgtccctacttcccattgattaccagtctgttcagtcaaccaacaatcttgttgctattggttcttcgatttggtttcttcccagcgaattaatgtggcagtgattggttttttggtttattcctttgtaggatgggataggtaagagcaatggtggtgggaagagggaagatagccacaggatgcggcagtacaggtcccagctcgagcaggaggtgggtgatcctcttgaaccctgtgatttggtttctagctataatgtaatggtgtcaactgatgtgattcactaacactgccaaaattgtgcaggtcaagaaattgcagaggcagcttgaagaagagatcgatctgcatgtggcgttggcggatgctgttacacaaagtgctgtgcctatattgaagtcttctaagaagcttccacacaaggtgtgagtttgcttaagtctgacggttaaatttcacatgtttccttgtgcttattcgatgtcatgtcctagacagttaacgcatccagtaacccagcaccttcaaccttttgttctgcaggcacaggagctactgattaacatcgcctccttggagactaccgtttcaaagcttgaaaaggagctaaatgatctgtactaccagctttgtcaagaaaggaatgaacggttacttgctgaaaataatcagggatgcttgccgtctacatcctcagatgagcaccaatcaatgtcaacttgcacgtgtacgtgggaagaagtaagtatcatctgagtaaatttttctttactttctttctgctgtgggaatcactgacagtttcttgattatcaatcttagcacatatcatcattgagagatttgaagtttggggggtatgaatcaatgaggtcaacgagacaggacttattccctgagcttgaagatgaccaggatgttggagaagatcctgaaggtcaacagatggtttctttaaacaggctgctagaaaagcaccgagattcttctttgaataaacttcttgaaaagcaccgggatgaagaggtccctttcatgcctaccttacctctatagttttaagaaccaactttggaacatattagagtgtcaataattatttatctttcagcagatgcaagaatcatgctctgtggaaaatgaacgcaatgaagatgagcagcttgacgccttatcctttgaacagtccattctaaagatagctagcatgaaaggagggaatctttggagcaacccaaatgagctctccgaggagatggttcgttgcatgagaaacattttcctgcgcttgtctgaatccttgaagatattgccgaaggcatcttctgattgttcatcttcctcagcggagcgtctatcaggctccacatcagcatccttctcagattcatccataatgccctcaatgctacggagtccttcagttgattctaaccacaacaatgagacaatgaatgaagtcaggaactttgatccatataaagttaatggaaaggaaactcgaagagatattggaaactatcgttcagcagctgaagtatcttggatgtctgttggaaaggatcaacttgaatatgcatctgaagctctgaagaagttcaggtttgttgctgcaaccttggctaaacctatgatgagtcctcatagatatatcacatgtttacaaactttacaaatgttagtgcatatgtacataattgttagatatgatttagacttcttaattttgtttaatcttgtaaatgctctaaaagaataagcagacaattgaaccagtctaggaatttggacttgggaaccaaaagatgctctattcttgttcacttgcagtaaggaaataagtttcaaatttggtttggagtacgtttatttttctttcttttgagcccttaaagaattcctgtcagcatggaatttgctagtattttgaatgcactggggaacatacttttctgtctccatttcggcacacttcttgtggcttatgttacatttctgatcctggatcttaagaactcccgatgaaagttaacatatgttagttggtgtttggatgaggaggccactcttggaattgagacattttgatccaaaccctccctattcaaacaggaagttatgaattagtgaatcccctaaatctcacaacaaacatattcttaccccacttttttccaaatttacatggtgcagatgttgctgccccacatttatctcgttattttgaatgtaggtgatatacttatatttaagcacatctttttttgctctatgttttgcagatttcttgtggaacagttgtcaaaggttaatcctagctgtatgaatcgtgatcagcggctagccttttggattaacttatacaatgctttgataatgcatgtacgtatgacatggttgcttaaaatgctggctttgcagatgagaacaaggattaaatttctgtttataattggaaataggaacttgtttcttcattgcatcagtcctcatttcctttcattaagtgtcgtgcactcaccagttgcttacagttgcattttttttgtcggcatctattaggcgtatttggcatatggagtacctcgaaatgacatcaagcttttttctctaatgcaaaaggtttgagcagtatatcttcttctgttagtctaatctcatacatcggactgttaaccgtgtgaaatgtgcaggcttgttacacagttggtggccagtccttcagtgcagcggaaatagagtttgtgattctaaagatgaagactccagtgcatcggccccaacttgtataacttgtttctatatcctagacgtcaccttttggttttattgtcttttcacttattttgcttttgctttctttcagtctttgatgttggctctgaataagttcaagattactgaggatcacaagaagtactcaatcgatgaatttgaaccccttttgttgtttggacttagctgtggaatgttctcttctcctgctgtaagtatgcctgctaatcttactcctgttaagatgtgcatgtgcttcagcaaattcgtcactttaataagttgctggccaaactagagccacgcttgtccttcagtgtgctatccttgtcctcgccaagacctggcatccttcagagttctttgtccaatttatcgtatgattataagattgctaaaactaagttatctatatccacgttcctgggtcctgttgtggtacaggtacgtattttctccgccgcaaatgtcagacaggagctccaggaatctttgagagactatattcaagcgactgttggtacaaatgacaaagggaaactgctgatcccaaagttagtgcagagctacgccaagggagctgttgaagactctctgcttgcagactggatctgccaccaccttgctcctgatcaagctgcagtcatccgagattcttcttcacagaggaagcagcggcttcttggatttcgaggtttcactgttctcgcgtttgactcaaagtttcggtacctcttcttgcctgacagcagtggctcccagaagctagaggcaaaacaatcttacaaacttcctgagccgtgttcaaaatagataataaaagctcagtttggtatatttgagccataataccattcttttgcgtagcgtgacatgggattggcggttgtatatgatgtaaattttgaagaaggaaagtatatcattcaacaaagctcagagaaagcttgaattgccgtgtttgcaaaatcggatcctctctgcagagttggtgacgggttgtattgtttttttaggtattcacttgtctttcatactgaagataaaatccttttgttgtttcttcttttttccatactttttcctctctctcttttttctgtaaagctctttggtcaattgatctgtaacttctacacaaataaaggcggtgagcagtctttactttggtatctctgtgcaattgatctgtaactttctgtttacttatatgatacgttttcattgcaaatcttcactctggtttctctgcttgaatggggtgagcagtctgcacatagcggctgctggtggttactactcgtactgatgtc

SEQ ID NO: 4431 - DNA, 10152 bp, Sorghum bicolor
agcagccacccttgtccttcacctcccccatcgcctaggcggatgaggtgcacggaaaggaaaaagatccagaatgctcaaggctaggctacgcgcagatggtggtgggggtggtggtggtggtggtgcgtagcgtagcacactagtacgcaactaccccctacggcgtggtcgtcccgcgaacagcgcttgcccgtgggtcgtgaccgtctctgagcaggcttgcagtgtgagagatgacaagacccggcccgggcatcatgagcgtgacagcgacacgctccatccggaaagaatcatcatattctacggtccaaaagtaacaataattaaaaaaaatttgccttgctagagtagtatgcccgagtttaaccaaggccttgtttagttcatcccaaaaagcaaaaagttttcaagattccccgtcacatcgaatcttgtggcacatgtcatactgatcactagagcaaaggaggcggggcaggtcgaaggggttattcctaatctaatccatgatggtttgtctatccttcagtatgcggatgacacagtaattttcatgagccacgatgctgaaaaagctgtgaatatgaaacttttgcttagcacctttgaacaactatcggggcttaaaataaattttcataaaagtgaaatcttttgctttggcaaagcaaaagaacatgagatgttttattcgcaaactttcggaaatttgtgctcatgtttttgttacaaaaattgggaaatgattaaatggtacgagtgtcttcttcaaaaacgtttaaaaaaacttgtgccatatataaaaaaacgtttacaaacatatttgctagtaaaactaaagtcgtggttcacatgcaaacttattgattttaatgctttagtactagtataataactttaatatattatcatggaactttttcattttatatgaagtgtgcatatgattcatgactatggtagcagatgaaaattaaattaagtcgaactaaattctaaagctctaaggccttgtttagttcccaaataattttacaaaatttttcagattcatcgtcacatcgaatctttaaacgcatgcatagaatattaaatatagacgacaagaaaaactaattgtacagtttggtcggaattaatgagacgaatcttttgagcctagttagtccatgattgaacaatatttgttaaatacaaacgaaagtactatagtttcgatttctcaaaattttttagaactaaacaaggcctaaatttaagcgaatagtcagagatttaaagctccattttttagtggaatttaaagctccagttgaaagagacgcccgcgttcgactgctaggcctggtgggctgtctcgactcgggctcgggtccgttgcaacggttactggagtgggcccaaaatctccgctgcgtctgcctgtggatagagagcgcggcgaggcaagcgaaacctctgcggcccgcaggctccagcgctcctccacctctcatggccaccggcgccaccgcctcccgcctcgccgtcctcgcaccgcggccgttggcccccgcgccgggacgccggcgacatgcccctgctcccggttgcggtccttcccgtccgcgcggtctccacgccgcgcctcgcggccgcgtcctctgcctcgcggcacccgcgcccgctgctccttccaccaccgacgccggccaggaccgcctccggaaggtagccgccagtgcgtcctttactcgttagccctgttttatttgtaatcgtatatgtagacattggtgattggtcacctaagccactaagcctcaagcaaatattactgttcactattgcgttgtgctggtgctcgttagcgtgttgattcagcgcgtgttttatgctgctaggtgcccatttcgaatatcaggaacttctgcatcatcgcgcacatcgaccacggcaagtccacgctggcggataagctgctagagctcactggcacggtgcagaagagagagatgaaggagcagtttctggataacatggacctggagagggagagagggatcactatcaaattgcaggtacccatatacaaaattctaacctgtaactggataatcatgatcatttaaccatctctatattgaccaatgggggaaaactcttgaaataactagttgctattatgcggataattttcttgtgtttttgttagtttgggctgtcatttgcttctacatagctcctactggatgggttctctgttctcccattttattatattattcatatttggtgtttgatatgttttcacctgttctaataatttgtgttttaggcagctcggatgcgctatgtcatgaataatgagccttactgcctgaatttgattgatacaccagggcatgttgatttctcatatgaggtatatagtcacttgttcataccactctcagacaaagaagttttcctgcttccaggcagcgattgcttcctattagaattgctaattgaagatttaattcctctgaaattttaaatccttttggagtgtatatggtagtactatggtaattttgtagttccattttcaacattgtgagttgatttaaccatctttggaactatctgattggatgctaggtttcccgctctcttgctgcctgtgagggcgcacttcttgttgttgatgcttctcaggtgcaatatatatttccttcctgtaagtttcaatagctatatatctgaagatatttgtcttctgcatgccaatgcacggaatctagccaattatttcgctggcttccaatacacatttgctgcaatgtaaaagatgtatgatggcttgatgcagggcgttgaagctcagacattagcgaatgtatatcttgcgttggaaaacaatcttgaaatcataccggtttgttctactccatttcctgtgcacaaactgtggttcctatttccaatttttacaatcgttttcatttcattgtcaaatccctatacattggacttcattcaagtctttgaaatgttagttttccttcttggtattgcccttttacctttttagatctggatgcaaactgagtaatgaactaatgatgacagctaatgtgaaattcattctgtaacatggataacaactgcttaagtttgctcgtgttgcttcgtaaaaaaatacatttaagctttaattgtttgattgcccttattaaattgcaaaatgaacaatttatatgatatcaacggatatctattctccttttgttttctgttggcaatgactttgtcctctaatttaggttctaaataaaatagatcttcctggtgctgaacctgaccgtgtcgcacaggaaattgaagaggtatttctgaaagcatcaccccctatcttagacttgtcctctatattctttggccaacagctccttccattttctacttaaaagttatgccccatttttctcttagaactaaaaattcatccttgtctttattgttaccagataattgggttggactgcagtgacgcaattcggtgttcagcaaaggttagtttttgtttcctttgccttttttttttatttttttctacagaagttacttatataaactggtagctgcagatagaacatatcgtgcccccttatgaacaggtataatcttcatattaacttcttttttgttgttctttcgtgtaggaaggcataggcatcactgaaatactagatgcccttgtgaccaaaatccccccaccgaaagatacggcaaaagatcctctcagggctcttatatttgacaggttccctttaagtacttgagctatttagaattggctaattaatgttctacatgtatctgaactactgttacatgatgtctttgtggttgcagctattatgatccatacagaggtgtaattgtgtacttccgtgttattgacggcagtataaagaaaggggacaagatctgttttatggccaatggaaaggtaatcaaaaccaaacataaacctcaccggaaacttaatgtgctttctattgttgcaatactttttatttgaaaaattagttcctaaagtaccactggtaaaacaccatccaaagctccctcctagtaatttatttgtatgccgctttaggtatttctgatcatctaaattagtttccagaaacccattctaccccatcttcttcaaccttcataatccttgtctataccgtgggtagaacgtcatgctaagcttgttgtccatttaacaggaatatgttgctgatgaaattggagtactatccccaaatcagatgcaagttgacgaactatatgctggcgaggtactttttatgctgttatgtcttacatcaattataatcatttgaggaagatattaattttttggctctccaattcatttcctcaaggatattgttcaactgtctattcaactatttcagccaactattttttcttgaacatattattttcaactattgttagctatgattcctcataaataaaaacacagttaccatgtactaaccataccagattacaaaataactgttgcaatcggaacaattaaaccaggcctttataaacttataactgtatagaattatcagcaatctctgagcagggtctagttcagaagtttttcttctatcttcatcatgcgttcatatagaacaatgtctctttgtatcttgattagttgcccactccttgacaggttggttatctctccgcttctataagatcagtagcagatgccagggttggtgatacaattactcattattcaaagaaagcagatcatgctttaccaggatattctcaagccactccaatggttttttgtggcttgttccctatagatgctgatcagtactgtatcttccctttatattgagtctcgttcttttctgttacggtatagttgtatgaaacattgtatttgtcaataggtttgaggagctgcgggaagctctggaaaaacttcagctaaatgatgctgccctaaaggtgggtttcctggcctaactatatcatcatattgtcatgaatgtattgtcaagacattttgttcatttctagcatttgaagtttggcacatattttccttgccccaaattgtggatattgtgaacttaaaagaaatggtgttggcacaagctcagatatcatgaaatatactccttccattccaaattatagcttactctggctttgtcctaattttgaccaagtttatggaaaaatgtatcaacatctacaatataaaattagttcattaaattttccatgaaatattccttgattgtgcatttatttaaaattgtagttgttgatatattttttctaaaaacttgatcaaaattagggaagcttgcattaggacaatgctaacatgagctataatttggaatggagagcaaatggcaaacccaaaaacagttccactaacaactaatttgaccacagtgtcttcagtttacaaatagccagatgatgcatgagatcagtatattgaattattgatatacttggatgaagatggttgtactcaatatctctaattaaatgtaaaaacaacatagaattaacaaacttatcgtctcctgatggtttaccaattcttgtgttaaaatatgaacaagtatgctgatcaataaattcaaatccagtacgttcggttatgtatatcagaccaatgttccattctaactaccaagaaacacaacagtacttcatctcattttacgaaaatgtatgcagtaaaagcaatgtcattaaagccatacataatagtgactgataaaaaacttaatgttaaaaacaaaacaagtttgttctcagttgaactctctaatattgaatgttctttatgcatcggcgttttgtatgatacttcattgtctctaagtccatgtcattaatgcagtttgaaccagaatcttctagtgccatggggtttggcttcagatgtggtttccttggtcttctccatatggaaattgttcaggttcttacaatctacttggttcatggcagtgtagttcatatattaaaaccattatggcttgaaatttctacaatatagtttttttctattttcaggaaaggcttgagagggaatacaacttgaacttaataattactgcaccaagtgtggtataccgtgtgaactgtgtagatggtgaaaccgtaagtcttttatgatcttgaactcgtctttcctggaatcaacattgcttaacagaataatagttatatggccataactccaattgttcaaatcagtacatctgttggaggtgcaagaacttaagctgtatccaaaatcaaataatcaacattcttttgtcaagtctgttcaaacgacctcaaacacgacatattccatatttccatcttaaatcctcattaaagaatgttctttgtcatactaaggaaatgtggatatattttaggaacttcactatggagaattaatttatggaaaccgcctgtacttgttacttgcacaactaatgaaatagtggtactgcacagaggtgcctaagtttctacttgcacacttcgggaaaagttttttgtctattaaaccagtcactggtacagtcagggggaaacataggtcttaagagaccaactgttatcatttcagatgacatgtatagcatttgcagtcaatcctagtgtttttaccaaaatttcttatatggtgcatgttgcgagcaactaagctaaaccatccaagtgtgcgtaaatttgcattgggacaaaaatatctgacttttcttaactagaaaccagtcagttttatttgcatgtgaaaaaatgattgcttacagatgtcatataggttgaatgttcaaatccatccttgcttccggagcccgggaagcggaggtctatagaagaaccatatgtgaaggttgtatctgttttcctgaactttgggagtagtatactagtatcctgcacaggtctgattattgtttttggtgtcttccttttccctctttacagattgaaatgcttacaccgaaggattatattggttcaataatggatctggctcaagatagaagaggtgaattcaaggaaatgaacttcatcacagaaagcagggccaaacttatttatgagctaccactagccgaggtgtgaaacggagctattttctttgcagtaaattgaagattaaaaaagtttttagaagtaattagatgcattccttaatgcatgtataaaatatacaaaatgaggtgtttcagaaacagatgatatagttattttcaacagtttttagtctgtctgaaatatttctacgccatagagatgactatacgaaatgcatcatcatcactgttatgttcatcctgcagcaacctgatactgcattatatgtctcagcattaagtaagcatgttgcacctttttgctgcttctgtaatgtttgtttctcttgagcctggctatgaaaaagatacttccactgtttcattctatcatacattattaaacaatgatgtatcttgcaaaacatattccttctgctgttgtatttcattgatgctaatatacctgtagaatgtacctattgcttagtggacatttgtgtatgcagatggttggcgatttctttgatcaactgaaatcacgaagtaaaggatatgctagcatggaatattcacttatcgggtactcattgttgctattctctagtttctctgcagttttagccttttggtagcgcccatgtagtcctttgtgaaacagttagctgagatttgtttgtttacaggtacagagaaagtcaactagtaaagctagatatacaaatcaacggggatcctgttgaggcgttgtcaacaattgtacacagagataaggtgcttcattttagttgttatcttatctgcacatataacttatgcagttcagaaatagcagtgatgccattgtttcttatccaaggccaaacgatctataaaaatattaggatacaattcatttatgatgtgataaacatctacctgtacagtgggggcctcccctgctgtatttatgtttcaaaaaagataaacatctttacagaccacagacacaaatatttacattgattctgtacttatggcaaactgcaaacaatagatacatttcaggaatctgcttgtgtctgagtatttgatcatacttattgtcaatgacataattgtgttaaataatgatttatcacatattatctttcctttgtactctcatgtaaccatctatataaacctgcagtctacaaagtagcacaacagttattctaactgtatttagtttgagtttttcttttctctctagtcaagtgctaacatcattttcgaaaaagtagcttgtatccatagacctatagttattatggaatagtttctcaaggcaatctgattggtgaaatatttttttctaggcatatgctgttggcagggcacttactcaaaaactcaaggaactcatacctcggcaaatgtttaaagttcctattcaagtgagatttgcctgtcttattctctcagattttttttatcttttatgtacataacaagatcaggcagagagttatgagggagttaagagtaccttcataccagcgtgaagggattttagataataagggttgatgagaatcttggtaaagagttatttaatgagagaatattatgtggaacacatgcacatctttgtgtgtaccatctgtgggggtacaaatgccttaatttgcggtcatgggtttccaaatgtttgagcctactttttgcaagctatatcaagagggagcatgaatttgatcttgcaattttccagtaacaaactaaagaagtgattggcaccacccctgcttcatattttcttttgaaatcttgcttggctttatttaaaccaagcatcctatgctagaaaattagcataaacaacttgtaccaatccttttcctgtggtgataaaaactccagttcacaatcccattttccaatagcaatcagatgctaatgagaacattgacaggcatgtattggcacaaaggtcattgcgagcgaagccctgtctgccatcaggaaggatgtcctatcaaaatgctatggtaaacataacactataaccggcactttggaagcatttgtaaagctaatggaatatctttatctcacactttatgatcaagtgcacacttatctcatacaaatagcagttaatacactcgtgttctatatacttgccttacagacttacaaagcttttattcagaatactatgttttttttttaacttgcaggtggtgatataacaaggaaaaagaagttgctgaagaaacaggtattcttagaaaaaaaaaagttgtttggccaaagaaagaactttgaaaatatcattttgtgtataaatacataagtagtagaatggttatactgacaaatgattgacttaagctttcatagaatgacttgtagctctgttcatcagaatcccttcgtgatctgatatagtatgatcactggatatctgcaaacaggctgaaggaaagaaaaggatgaaggcaataggaagggttgatgttcctcaagaagcattcatggccgtgttgaaactggagaaggaggtgctatgaaagagctcatggaactttgtgtctctgtaaattaaagatctcttcttgtgcacaactccactccgcaagtttactcaagagagttttgagacaacatggcactgtgattcaacctggcagctctggaccaggggaaccagtctaactacagatcactcccagaacaaaagctgctaatctagcgactggcattcactaattttgttttgtatgtcaggttatgatggtaaacaatcatgttgaacagagttttgcctggcacatgtatacgaaatatgtcaaagggcgtcatggaatccaattccctgtaatgctacacaaacttgtttctacagttgaatataccttgtaaaatatatgtagcaccttaaacatttcctggagtacttcatgaaagttcatacatgacagatgtatggttcaaccgaacagaggaactggaacagagcacagattacagcaataaatccctggcacaccgggaatggaacagaggagaa

SEQ ID NO: 4432 - DNA, 5522 bp, Sorghum bicolor
accgacccgttttcatctctagccatgacgttgttgaaggttaggaagcaaaatccaatgacctcgagcaaagagaacccatcaggagcggccccagacgaccctgggctggacgacggctgctggagcttggggaaagcagatccgccagactatcctcatcacgtcgaccgtccattggacgcggctgacgcactggaggtggacgatggctgccggagtcatcgggggaaagctgatttggactcccttcacgccgagcacccggaaagttgggaccctgctgacccgagctcttctcaagagggccaacggcggcggcggcggcgttagggcccacatgagccggcggaggagggacgccggcgttgcgcgcctgctcagtcagaccctcgccagggctgcccgacgacgacatcatgttggtgctgggtagctaaggccctgtttagtttgccacctaaaattttttcatccatcccatcgaatatttggacacatgtatggaacattaaatttacataaaaaaataaactaattacacagtttggttgaaaatcgcaagacgaatcttttaagcctagttactccatgattagccttaagtgctacagtaatccgcatgtgctaatgacagattaattatgcttaatagatttgtcttgcagtttcctgacaagatatgtaatttgtttttttattagtttctaaaaacctctcccgacatccttccgtcacattcgatgtgacacccaaaaaattttcattaactatctaaacagggcctaagctaggcagctagctgcctgagctcgagagtggagaggaccggaagaaggagacggctggcgccactggcggatacagtaggtattcctggtattctcatgaatacctaacttttttatacattttatatatatatatatatatatatatatatatatatatatatatatatatatatatatatatatataatacattagcattcttatatttagcaaataaattttttctctcattttttagtgtatctttgtattcctttttccacataggtgctatgttagctcgattgccaaaattattctattttgttgtttctacaaatgaaaatctaattatttatctccaaaccacatacacatgccaccaaatattagtacaaatcatattttatttccaagacaaatcggaatatgcgcatgacaacatgtataacaaactattcttttcgtgtgagtgaacaaggcacgagtgggaggcaattccataatcctcattcctaaatctctaaccctagccgaccaggcatgacgtagtggtggcactgctggttcccattttcctaagctcctagcggcgcggggcgtgcagcgcgggcgcggtctctgtctctatgctacgcctacatggcgactggtgagggcgcacgtcgctcatgaggttagaggcaacagttgagtggtggcccaccagaaaacagtaaggaatacccaagatctaaatcctggctccgccagcgttggcgcccgttagtttgacgggtgcttctgcttcgtgattacgctaatgcttcgagcagcacaccagcagatggtggaaaatgacatttcttacgatttgacccctctaattcttcaaaaaaaaaacaatttgggcctctctcttagtataattaattttacaaacacagccgatgatttatggcaaaatattcgacgacaaaggctcttttggtacagtaacttttattttttacaaaagagctccatgaacaattttttaggtaaagctgagttgttttgaagaagttgtttggcaaaacagttttaccaactgctttatgtatggatgaaagaaataaataggagagagagctaggataactattttttcagcccaaaagacttgaaccacaggcccagcaaggtccggcccacgagaggtccctcgccggcagtggccggccgtggacgacgccacgacgaccagaaccactccactccaccccttgctcacctccgcgacccggaccaatggcgacgccaacggcctcatccaacttacccctcgccaccgccaccgccaccgcctccgcctccgtctccacctcgttccccaaccgattcctccgcacgccgtgcacgctccggcgccgctcttggccccgcctgcgactgcgtgcgggctccgtcaaggagtggcgcgagttcgaggacgacgcgggcaccgtcaaggagtggcgggagttcgaggacgccgtcaggaggaaggacctcccccgcgctctccgcttcctgcagtccgtggagcccgcggcggcggcagcgccgggggggaccgcggcggtgcaggtcgcggtccccgtgccgccggggcgggactgggaggtgctcgacgcctgcatcgactccgacgacatgcgcctcgtcggccgggcgtaccagttcctcgtcgaccggggtgtcctcgccagcttcggaatgtgcaagaacatcggtgagttgggattttgggaacgcagttgcgaaatgccttcacgatttggacatggcatcgaattttaataagctcagcttcttagttgtttctgaaatggggttgtaggatttggcatgtgctgatttgattgatatagtcatttactatgacgcctcgcgatttgaacttgtcttgcagtttatcagttaacgtctactccgactgcctttcagattgactgtatatctgtattccttttctacagttctggaagggccaagagaagtgacaccaacagttttgaaggagatgaccggtttggaaggtgaggatagagaaagtgtccctgtcccctctcttccactgtgctgtgatattctacactaaaaaattgcagtgggttgccagttactacatagcaggaagttcaggcagcacttttttctctctcttttattaatctaaaacgtaaaaactctactgcaacattctttagcaaaacatactcataacaagctgatagagctgtttcaaaggaactttagctcatctattgtgatttaccaccgctatgtcataaaggtatatgttttttaatttattgattttttcagctgaaaaacttgcgccaaagaaatggggtctgtctggaagttctccgtatgttctcgttggatttcttggaggtgtatcttttctactgacacaaggggttgatctacggcctaaattgggtgctgtattgggattagcaacagccgatgcattgtttcttggtggtacctgtctcgctcaaatctcatgtttctggcctccatataaacgtcggatccttgtacatgaagcagggcatcttcttactggtatggctttaccctttcctacctttttgctgttgcattattcattggctcctgttttatgagagttgttttggctttaacttttccagtatgtaatttgtaatattatcttacttctgagattctacttcagtaatgttctaacttcctttgcacttgtttatagcctatctaatgggctgcccgatacgaggagtcattttggatccatttgtggcattgcgaatgggcatccagggccaggtacaactatttttaactttgatactgtggctatctatctgttgcgcttggttgtctattatccaatgaggcagtgtaatttctgccccttcaaaacttcaccacaccttttgagggctaggccttaatatcatttttttggcacaagatcttttctgttctgcgagatttgtgatctgcaatgcattatcaatgttctgacaactattacattatcattggcgttgttgtttatccaaactgccttctcataatcatattataaatggaattatggaagcagctagtattgaaaaatgtgacaaatggtgctgtattgttttctaaggtttggtattatccttaaaaaaattaagtccttccatgagatttgaggtcacattgatccctgttttacttggctcaccatattacacttgcagtagattattagattttctggctctgcattgtacacttgtagttgtattgcattccgttttcttctggaggatctcaggctcagctatcgtgtcattcccattttggttttatcatctcatgcccttcatatatatcctacatgttatagaactctcatgggtgcttcagtacctatgcaggcagggactcagttctgggatgaaaagatggaaaaagaactagccgagggtcatctatcaagtactgcatttgacaggtacataaactacttattttgtctgaatgttgacaattggagtacttggacatcatttgacttttcgaaattggcaggtactgtatgattctgtttgccggaactgctgctgaagcacttgtttatggggaggcagaaggtggagaaaatgacgagaacttattcaggagtttgtgcattctactgaacccaccgctttctgttgcacaggttcacattattttgctgttatcttgtatgccctacttatttctgaataaatctatatgattcatcagtgtttctccactgcttatcagatggcaaaccgagctcgttggtcagtcatgcaatcttataacctcctgaagtggcacaagaaagctcatagagctgcagtcaaagcacttgaagacgggcatagtctcagcattgtaatcagaaggatagaagaagccatcgcctctgaaagaaaatacgacaattaatcctttacatgtgttcctgccaatcaatccttggcacctttcacaagatgcagagaagggcttccatactttgcacagagtttttttttctttttttttaaggtaaagcacaaagggagggttagtgtcatagtgtatactggaacagaaatgacgcttttgaaaggaaggcgaccgatccttgaagttaatagtgtagtggagagtggagacctgagcatatgatggacggactaaatctactgatgcattcgttggagattccaaggaactcaaaagttattgaacccttgatgagtatgtaaagtgtaaacaggtaggcatagagataaacaatggagcacattatacatgcgccctcagcgcacaggaatggatgactattggccaccttctaggggctactcccggtagaactgtctcgcaaacctggagccaaacactttgaaagggctttgatgctctggttgtcttggtcatggagcaactccgaaagcatgtttatatccttcctcattcatagaaatagagattctgtgcttgcaaaaaaaaagagattctggtaaaaaaaaaatctccaacaacttctttaattggatctctaaaaagatttttaataagacaatatcaatacaaaaatatttcatatcccatattttttccatcgaggttcttaaagatgacattcaagacattgtgtcatatcttctatttgtccggtagggatttttgagaggatataaagacgtacattcctcattaggtttctagggaggtattctc

SEQ ID NO: 4433 - DNA, 6412 bp, Sorghum bicolor
gccacgtgtcagttcgagaaagagccacggatgctccaatttctctcgtgcgaggagaatggagtgacttttaacttaccccgatcactcacgaagatcaagccaagtgaagacgatacgtgctaatatatatcagcgtcgataccaaaccgcgtacattcaaaaaatattggtgaaatttattatggacaaatcatattcaccaaccaaaggttcctatggttttagggtactcggatttaaaaagaaagagtagcgcggtaatttatttggacccgagtacgagtacgtacgtggtgaggaggacccaagagagggaaaatagaagaagggcccctggaggtgcgtaggcgtagctgcgctgccacgaccacgagcccacgacgggtcgaccggtcgagtacgaatcattaggctggtcccgatggaccgtgtcatgacggactcgctcgctcacctgttggccgttgctttgctattgtgcacgcttttcttcctcgtctctttctgcaccggcccaggtgaggtctctgctctgctgtgcccccattgctgggacgcgttgcgctacagtccaagatggcaaacggccacagccgagggaagatggtactcacagtacacctacactagatagagggcctgcaacttttttcttttttgaaggaggctacaatctacgtagtacgtagaaagaaaatgttgagtcgattgaaaatatagactggatttttatttctcaggtcattatactccctccgtattacattttatcattcaaaatttatccttaagtacaatgttatttttttatattttatcttactttgtcttaaaattattagaatacactatattatattataggagagagcgagtacagtagatcatatgaggttctagaaggcgcaagacctggttccctaggaagctagctcgagataaggtctctaaaattaggccttgtttagttcactccgaaatccaaaaagttttcaagatttcccatcacatcgaatcttgcgccacatgcatgaagcattaaatatagacgaaaacaaaaactaattacacagtttgtctgtaaatcgcgagacgaatattttgatcctagttagttcatgattggataatatttgtcaaataaaaacgaaagtgctacagtaacgaaatccgaaattttttcggaactaaacaaggccttagaatggaagaaccgttccatccgcagatctatagtatgttcgttacaagagccatttttcctgctgctccccatcggtgactagctaatccagtcattaggaataagaagaagttgttgtgtcgtcaaatacatacatacatcatacatgcaggatgtcgagaaacacaacacgcatatactatatagttcgtgtacaaacacttaatttgcagtctggtgtacaagtgttttgtttgagaccgtggcaagacacactagctagtagcaccgtatatactgtgggaatttgggatggcacgcacgcacgcacgggcacccaaagccttccacttttttttttttctctctctctctctcgctcgtcttcatcatatataaatacgagtagtagtagtagtctccaacccaattatgatgtagcgagtcgttggcattccccgtctctatctttggttctcgtctcgcgagcgcagctacgagacaaagcacacgtagtactagtactactgcgccgttgcctgcctgcctgcctgccttgcaccaccaccaccaccaccgcaggcccggtccggtccggtccgctactatacaaaccagcccagcagcgagagaggggaggaagaggaggaggaggaggggagagggggggccggggtcggcacggcgggcagaattgcctcctgctgcgtgctgccagagagatcgcacggacatcggagggagggagcgaggaggagagatccgtcccggagtggcggcctccggggagatcgatcggtctcggtctcggtggatggggatggcgcccgccgggtgggtggccgggctggtggcggagagcttcttcgtggcgtgccccgcgcacgagtcccgcaagaagaacgagcgcaacatcttctgcctcgcctgctgcgccagcatctgcccgcactgcgcccccgcgcaccgccaccacccgctcctccaggtcagccccttcgtctcctcttcttcttcctcctcctcctctccccgtcgtctcccttgatctcctgccatgccatggcatgcacctgcctgctaccagacacttctatctgtctcgccactgtacagagacatgatcgtacaattatacgaactccactcgctcgatctgctcaatttctactcctacataccagaccagagcagcaattctcgctctgctctgctcgttggaggcagcagctttttgggttgtctcggttcttgtgcatggatgcgaacgggagtaccaatcaatcaatttctttatttattattctcctcctcttcatggcgaaggcgaagcgagtaggagtaggtagatgctactcctccttcctacaagtagtagacgaggaggaggagggatggcatggatgatggatcatggggctgccgctgttgtgtgtagtatagtatctcgcttttgttttgtcgtgtgctgtcttttcacgcgctgttccctcccttccttagatttggtcccggcttaagcctaattcccctaccgttttcatatgatttgatttgatgcgtgcgcctcgtctcgtctgttctgtgtgggggaaacgaaatccctcgctaatcgctcgtctccctcgtacaaagtttgttgctaaacttgtactttgctcccggtcctctccgttgtcgccttgtgaggttttgatttggttgggttgggttgggttgggtcatgctcatgctcatccatccatgcatgcatgcatgccgctctcttgattaatttcggtttagaacgagccgggcgctgattgggtcctgccataaccgtcgcctataatttgaacaacaacaaaatcctatgcatgatccggaggggagcagtagtactacttcttcattgtggtaattttctgctcctacctacccgggaaataaattctgtgcatgggtaaggtagtacttcctccgtcccgaaagaatcaattcctaggatccgtgactaactttatagaaaaaaataacaacatctataatataaaatacacattatatgaaaatatattctatgatgaatctaacaatactaatttgatactataaatcctggtattttttcctagaaatttggtcaaagtttaaaaagtttgacttaggacaactctagaaattgatacaaattctagctacagatcctcctaatctcttcggctttgaattagttatgcatggcaaaactaattttcgggggagggtaaaaattcgaattcccttgcatgcgggtaaaaatcatttcatccggttctcccttgcttgtcttgtcgctgccatttcttcttccacctttctcctttcttgcaactaatccggtcaggagttgttggtgctgcgagtccaacgcaaaaggcaaaaagaaagctgtgggggagttaccgcctgcctcttccttggcctttcgccggaaatagccacccatgtccatgccctgccgaaaatttccacaccagagcattcatcatcatgctgctttgtgtgcttgtttgatcttatcctcttgcttgcaaaagtttttactgcccagttctgtctctctgagggctgctttttcaccctctgcaactggcaatgcatgatcatctcgtctcgtctcgtcggatgctatgcaagaattcgaattccccttcggattggatctgatcggattggattctctgcgtaatcgccctcctgctgtgtgcgagcttccattattaggcctggttatccaaactgttttgccatgtatagcaacatttcctgctcgtcctgccgcggccccctctgcagcgccccccggtaaaaatcgaatcgcgctttctacttttcctccggcctccggggcgcagcagggcaaagcagatttaccaccgtatgcgcgcccgcgcggtaactgcgcgcctcctcttttttaccaaacagaggcatcaacactgttcttcccttggagggccccacctcggtcggtactgttcattcacggccagtgaattttttgccattggtatagatttttaccgttgtgcccccaatcctgcgttggattttcctgttagaggacagatcctccaagggcagttccgtcactagggttggtttagggtctcccatgataagatcacgactggaggtggtactgccgcccggccggtcaaagcatgggccattgtgtggcccaacccaagttgtactgctgctgtactacctgcattatcttcaaactccaggattgtagcctgtctaaacatgtttaattagcacgaacctcgacgcagacagtggcttcgttttatcttgggttaagtttttgttttgaattaattaggtgcggcgctacgtgtaccatgacgtcgtccgccttggcgacctcgagaagctcatcgactgctcctgtgttcaggtgattccttgcaaaatcacttctgaaatgattttaagcattccagtatcactgatactatgattttaactttgattgagctgatgatttactgttaacgattccctctgtgacgtgactgtgcagagctacacgatcaacagtgccaaggtgatcttcctgaagccgaggcctcagtccaggcctttcaagggctccggcaacatctgcctcacatgtgacaggatcctccaggagcccttccacttctgctccctctcttgcaaggtcagctaaaaacaacccaccacaaggatgtcttcttcacaagtgttacatcatcatcgcccatggccatatggtgcatcatcatatcattcagtgaggacggcatgctgaattccacgatgcatgacgacttatggcaatacatgtcacatggtttgcatatacgcaggtggatcatgtgatgatgcagggaggggacctgtccaacatcctgcagtactatggcggcagcggtgtggcgggggacccggaccgcctcgccttcccgaggttcgagaacctccgcgtcgatggctcggacctcgacgatgacaccgacggtgggcaggtgaccccaaactcgatcctcgaggacccgacgcagcactatggcaatggcggtggcgggggatcaagtgacaatggaggcgacactagggtggatggcggtgcgcggcgcggcggcgaggcggcaaagaggaagaaagggggagggttcttcccccagatcgtgctgtcgcttggcggcggcggtaacaggaggaagggtgccccccacaggtcccctctggcctaagctcttcgtaacttcgttcatgtccctgctactgctgctcgttatcaccagctatagctagctggtagtagcggttgcagtgacggtggcgtggctattaattagtagtgtgttataatagtcttaatggtgattagccttgtagagatcagacgagagctggttggtcggttgcttggggaagggcctggccttgtggatccgtctagcagctttgctagggccatggccacctcaaggcagttgtgtgtgtgtgttgatgagacttaagaaagatggagagggagagggagagggagaggagacggttgtaaagcagttcccttgttacaggcctaggtaggcactggaaagtggggcccacatttgcaggatggggcccatacgaggtggctaccaattttgtatttgatgtaacaagggttacttgcatacacttccacacctatatataagtaatatataaaaattcccccagactgaatatggtatatttgtgtgccactgtggtctgtatccgttccatgggctcaagtgattttcagctgcctgtttggtgtttagcagctgttgaggcctgagacagagctcccatgcatcgtttgtaaactttgtgtgtgtccgtccctgtcgttgcttttgagttttgacctgaccggcatgtgatgcacacgcccagctccggtccaaactctccagtcgtgttgctgtgacctggttgtttgatgcagttgggattcactttgcaatggaccactgtctttgtcccctggtgtgtagagttgagagagactgaaaaagacgagagagagtggtggcaggtgtgatgcaatatgcaaaatacagtgctagtccaacgtagtgtcaaatggcttgatgcctgattttacatgagaatttccatattagaggacagatggtcattttagcctctaccaagataaaaaaaaataaactctcttcattcgaaattata

SEQ ID NO: 4434 - DNA, 7942 bp, Sorghum bicolor
ttttgtagaagctaaaatcccatttttctccactctcataacggccacttgtaaaccaatctacaactactaagtttgaattggcagagacatgaaaaacttgcttttggtggtaccgagcagttgagaagcaggttacagggtctggaataacagcaagcagggcatcttccccaactctggcctactgcatgtaataaatgtttaatcatggatcttctagtttggcagtaataatggaactaagagccctttaatatatcaaatgtcttgcaagaaggattacctctagcaactgttcagaacattttgaacccacagccttgtacacctacaaaaataattgccgatcagtagcgtataaacaaagtcagcagatttgaagcaaaatagctttcagttgacaatttcatcatcggacttgttaagcttacacgagtgcttgccgaccaggaaatatacaacagattttattgaaactagctttcagttgacacgtagacaaaagacttgaacgaagaaaaccagcattttcagttgacattttctatgaagaacttgtcaatgcatgaaagcttaggcatggtaataactgagctatatggtttcctgaagcagggcactggagaagtatcccaaagctagaaagatcagaggtacaaaattttatgaagggaacgtcatcagctacctaatttctttattgaactttaaaagacacacacaagtggcagagctcccagatctggagaattaacgccagtccatgtgttcagcattgtgaggaacagccactagtttctaccatgagcggatgaagaaattacccgtgtagggatgccacccacaatgtactaatgcagcctaaacagtgcatctggaaggctcataagtcataactcctgtttatcatacattcctacagagcgagtactggaatcaccatacggcttacacgagtaaagcatcacaagaccatacaaaacagccatagtataattataggcaggaatcgtagagtcaagcttcattaagcaagcagcataccttggtggaggcctgcgtggtgatcgccaccgtgcacccgtcgccgacgctaaccgtgcacgatacggtgtccccctgcaagggcgcgcgcgggcgcggcaccatgagcaaatcacactacagcaaccacctctgaaccgcgagtacccagcaacagcgcggcgggcaagaacggagagaacagagattggagaggaggtcctcgggatctcacggagacgatgccgccgccgtaggtgagggcgtagagccagaccgcgtcgcaggaggagggccccaccttggacggggcgatgagcttgagcgggtacctggcgaagcagcgggtcagcgccgacctcccccgcaccctctccacccgcaccgcccccgtcgccgcctccgccatcgccggctgaccaccagaccacccgcgtggtgattggacggtcgacccgtccgtgcctagcctaacccccgatggggcggcggtcaaccagatcgtcgtccatttgcctcgttcgtggattgaagcaggcccagtccgagaagaattatctcttgttcggcccaccgagtcaccgggccgtcggaacgtcctaatgggcttgcaactagcaacggaggattagagaggaaaatcaggtgatttgccgacgggcaacggcggtgatttccaatcaaactttcgatgaaatggaagatagtggagtgggcactggagcaccgcttcgtctcgtgcgctccacgtttcggtccggtggccacctggccggaccagaccagcgcaccgcgccgtccaggccaccacgttccgtggtcggcccgcaaccggccaggccgagcgcaccactctcctctccgccaccgcgacccgatattccgatcacgccaaaattcaatctcaatttcagcggggcgcggccaccttatctctgtccgtgcaggtccagtgaccagccaccacgctccaccctgactgctctgtgctgctgccgggctccatccagcgccatggccgcggccacgctgctcccgggccccgccgccgcctcgccgcgtctcggctccgcggcttccgccccgtccgcgtcccacgggaggcgtcgcctcaccttcagcttcaggtacgcgcgcgtacaggccctcacccacgcgtggccgcccgccaggtgctcgacctgtttcctgcactgtgccaccacgggaacgaacgcgctgccggctccagcctgcagttggggggtgcccgcctgctgaattcgcgcgaattactgttggtacctgatagaacaatcagtactactgcaaggctgagtggctgatcgatcggcccgtgccgtttgcgcgtttgtgcaggtgccagtcgaccagcgtcgacaagcagcagcagcctccgccgcctaagcagaagcagcggaacctgctcgacaacgccagcaacctgctgaccaacttcctcagcggcggcaacctcggggccatgcccgtcgcggagggcgccgttactgacctcttcggcaagcccctcttcttctcgctctatgattggttcctcgaggtgaatgcgcagctccttcctgtacccccgcgtctcgtgcattgccatcgtttcgtttcttagataattctgttctccacttagtttaccatataggaaaattcgatccagaaattatgagaatagctcctgcaacactgacatgttattatgtcttaatttgcagcatggctctgtctacaagcttgcttttgggcccaaatcgtttgttgtcgtctctgaccctattgttgctagacacatcctccgggagaacgctttctgttatgataaggtatgctgtctagcatgtgtgagatatagattgttgaaaactcgttagagaaaaacaattgttgaaaactatggaatatacaaggatttggaccatgatcaccttacattcatgatggttgcaagcttatgtatagcatgattgctgccctacaactgcactttgcatatattaatatattattacttgtcatggagatatggctttgcttctgaataataattggtgtagtttggtgggtttctttcttacatgttattatcttgaaatcagggagttcttgctgaaattttaaaacccataatggggaagggtcttatacctgctgaccttgatacctggaagcaaaggagaaaaggttagaaaggttggatattcaatcatatattccgcgttttctagtttggactgactataatactgcagattgctctattattctatgggcatagcccatactgttagtcaaaagtagcaggttgatcattggcctgagcttcaaatccagtccattctagttttgtttttcctgtcttaattgttgaaagttatttctagctcaactgtgtattctgaaagtgacatctctaggcatgcaaaatcatcctaggtcttctttcaattcggaattcattagcttgttttttttgccttgagggatgaaccattgaccatttttctgtttttaaatgctatatttaacagttactgatgtttgacgaggcggtcaatcaacataatcgaattgttttagagataatttgaacttcatgtatgcatttcacataatattttactaatggcacatcttttcctacccttgtgttctgcagttataacacctgggttccatgccttattcatagaagctatggtgagaacatttacgaaatgttcagagagaacaatatcaaagcttgaagagcttactgaaagcgaagctcgtgtacaaaaatcgactatagtggaccttgaagctgagttctccaatttggcactcgatatcattggcttgggtgtgttcaattttgattttgactcggttactaaggaatctcctgtaatcaaggttggtatatctgtagttctatcttatgtttatttgtgcataggatgtattacacttgatcatatagagattgaaagtagagaagaatattcataatttatggctatcttgggtagatatgggattgtgtttttctgctacttttctcttgcctgctttgaggagcttctgtctccattgtgcaggcagtttatggaacactttttgaagctgagcaccgttctaccttctacatcccctactggaatcttcctttcacaaaatggatagttccaaggcagcgcaagttccatagtgacctcaaggtgatcaacaattgccttgataacctgataaaaaatgcaaaggagacaagacaggtttgtgcaactgaaacacagctcagttgtggcattttaacaagcttgctgtagttctgatgttgtaaacttgctatataggaagctgatgtggaaaagctccagcaaagggactactcttctctgaaggttggctgctgttcctccttcctttgttaactcatttcagtgtcagtactcaccagcttacctttcgaacatctagggatttttggtgaataatatctatatctgtgtcataatgcttttaggatgcaagcttgctgaggttccttgttgacatgcggggagctgatgttgatgatcgccaggtaaattgcggaaaccgggcattttagaattttatgttatgctttctatttcttcctatttgcagcaaattaagttgataaatttcatggtatgtgttgtgacagcttcgagatgatctaatgacaatgcttattgctggacatgaaacaactgctgctgttctgacatggtctgtttttttgctagcccaggtacacagatgttatcacaaaattcttcaagtaattaattttttgcttgaatatcgtatgctcataatgtgctgtcatgcagagccctaccaagatgagaaaagcccaggcagaggttgattctgttctcagcaatggggcaattactgttgaatccctcaagaaactggagtatgtcgcctataccattattttgaactcttttccattgcttaatgaatatcattgggttattgtttcataaaaaatatgatcagattattaacactagcatacccatggcatccgacttgtctgaaattactagctatatttatacatctgaaatgaatttgccttcctctcatgaaacttttgtgttgccctctaggtacataaaattgattattcttgaagctcttcgcttgtatcctcagccaccattgttaattaggcgttctctccggccagacaagttgccaggtaccatcttctctgtaatgcaatttctttcctgaacaatacaaaggtgtttagtggtcatttgagtggccatttagattagtttggttgaagtcgctgttcttgttactggtgtttgtgttaattaataggctgtgagtgtgtgtgtgtgtgtgtgtgtgtttgagtgtgcatgtgtggtgtcatgtaacatctttgatacacagctctcctgcgtattcaagaaaaaaaaacgatgctaagtggttgttgggtaattgggcagatgcatggcttatgttgtgaaggccgaagggcatgtcatcagcacagaaattctgattaaataatacctatattctcatttgataaagaaagctgccattaatttcaacttgtgaaactgtggacaggaaactttccagtattgtaaaacttttttgttgtaactcgtatttcaaaaatgtatgcacatcaggagcggatgtagtataggtgcatgggggtacagctatagctaattgtgtatagttataatacattatacatctagaacaccttatcaaatagcaatccgttaagctcaactgcttatctgagcggaaaaatagcctacagttcttctaaagctcaggaggctcgagcccaaagtgagccaatacacatagcaccagtagaagataaaaatgaaagaacaagttaggataaatttgactcttttttctcttcccaacaataaaaaatgtgaagtttcagtctcgatcttgtttaacaatcagtcaatttttagaaaaaaaaatcatccataaattagttgataaataattaattttatttatgtagatcgttatggcataagaggatcagtgatctttttatggactactcaatcaagcataaaagatttcttcatccactttgaatcaattcattaaggataacgaacaaacaactaatatgcttatcaagaccttggtgatgactacctttgtatgcttgcagatgaattttgccaaattgtatccgtagatccgcgcacctaactattttattgtaatttggttgttggtccatattacattgctaatgaattgcatcgcttaggcccgtacccccatgatttatatcctggatccgacactgatgaaaatgactttatggcatgaggttcttatctaaatttctgaacgtggaagtagttttagttcactgcacgtttggattgcacctaaggtatgaggaatcgccaaagtgatcccgttcttttaaatcatgtataacatgctttctagtcagtttctcgatgtctattcagcccatttatgtctcccatttgatctcactagatgcatcctactactgtgatgtttgttgaaactttgcgttttttttcaatgaattagtttagtgacaagcatggtatgttgccttggctggtacatgccttctaactctgcctgatcatctatgtacccaggtggatacaacggagcaaaagagggatatgaaataccagctgggactgatatatttgtttcggtgagtttaggcaactgcagaaatggcttgaataggattgtgcaacagagatggacttatggtaaattctggcactgcagatatacaacctccacagatccccatatttttgggaccggccaaatgaatttgaacctgagaggttttcagttccaaagaaggatgagagcatagaaggctggtctggttttgatcctgaccggagtcctggtgcaatgtaccccaatgaggtcaggttcaacaattttgtctcttcgactgctgcatgaattttttcccagttataagaaagtaggaacatatcaatttgctctttaccagatcatagcagactttgctttccttccctttggcggtgggcctcgcaaatgtgtgggggaccaattcgcgctcctggagtcgacggtagctctggccctgctgctgcggaagtttgatgtggagctgagagggtcacccgacgaagtagagatggtgacaggcgccacgatccacacaaagaatgggctgtggtgcagactgaggaaaaggacttgatcaaacatagctttacattgagaagtagctctcattcttgacttctgatatgctctaggcaagttaaacagcctcatgaacagtggatggggaatcatgtacattgaaatatttcttgtagcgcaataggggcaaccatttctgcgtatatatctaatctatttaggggtgcaaatgagtgatgattgggtgcacctctaaacctctttggttcaaatatttatactacttctccaaaaaaaataagaagtagtacaaatatttgaactaaagaggtttggaggtgcacctaaaggttacccctttgcacccctaaaatctatttcagcttgacattcttgtgcaagtactgcttgcatagttgcatgcatgcacctaaaaacacctgtacacgcacttcatgccaaccgaactgatgagacagcagagatagcgtaagccactatctgtctcggctgaggtgtcccgtttcttctgatctctgaactcaggtaacctcatcttgtcctgttaaccaagttaggtttcagtgatgtgtttgctttggcatggcagttggcaggtagcattatcatcaccatcgtcagttcatcaccatgtgcatcaaagctgggctgctggggcgtgcagcag

SEQ ID NO: 4435 - DNA, 4914 bp, Sorghum bicolor
ctatgatgggagtgcacgtgtggtgctagaagggtacaggtggagtgtatacctctgggcaggtagaaaggctgatcagaagaagtggtgtaggaagaggaaggtgctgcaatttgcatgtccatagtatcctgatcgttcaagtctcatgttggctgtacggcagatcgaaacatgattagtgaatttttgaagcacgaaagtagtgtcctggtacaggaagtacctctatgttggcgatcataggcttcttcgagcacctccctgtcatagcctagctcttcagctaatttaaaaagattaatattgttagtaaagcaaatatgatatgggctaaaaacacatggtatatacaagctagaggtgtaaaacgtgtcgactacctgtgtcccatgaagcgacggagtcagttttttccacaggagcatcaagcccaccaggttcctcctcaagttttggggcttcagagtataggtatgttttcattgtgacaggaaacaccacgttgcgcacaccatctactttctgatattggaatcccatgtagccgtttttggggatagatcttgtgctaagtgtgtaggcatcaatacgacaaatacctttggacttgatgaattgataggtttggatagaacagtgacgtgaaagcagtggtcctaaggtggctggatcaaatgcatgaggtgggaagcctgatatgtctatagtcactgcagtattccaatcgacagtcgtagctccatattggctagaccaagggagaagaagcatgctaaaattgtggccgctcagtatttctgccaaagcgacagtgtctctctcatggagcgtggcaaactggatcacgaaatctgaacgaaatcgcgtgatggctacagggacggcctggtttccaaattggctttcaatggcaaatcgaatttctgtaatggaaagggtagcactggctgggtcgggttgagttgcaactactgcattggcaaactgtgcctccaccgtctctgttgcgttggttggctcaatgagcgagaaatcctgaacagaacgtgcatcctacaagagcaccactgagtggacgcgctaatctatagctatgaaaagattttgtgaggggggacacaccatgtgtctttccggcaactgatctcgtcgttagtcgcttagaatgaaaggtatgactcagatctgatgaaacactttaagggtgaactggtcgtacaacaaaatcaaggaacatgagatgactcagatccgacggtagcaactctagccagcataaacctagcatccgccaggagagaaacaaagaaagcgaggaagggaagagaactcgagcacacgcacccaaggcaaccggcagaatggagggagaaacgaaaaaaggggtgtgaatggcttcttctttatctagggagcaagcggacgagggcaaccgacgttcggcgcttacagtgcgctatgttctagaaacaaacgctgccacacgggccccctccagaagcccccaccagacagcgacaggcttgacaccagcaacccaacggccactccactgcacgcccacccgcaagacccgcacaaagcggccttttggagacgaggctgccaccataggccagcgttcctcagccaaccggcactcgacaacgaccccagacgtccaatggctggacgacagcgacacccgccccgtacatacccctgaccaacagaagcaccaccgtccaccacaaatcggacggccaaaatctttttcgccaacgtggcctcgctctcctcccgttgtggccaacagattgcatatctttagatactccgtaggagtatggaatccgctcaaatcgtgcgcgatcgaggaaaaggaaaagcaaggaatataaccggaccgtgcgaacacacatatttgggctggcccagtgaaggcccgagccgaacaactaaacctgaacgctgaatatcccgaagccctagccgccatctctctctctctgcccatcgccgcagtgcgtgcgcgctgcaacacatcgctcaccaccacctgctcctccagcggcggctccccgggcgaacccgaatccccaaacaccatggcgggtggcaagatccagaagaagcgccacggcgcggcgggaggcgccggcggagggggcgcccggctgcagggcggtatcccgttcgagaagtccaaggggcagcacatcctgaagaacccggcgctggtggactccatcgtcgccaaggccgggctcaagcccaccgacaccgtcctcgagatcgggccgggtacaggaaacctcaccaagcgcctcctcgaggccggtgtcaaggccgtcgtcgccgtcgagctcgacccgcgtatggtgctcgaactcaaccggcggttccaggggcacccgctctcctcgcgccttaaggtaccgttttctctcagctcctagtactctggtttttgaataaattaattgtttcactgaagttcgctctgcgattgttgcttacaattttttttcaagattttttttttgttgtttccgattttggttaacttgatgtcttgtcgactgtaaatggagaaggtttgtaatgagctgaatggtgtggtggaactggaaaactcaggtttaaaatcttcacgttggaaagatttagattaatgagactttcctctctcccattgtgattcctgtgctttggtagcaatgttggtgaacagttataattttaggtccttagtttgcgggtactgatggtgaacaggttataattctaggaccttaatttgcggtaaactaagtggaagacatttggttcagtgtcaactgccgctaaagtgtagtacatgtagcttacaagatgcatcatagatagccttcatgagctaaagtgctgaactagtaaaatgctgaggatcttggtttcactgcctcatgttagagcttttacgagctgatgaacaagtaattgcatcaggattttctttcgagtgtaccattggtgtttgtggtacataaacatgaagagtctttgagttgggtttgtcagaaatgagtttttacttgttcatgaagatgctgtgatgtggttattgttggtgatttttttcaattggtgctattcatatcatcatgcatgagaaagcaaattgaattggtgtaaatcaaatcctgcaaatgaactatctatgatgcatcatgtcagctttcagttaggcttatttacgtgataatgaatggtttgcagacagttaattttatgaatcattcattggggataaagtaattacttttaagtgttatgaaaacgaaaactagcctggcacgatgccaaagtagatggcagtaatgtgaatcctctgttagggccagctggattgtgagtgcaaattgaacatgaagtcattatatgtatttcttcatcttgttttgctttcccttccataataatatggacacagaattgtaatacaataagttgtctcatgatgcaggttatccaaggagatgtcctcaaatgtgatctcccatacttcgatatttgtgtggcgaacatcccgtaccagatctcatctccccttactttcaagcttctgtcacaccgtccaatctttaggtgtgctgtgattatgtttcaacgtgaatttgccatgagacttgtggcacaaccaggagataccctctactgtcgtctctctgtgaatgtgcagctcctgtcgcgagtgtcgcatctcctaaaggttgggaagaacaactttaggcctccgcccaaagttgattcttcggttgtgcggatcgagcccaggaaaccgctccctcctgtcagcttcaaggagtgggatgggcttgtgaggatttgtttcaaccggaagaacaggaccctgggctccctcttcaaaacgaaacgtgttcttgaattgctagagaagaactacaagactatgcagtctctccaacttacacgagatgcagacatgggcgagcaaaagatgtctgcggacgacgtcgcgttgctggctaatatggttgaagatctgaacatggagactggggatgagaaggaagatgatgaaatggaaatggatgatgcagacatggctggagatggtgctgcaagctttaaagaaaagattatgggtattttgcagcagggcgattttgcagaaaagagaggttccaagctgagccaagttgatttcttatacctgctgtccctcttcaacaaagctggcatacatttctcgtgattggttctctaatgggccagctacccttgagaagtagtatatttctttttgtttttctgttgtgttattatgattgtattaagttactgaatcaagacctctaagcttgcggtcatagaaattttgataggctcatcctatctggttgagctgtaaggaaagaaattctacatgctgttgccttgcctgtgcaggatggtgacttttactagtaccggatttggcacagatgtcattccagcctattttcttacgacaatgcagtgatgcagatacaatccctctgttttcttaaaaggaacggaggaaggcgttaggtgataagtcgttaacgagacgacagttaacgctcagcggcagcacaattgcaccactattggccgactagcgccataccaacacggtgttaactcatgataaatgccaacgtgtctagctagtgcattcacgcccgccaaaaagagagatttctttgaactgagtacaacatttaatgccgaataagttttttttaatagaaaaagagtgaatcctaatgaaacgagacgagcaacttcaaacggagcgagagtcctgagatgcaaacacagtcaaatttgaagccaaactatgaacagccgaacaaaagaaatccaacaaggtacacatgtcggagctgttcataacaatgt

SEQ ID NO: 4436 - DNA, 3167 bp, Sorghum bicolor
ttggacaccacatgaacgaaaaaaaggaataaatccaatcttatgacgaccttttgtaacagcaatatcacgcagtgaactagcctatccctgacagaagtactctatgtcatgtatatacttatgtgatctccccacttatatcttgttgtgatgtatcaaactctgaattatctcttataattatatatccccgtctactatccaacacatatatttttaaagtccattcttcttaattttaacctatatttagaccgcactggcgcgcaagggcgcgccactcctactagtacactaacacacgtgtgttatgatatcacctagcaaatgcacgtgcgtcctacgggagtctcaaattttcaaaacaaaataatatgaaaaaatagtgggccaaaatcaagagactaagaaattttgattcagtttaactcaaaatttatttagaatgtaggggtcaaatcgtagggaaagaagcatagacacatgtacaatagtttcctaaatctctagactaaaatagtttcctaaagctctaagctcctagagaaatgttctttttctagggattttcataaaaaacgtaggacactcattctttcccattggaatttttcttagaagtcgttcccttcaaaaacagtagggggatgacttccctatcgtttttttagttttttcctaggattttaaacgctatgaagaccgtcaaattccagtagtaaaataccgttgggtctaattcgctctcgaactggcccattgttgtctaggtagccagctatggtctcaacgagaatacctaacgtcaatttactcatcaatctcactttagtcagggcagctgtcattctcatgttccaatgcgggatagttgtgttgtgttgtaggaattttctgagatgaatcttatccattatccataaaaataattctcatttggaagttgttacatcccttctcgcacaacatagtgggtctgtttggtacagctcacaatagctttatgagctgttgtgagctgtttttttttaccaaacatttatttccaaaatagcttcatgggtgaaactgttttttccctcctctcacaaagacataagttaggatgaagctgaaaaaagtagtttattgtagctttctctctcatttctctctctcaagaagtagttggtaaagctattttgccaaacactttttctaaaacaactcagtttcatctagaaagttactcataaagctattttctaaaaaaacagctttactagtgaagttgagctgtgacaaacaagctcagtatgttgatagagtatgtacttgaatttatagatagaaatattttcgaaaaaacatatttaaaaattaaataggacacggccacagccatgacagacggtcaaagactcaaagttacagaagttgcgtgtgcttggcgcgaaacaatttatcagatggtgtttagcaaaaataatataatactgtacttaataattaagtagaagaaccccagcccacccgcaacgctacctgcaatggcaacgcgcgccgccgccaccctcctcacgtcacggcctcaccccaaccccaccaccaggcaccagacctcccctcggcacacggcgtgtccttctccgtcgccgtcgtcatccattccacgcccggcgggccttaacctgcgtcgcgcccaccttaggccttgtttagttccaaaaaattttgcaaaacaggcactgtagtattttcgtttgtatttgacaaatattgtccaatcatgcactaactaggctcaaaagattcgtctcgtcaatttcgaccaaactgtgcaattggtttttattttcgtctatatttaatactccatatatgtgtctaaagattcgatgtgacggggaatgtgaaaaattttgcaaaattttctgggaagtaaacaaggccttaaccaaacgcaggcccggctattttaaaaaggcaaggctacgtactaatcacacgtccgctatagcccagactgaccagctgccgagcgcagctacctgagtacccgacccgacccttcaccttcagcagttcagccttcagctagcgaccgtcagagaagatggagtcgccgtcgccgtcgtcgctgagcgcgctgcggcacaggctgagggccaccgtgtgctgctgcttcggccagcagggcgccggcggcggcggcctgagcgagcggatgcggtggcgccgccgcgcgggcgtcggggagttccgctacgacccgctcagctacgcgctcaacttcgacgagggcgacctcgacgtcaacagcgacgacgaagaggacgaggacgaggatctgggagcccgcgcccgccgcggcgacggcctgctctaccacagcttctcgtcgcggctgtccacgcccgcggcggtcgtcgaggtcgcgtagacgtgtagcgcccggccctgctgggaccggaaggtccgatgaggaggccatggatacgtgtgtttgtttgctgcgattacgagttctctctgcgcgtgcagtccggatgctttgcgttcatcgatcagtttttggctcttgcagaattcacactagtagcatatgcgtcagatcagatcgatgaagaatcagtatagttgtgttagtagtctgatacatgtaaaaactttagcatacgtgcttgattcttgattgttatatactactatctgatttggagggttttcctacttgtttactagttattacgttgcaaaaagagtttcaccgaaaatgcccttatttcagttaatttgtttactttattttttgaggaaacaagagaggccgcagcacctacagagatgttattaaaaataagtaaccgagtttacaacacaaatagtactacaaagaaaggtatgtaaggacagagaacaacaacaaagggacttaggaaaagttttttaattttgtagatcgttttttaatttttgttttgagtgcagattcttcaacttctaagtgaagctagtgaaagtaattcgacgctgtatacaggtgtatttttctgtaaactttgtagttggtgtagacaaatttggcttaggctgtgatttttctaagagatgcatgcgtgctgagctaatcttcatcccctggtcccacaaaacgtacaatttcggcgagtgattgattttct

SEQ ID NO: 4437 - DNA, 3905 bp, Sorghum bicolor
cttttgttataatcatgttattggttcatgcctgttttgacttgcagagttggagaccaatcagacagttcaaggaggaactatcaactcaccagcttccctgggataatggactattctctgcaagacagttcaggcttttttgatgtgccatcagaaaaagaaactcgcacccacagtctgatgaatggtacaatcccatgtcaaaggttctagagtgcaaaccatgagacagcacagaaaaaacaactcaatgcatggcgaagaaattcatttacaaaccttatcatccccggcctgaatcctgataagccattgcaaatcagatccacacctggaatacgttaaagccacaacactgcagttagatggattcgatcagtattactcttctggaatctagaacacatacctgtaaaggccaaacagagacaacttattgatcgctgcaattgtagtaacacggccaaaatgatgtccatgtcaaaaggttttacagcagaaataaatggtagtagtccatactccacactccatatcatcagactttaacccacagaaagtaactgtaacatcactttagcaattccattcaaaccatacaaatttgtattcgagacaaaaacagctgaagggtgaaaagaatacagattccccaaaacaatccacagaatacacaactcaagcagattttgtagtgtaccatttgaagtttaaaagtcaagtaaaacagaacctatcctgtagcaaacacgatgggggcaaagcccaaggcagtaatttgttagtggaggctgtcgatttgtattgtatgcatgtgttgcccaagaaaggccgtactcgcccccacacataaggctccaaacaaggaatcaaagtggctccttgggcactgcataattttttgtttaagagaggtgagctctggtgccaaggctagagatttgagctttagtcataagttaaaaagttggcacaagggttgggaaacactagaaacagcatccacgttcgcctcacctccccacctcccctttcttccctccagaattgtttttgtgtgttttgttggctaactatgtacatgtcacattagcccaatctccaagagatgcaaaggatctatttggtaaaacttcaggccttggtgtgttccaatgtcaacacaattgaacttgcaaaatatttcaatcaacaacaagaattaacaagaatgagtaagattttaacttacaataatctgctctgcatggtaacttgtcatgattctgaaaattatgatatcatataaatttatatggtgattcggtaattgaccacttgtccaagttatcacattgggcaatagaaattcatgattgcggtcatgcaaaactgacacagttcatttgaaccagttttgaaaattgaagcagcacctgtcaactgtgaaattctccaaaaaaaaatgaattatctatttcaagattaacatggtgatactatcaatgaaatcaaacagacttttctatgacaagggaaagtgtgccaaaattatgtatgatctcagagcacctattactaatcttgataggatcaactccagcaaggaatcgtcctggcacaaactgatattgaaggccctccgaatgaaattacaaaatccgctaccctttttgaagtacagccccagcacttacaacagcaattacggaacatgtcctaaatttgattcataaagtaactacacatgcccatcactctgtcttaaagcaaggtgcattccacgatagtgccatagattaaggagtcaactgtcaaaagcccgagtgatgcaaatatatagccccctctcctggttgtctcattaatacttctaagaccaccacacaccccacctcccatccttcataagctctactgtgcgtctctctctctctcttctctctctctctctctctctctctctctctctcccccccccctcttcttcaaaactccccaccccatccaacctagaacacacacaacacaagaggcctttacagccgcatacatgatcatggtaaggactcttaaccttcttcatgcttaccagtgaattctcatatgaattcgccacttattgatgcaaaaaatgtatggaattgtgcaatatatcagcaggcaatgtggaagccagcatggttagaggcccttaacacacagaagttcttcgtagcatgctctctccatgagcacgccaagaagaacgagaagaacatctgctgccttgactgttgcaccagcatctgcccacactgtgtgggagcacaccgtgtacaccggctcctgcaggtgcggcgatacgtctaccatgatgttgtccggctggaggacctggagaagcttgttgattgctccagtgttcaggtatatcaattaagcatagtgcatgcatgtggtctggtattgttctgaggttcaagatgcaagaaggcttataattctgtatcaacgtggtgcagtcttataccattaacagctctaaggttgttttcctgaagaagagaccacagaataggcaattcaagggatcagggaatatctgcacctcctgcgacaggagccttcaagaaccgtatttccactgctctctggattgcaaggtaattaactcgaactaataagctatggttatcctatgtgactttatctatgtaactgaattatggtggctgagaaaataaaacagcataattcatgctaaaagagaggagcagaacaattataatctaaaaggtccttagcaagagcagtatttgaacttttttgtcatgcaatatccatgtcagtcagtttctaaaaggtccttagcaagacatgatatgaaaaatgtttgataatctgcatcattttcaggtagaatatatactacggcagaagaaaaatttgtcagcatacttgcgcccatgcaagacgttgcagcttggccctgacttcttcattcctcatgatgctgatgatgacacaactcactcaacccttgttgatgttgatgagcccatgggatcatcggactctgagaatttgagtgcgccatgcacaaattttgttcggaaaaaacggagtggaccatatatttgtgcacggtctgcaaacagagtgtctgatgaagacatggccacaaatatgagcagaaggaaaggggttcctcatagatcgcctttgtgctaaataaattcaataattaattatttttttccttctgtttacttctttcatgttctttatctcttggactaaactggtgcaatactgatagaattttgtctcaatacaaccatgtgattaaaatacaacactagaggcaattgtactcgaattcttcaagtaggtgcaccagtttatatatatgtacgctttaacatagttcatgttatccccttttccgaagttctttaagtatgctgttatttgctcagaaaaccaaatctgtccatagtttttagtaggtcattaactaagattaatatctagacatggtatccattatgtcattgttcttaatatttgacatgcgtaaaactacatccagtaataaacataaaaagattcgtatttaattatttatataagttcaatagctaagtcccagggtgtaattttgtatctaaacatggaatgagtttataatttttccccttttccagtcacaatctgaattttctggactaaatagaggggttctttgatgggtctaacatttcagtggcatgtaaaaacatataatggttaatatttttccatgtataattaaaaataaaatcagtaaatgcgaaacattttactatagcctcaagtctaccaaaaaaaccctgcaagcaagttcggaacattaccaactgttacacttgaaaagaaataagagaaaagaaccggtcaaa

SEQ ID NO: 4438 - DNA, 8977 bp, Sorghum bicolor
actctaagtccacattgttcgaggtaataaataactttagactctatgatagagtctgcattgtgagtgcccttatacatgtatgagcattaaatatagatgaaaacaaaaactaattgtataatttgtctgtaaatcatgaaaagaatcttttaaacctagttgctttatgattaaataatgtttatcaaataaaaacaaaagtactacagtattaaaatcaaacttttggatctaaacaaggtctaactctaaggccttgtttagttccgaaaattttttggattttggcactgtagtattttcatttttatttgacaaatattatccaatcatggactaactagactcaaaagattcatctcgtgatttacaggcaaactgtgcaattagtttttatttttatctatatctaatgcttcatacatgtgctttaagatttgatgtgacgaaaaatcttaaaaagtttttggttttcggggtgacctaaacaaggcctaagggctggagccagacaaaaggcacggccatgcacggccgctttgtgtcgccccgggaaaaaggattgggaaagaggtgagcggccgcacgccaccccagcccaaaccccatcctacaacggcctcgcccttttcgcacgtcagcgtctttgctttctttaatgccttttaatgaccacgctgtcgtggagtaacacaactgtcgagcagggcagcagggaggccacgcgtaggcgtagctgccaacaaccgcagctccaattctcaggatgacttctgaccttgctagtaaaacaagatccgactcgcgccggaacgaaacaaaaatgacggtgccgcgcttgtgttgtgccgtgctgtgtcattttgtgtgcgacggccaagctaaaactgaaaccgtaaggctgaggatgtcattgagcctcttgtttcccagtgaaaaatggtattgagtacgtactagacagcaaagttctgttcacatgaaacaagaaattaaggaaaatagatctggtgttcctgccgttgtgaactattttgaataatccgccttccgcatactatatttgcatttcaatgaacggtttgtaagggtttcttagcaaaactacttcactgttcaagtactatcttggcagacggtctcctctaacatcgacgagtaatgccatatattcttccctgtttttgtggttttttttttcaccacaatctttgccttttgtcctaacgtctaaccaacttatcatacgtagatctctatgctaccaaattcgccgacacctaatgccattgtactagcctggcttcactatggtcatatcttttggctccctctattctgttttaggtcatttatttatcgttccaccaccatacataggaaaagtaaaatatttatatatcgtcttgtcatgactttattatgatagtgtcattcttgtcttgctttggtatcatctatttgtcgacctcatccgctactcataaagtgaaatttatgttatcaatatcaggagctctaccttaaaaaaggttctatgtaaaactttttaaagtgtcttgtcacgccacatactatgacttaactgtaggtcggtaggttgttttatcatagcccctctatctacgtttcaacacagttggagatgtttatttttttttgtgaagtaatgcattgatctaacgactagaaaattttgtacgaggttgactaaaagactatatgttatcttttactttattatagttaagaagaaatatgaaaaaattcatgtgtctttcttgcgtagaataataatgagaacctgagaaacttttccttaaaaaacaaagaaaattttgaaaaactgtgacaaaatacgtgagaaatgaaaacccgataatacccttctcccctaccaactaccaacacgcagtcactcgcctctgcacacctcgctgatgctcgtcttccttcacatcctttataaggcccggccgcggctctgctcgcctctcctcccttcccataccgtaccactctccccgtttctctccggccggttcgtgggagggccgaagcttcgagaaaggaaaccctaacgctgttgggacttgggagtagcctccggcgatggctgcggcggcgatcctgccggagctggcgacgcaggtgctcatcccggtcgcggcggccgtgggcatcgcgttcgcggtggtgcagtgggtgctggtgtccaaggtgcggctcacccccgagcgccgtgcggacggcggagccgccaagagcgggcccagcgactacctcatcgaggaggaggaggggctcaacgaccacaacgtcgtcgtcaagtgcgccgagatccagaacgccatctctgaaggtgagaaaccgagcgctatctggctctgtgatttattgcacatactcgcgcgttttccctttactcttcgtttgaagttggtacgcggggggtttgctgggtgcttcgattattagccttgtttgagttggatgctgttggaaatgatcgaaaccttacgtgctttgcttattggcttaagcacgaccgcacgagttgatgctctggatttgattttcgaggaaaaggatcgtgggaaatcctttttattcttatatatataacatatatgtatatatatatatatttaaaatagattattctatttaacgatgatctcccaatcacctctgtgatggaacgaactttgatttttgtttacttgctatgtgacgagactgttggaggaaacaatcatttagtgcgcctttgtgttgtctacttgtcttgctcggtgatgtgagaacgtcgtgcgtacgcaagttgcgtagagttagacaggagacttttaatcaattgctagctttaatagagaaggagactgcttgttttgcagacgacaagtaaaggcgttactcttttcacggtccttttttttttggctgaagttaattgtagattcttttagggggtgggtgtagtagtgtgtgtggttgtggtggtgggggtgggggtggggggagggggtcatgtatggatggttgtaaacttgtaatattgcattaatgttccatgccagttggatgcagacaaggcattaaactatctgctgttgctactttacgcagcagatacagtaagcttagttaattaagccctaatccttggaggcacagctagtccatctagatatccttttggaggtatcttttgggaatgtgtgggcatggtcaaaactggtcgtaataatgtagtcgaattggtcagaagctgcctgtggggtaacggatgaagggataagttctagcagtctgagaagtccaggagtggggttgcagataagcacgtggtcctccctactcaatcttcagtgcagctgatattgactgtagtcggtccagacttcatcttgtaggaaccacatggtccacatcctgctggtttggtaatttcataatccattgaaatccttgcatgtgcacatgtgtgggggtactgatgcagatgaacaattgcacattggctcggcatgttactcttaaggcaaccgtggaaagaactgttgcatttttgtattgtgttccagtaacatttttgcattgagtttctcagtagaaagatagctaccacatatactctttctttttctgaattaaggataggatgatattccgtattcattgctgatgatatctgggagcaacaatcgtataggtcagtcaaatgtgaccttttctgtgaaggtgattgagtgtttggttttactgtttacacaacgagccagagacaggccatatagtttctgtagctattgcagcgaaacttactgagcgatttttttctctctaattactgaaatattttgacattcacgacttgctgcctattttgctaagagttcctttaaaagtttaaagtaagctgacttaatgtgggcatttttaaagctttgtggattagatttggttggttcccaatttcccattgcagcaccagttgcctgcgtcatgttgtagttgccagattagtcttgatggataagttttcattggacctcgtggttttcatttaaattagcactgaacaatttgctcttaagggagccatcagtctgtcactatttaccatttgtctgtagttctctgttccagttggtttgatgttgactcatgtcctgtgctgtctctgactgtgacaacattaaaagcaaaaaactgcctggtggcttgcaattggtctctctggaatcacaggaatcgctgcgttttttatggatggcagcctgatctaaatgggcttctctcctccattagggaggatctgtttttgtgggatttggctggggctcgaggaatttctcatcttctcgccctgcagccctccagttagaatgctaggtctccctggccttgggttgtttttcttggtaacaggcgatccagtgtgtgtatgtgtgagggggtataaaaccctttgtattagtgactaggtgctacacccttctttcttcttaatatattgatacgcagccctcctgcgtgtttgaggaaaaaaactggtagtagatatcactagaatcttattttggcttgttttttcaggatgcgtaacaaaggtacataaattgagcaacttacacgcagtctaaagtctacctaagatggatttgattgatcaaaaccatgcatgcaagtgaagagactgtgatgaaatttctgtgtgttaaaaatagggaaaattttgttgtatcttgataaatgataaccgcgtctttgtgacagaactttattgtataaaatgtatcttcctcatataggatcaaagagctgttcccatttgggtctattttatagtgggtgtagcaattctttcacgagtgaatatagtcatgcacatagaagtagagggtttgccattccatgatttttcgctccattgtatcactgacgtggtgaatgagtggcaatcctcaagcgccagaatggggtggcaaatcctcaaacttggtttattttagagttgtttgggattcaatagcatccacctcgatttttttgttacttcagagttgatgttgttctgtggcatgctttgctcatttcaattttttatttagcaagccttaatacactgtctgtaactactgaactcactttgccatccttttctttactctgttgtgaacaggagctacatctttccttttcactgagtacaagtatgttggattattcatgggcatctttgcaatccttatattcctcttccttgggtccgtcgagggattcagcacgaagagtcaaccttgccactatagcaagggcaaaacttgcaagcctgcccttgctaatgccatcttcagtactatagcttttgtgcttggtgccgtcacctcactggtttctggatttcttggaatgaagattgcaacttatgcgaatgcccggacaactttagaggccagaaagggtgttgggaaggcatttattactgccttccgatctggtgcagttatgggctttctgcttgctgccagtggtcttttggttctttacattgctatcaatttgtttggaatttattacggtgatgactgggaaggtctttttgaggctattactggttatggccttggtggttcttctatggctcttttcggccgcgttggtggtggtatttataccaaggctgctgatgttggtgctgaccttgtgggtaaggtagaaagaaacattcctgaggacgatccaagaaacccagctgtaagaattcattcacttgaattgtgaaaacttcctgttcttaagtcctatcttgctacactgcaattgcatagtgttcatacttactttcgttcatagcttatagctagcattctgcttggactggtgtctgcaccctggtgtaagaatgatctctcgatgtacttgcaggtcattgctgacaatgttggtgataatgttggagatattgctggaatgggatcagatctcttcggctcatatgctgaatcgtcatgtgctgctcttgttgtggcctcaatctcgtcttttggaatcaaccatgaatttactccgatggtgtacccccttcttgtcagctctgttggtattatagcatgtctcgtaacaacgctgtttgcaactgatttcttcgagataaaggctgtgagtgaaatagagcctgctctcaagaaacaacttataatatctactgttgtgatgaccattggcattgcgctcatcagttggcttggtcttccatacaccttcaccatttttaactttggagaacagaagacagtgcaaagctggtatgcaaaaaaattgattgtccattgaagtgtttagtataaagttcatattacaatctttctttgcgttaaatttaccaggcaactgttcttatgtgttgcagttgatcttttgtgctggctaattgttggttttgctactaagtaatttatattcaatctcattctagtttaaatttatcaggcaattattcttgtgtgtggcggttggtctctgggctggcctagtcattggatttgttaccgagtactacacaagcaatgcctacaggtatctagaaacttttcttgccagtcagtatgatggcagcatttcttgtttgcttccaatgtatgacatatttattgttttgtgttccagccctgtacaagatgttgctgattcctgcagaactggagctgccactaatgtcatttttgggcttgctttgggttacaaatcagtcattatcccaatttttgctattgcgtttagtatcttcctcagcttcagccttgctgccatgtatggtgttgctgtggctgctcttggaatgctgagtaccattgccacaggccttgccattgatgcctatggccctatcagtgataatgctggaggaatagctgaaatggctgggatgagccataggattcgtgagagaaccgatgctctagattctgcaggaaacaccactgctgcaattggaaaggtagacatgtgcttgtcttatcagagtttcatgtgattgcacagcgaactaaagatgtttcatttttcctgttttttccattggcaaatgccagttagggtccatacatagttgaaatcttgcatgtgctttcatttaaaagcttggacacccctagaaactttaatagtttctattcagatcattttataccaccttcaatgcaattggttttgctagaaaagttctctcatggttttgtatttgcagggctttgccattggctccgcagccttggtgtcccttgcactcttcggtgcctttgtaagccgggctgctatctccactgttgatgttctgactcctaaagtattcattgggcttattgtcggtgctatgctcccatactggttctcggcaatgaccatgaagagtgtaggcagtgctgcactcaaaatggtggaggaagtccgccggcagttcaacaccatccctgggctcatggagggcaccacaaagcctgactatgcaacttgtgtcaagatctcaacggatgcatccatcaaggagatgatccccccaggtgctcttgttatgctcacaccactgatcgttgggattttgtttggggttgagaccctctctggagtccttgctggtgcccttgtctctggtgttcaggttggtgggagttcctctcaaatttcagtatgatagttgcatctgagtttttccttagtccatttcaccattttcagattgccatttctgcatccaacactggtggtgcctgggacaatgccaagaagtacattgaggtaaagttacacgcagacttcactgggcctttttttccccctgcctgaacttgcataacaacttctctaaaaagctatttttgaagaaaaaaaatgccttttgtttataacactttgatctttggtttgcacaggctggagcttcagagcatgccaggacccttggcccaaaaggttctgaccctcacaaggcagctgtcattggtgacaccattggagatcctctcaaggacacgtctggcccctccctcaacatcctcatcaagcttatggcggttgaatcccttgtctttgcccccttcttcgccgcccatggtggcattctcttcaaatggctctaagccagcgagagtcgcaggataaaggccgtagttttgcaaggggagtagagcagtatgtcagctatacagcatatatggcatgtgctttgctccaccagttgatgagccccgttgtgtattttggttttcgttttcttgagtttttagttccagggtccgaccatgttttgatcccataaattctcctccggccttcgagcaactgagactatcttcgtaagtcatcagacccagccaatcactgaagcattggaaaactaaacagtttctagcgatatggtgatgattatgatgatgatgattaatctcagcattttttttcttcttgacagtaattaacatggtctttgcttgaaatttcgttctcttttcaacacgttatgcatgcaaaatggatgtgatgtttttttttgagctgttgtttcaaaacaatatgcaagtaaaaaaaggaagtgatgctgttccaaactgttgtttaaatgcgatagcaagagttagattttaacaaagtttggtttagtgacggctatctagagtaactttaagaaaatctttatatccttcttaatttataggaatatagtcttgatttataggaatatagattttaagaaactttttatatcctttctaataatttataggaatagaaattttagtctaatagccgtttaaattggatatctaaatatagacgttatctgttttgatttcttgctagataaagatgaagagagatagagatatagaaaagtgaaagcaacttttactcaaatgactttctaaattatgatttagacactaaattttttagaaagactcttcaaggt

SEQ ID NO: 4439 - DNA, 5771 bp, Sorghum bicolor
cgtctgtctaacgacaaaattcaacacgtcaccatcggtccaacatcagctgtcatgttctgtcctgctatgtgccgtgtaatctgcgatttcattcatgactaaggtcttgtttagatgtatttttttaagtttgatattgtagcactttcatttgtatttgataaatattatttaaccattaactaactaagtttaaaagattctctcgcaatttataagtaaactatgtaattagttattttttaactatatttaatacttcatgcatacatctaaagattcgatatgataaagaacttataaacttttgaaattttaggtatgtctaaataaggtctaagcagagatgttagaacaggtcaacgcatgcagccggagcttcaggcggcgaaactgacggaaccctcgatcgattgctcaaaaaataaaaaaaaaaaaccctttcacaagcaaagcaccagaataatacaaatcgacacctgggcccgtgatggggagcgtcgagcgtgcaaatcatttcgtgatcgctttgcgatagtatttgtgtctgtagcgcgcctaactaataaatggggccgacaagagagctcttttgtacgattgttaattattgctgattgctgatagtgatgcccaaggctggatttagtgtgggacacttgcttctttttgctgttcttttcattgccctttttgctttgcgtgggcaaaggcggattaacaagcaaaggcgatattaaaactcactatttacctatgttaggttttgtttgctctgcacgttatcatgagttaaaaatgtagatgtaataatgtgtaaaccgacacaattatgagttatattatcattcctgtatgaatactataagaatttagtttttttttgcgagacttagtaaagacacaaacatctatatatacgagcacatatttatttttatgagtgcacataccactataagtacatccgaagaattgaatgttcaacaaatctcgagcaaacatctcattgtcgacgagcgcgttgtctaccattgaaaaaaatagagccgttaaatctacgtaagggaaagcctaaattactcatctcaagtttagtatgtggctagataaccccataaactggcatttagctcgatttacttctcctaacgatatcaatcagcccaatttacaccttaacaagtttttgtctcctttgtttttccacatacaagttaaaaactcaacttgcacatagagaaataaaaaaatatagtttccaagatgtaaattagatcaactaaaataagttagtaaatcattttatagggttattctagacgtaggacaagcttagggagcaataattcaaacatttttttcctttatacataactacaccaagtacatcgagaagaaagaccaaagcacaaaccacttatcacgtgtgagaccgcgtacaagtcgctcatgaaaaattccaacgaggtgggctcgttgagacggtcaagaacatcaagctgttcacccaatccatcgacatcgacaactcacatgcattttgttacatatacgatcagtataatactactgtacacccccataacaatttgtacttatctcagctagccaagtcttccccggggatcctttttcttttggtcaaacgtaaacagctacaacgccccacgccaacagcagccaccattctaaactacccacccctctcttcgcgggacccacacgccagccagaggccagtgccagttcacccagcgtggcccgcacgtcagtggccgtcccggccgcgaaccccgtcacccgccgcgtgacgttaccccgccggttcagaaccgaccgttaccgcggtcggttcaaaaccagccaatcgcgcaacgccacgtggacggcggctcgggagcccgcgggtgagcggaccgcgcgccccggctggctacctgtatacctggcctggctttgcgtatgctagtggggaagtggtggtgcgctcagccagtcagccgacagacacacagcgcaaagcccccccacgagaagatccgccctctcctccggtcctccgcgttgctgtcacgccggcgtcgaggctcgagagaaggcggcggcggcgggtgagcgcgtggctgtggggtgtgtccgtccggtgagatagctgggggacgcgccggctcgtgctgtgacctggaagctctggaggcgctgaaagcggcctggcaggcgggcgatggggtgggggtggtcttcctgctgcaagcggtcggacgggtgagtggttgccggctacctgtgcccggcgatttgtttttttgtcttgcaattgaggtctggtgcgggtttggggttatgagtttgggttgtgctcgctcggtttggggggagaatcggagaaggccagaaggggtatggtcaaatggtagcaacttttttttcccctccttcttatttggtttgtgtcatgtgtgtcactgttgtaggctgggattttgggggagatgattgtgtgcttcacttcacctgtgttcactgcacagaaaaattggtctgtttgggtgggtgatgtcttcagtggcaattgataaccccaaaccgtctgagcttgatgtatatttctgtgggttcgttagtacgtactgtacttcggtgaatgataaatataaggagtaatcacatcttgtttggaccggatggaaggacaaagattgaatatctgaacttctgcgtcgttccaaatttcgctgtttatctgttttcactgcaaatagtagtcttgaattgcgggcagatcaaggctgaagaggccataaagttaactttaagttgtttgttcagaatgcgctgcaatttggggaggagttgggtgaagtgatgagttcacctttgggggctccattagtacctttcttttttgtaacattctgctagtaaactgctgccgtcacttcactgaaaagctgttggtttgttgtgttcttagggctgagcctggtaggaggaagaagaagaaggacacgacgtggcggatcttctcgctgaaggagcttcagtcagcaacaaacaatttcaattatgataacaagctcggcgagggtggttttggcagtgtctattggggccagctctgggatgggtcacaggtgcagtctttctcttgaacaactgaaataatctttgtgttctactgtgccgctgtgtgcaccactttttttttgctgtagtgttagcttctggtgacttttttttttaactaaagcaactggcattatttttgtacttttggtaagaacctcttgatgttgatgattgtatcttaactgattcaatctcatcttggagtactatttctagttctagcagtttatgaaatctaaaatggtagttttcagagctgtcctttgaatattcttttgaagatgatgtgatggacatccagattataccttagcttgaggccatgtcaaccacaaacttgtgggtcacattagagcattgttaatcttttactactacgatgacatgatcatataactagagagccaaatttttaggtgtgaacacacttgatagggggaaaggcaagttaaggatcagccaatcacagagtcctggcaaattgaaccacttcagctatttgtgttttactctatggtaaacctatgctcgtataagtttgcattgttcatgctatacctatatatattgtggccagataaaaagtagggttcttgacacatgggcatgctatgttgcaacaatctgcctttttttataagcaacaatctgcctaaatgggtgtatcataaggtaaatatttttcttttctgtgggattttgagctaagtgctcctcgcgggctcattgatatgcttttgctgcacactttgagtgttccaataccagtttcttaagggatcccgtatgtttcatatattctttactccatgaatgggatttcatatcctctggaacttaccgcttcactctttaatgatacaaacagattgccgtgaagaggctcaagagttggagcaacaaagctgaaagagaatttgctgtcgaagtggagattttggcacgagtgaggcacaagagccttttaagcttgcgcggatattgtgctgaaggccaggaacgcttgatagtctatgattatatgccaaacctgagcatacactctcaacttcatggacagcacgcagcagagtgcaatctcagttgggaaagaagaatgaagattgctgttgattctgcagaagggatcgcgtaagccacataacatcattgttcatgtttatcctcacagcatcaaccaaacttcagcaatcttattatttaaaattttttcatcttgtagttatctgcatcactatgcgacaccgcatatcattcatagagacgtcaaggcgagcaatgttctcctggattcaaatttccaagctcgggttgccgactttgggtttgccaagctaattccagatggtgcaacgcatgtcaccacaaaggtgaaaggcacacttggttatctcgcaccagagtatgcaatgcttgggaaggcctctgaaagttgcgatgtcttcagttttggaattatgctcctagagcttgccagcgggaagaagccagttgagaagcttaaccccaccacgaagaaaaccataactgagtgggctcttcctctagtccgtgacaaaaagttcaaggaaattgctgatccaaagctcaaggatagcttcgtcgaggatgagctgaagcgaatggtgcttgttgggatcgcctgttctcaagacaagcctgaacagagacccataatgtctgaagtcgttgagctgctcaaaggagaatctactgagaagctttccaacctggagaacgatgatctgttcaagcctgatagctcattccagagctcatccggacctgatagctcagactgcgtcaccgaggagaggagtcccaaagctgatgcgatagaggaggcagttgattcaagtgagacagttccctcagcaaggtagcgtgatgcatagtggtgttgtctgtaggtgccctgagctccttgcctgggagaaatgtgtttatcagtgtgcttaatttgggagcttccttgcccagttctcctatgtgctgtcatctcttcgtgttggcatggtactattagcttgtaaaattctgtaaatctgggcctgattccatctgtagcactgctgttagcgtttagctacttaaatccatcaatgatttgtgtgcaagtcccataatgttatttttttgggtcttcatcatgtataattatcactactttcgtacgaatttttattgttaagcgcttctatcgcaaattgctgtcacaaaaaatgcaagattgatttcttcaggcacgagcactgcaatgaagaagtatggaaacaaaacagtcctcagggatattagccggctcctgctgaaatgaccactcgtcaatcatgctgaaatgacccacctttccctttcccaggaaaggatcagaagctggaagaaagcagcagctaacaagaccggctgggccacacctgacatatctgcatacaggttgatgtggtccaccacagacctgaaataatttttagcggaaatggtgtgacgcagaagtagaaggtgcacttccggtagttactatgctaatacaactaaaatgccagtcaaattcagtatgagaaaacagcaacatggcaaagaaacagttcgaatgaagtaaaaaaaaaacagcataaattagcacattcacctag

SEQ ID NO: 4440 - DNA, 2935 bp, Sorghum bicolor
gcggtggtggctgccaaggggtacaatgtgcagatcctggtggacgagaacgagggggaggagtccatcttccgccggttccggcgggaggtgatgcgcgccggcgtgctgcaggagatcaagcgccgccggaggtacgagagtaagacggacgagaagaagcgcaaggcgcgcgaggccggacgccgcaaccgccgcaggtatgagatgaacatggctgcgctctggctcgcttttcctgatgctatagcgtatagcctatatagaccaatcgagctagtcgtccatggattggataggagagtacggattccttcaggatgatgtgagcactgtgcagtgcccctgtgctttcttgtcgttggtggtggaagtggaaccagctattcttgaaatcaatatccctgccactgccatcagttacgtttttggcacgctttagaaccttcaatgttcacacatgctttggaatgcagacatgcagttgcgattgaaactgggactcacaatttgattttgatgtagttgatagtatgaattatggaaaggttttcgatcgggcgtttgccgatttcacaaaagtttgttgcatgccttgagcccttgacagtgtttcatgggcaagtaaaaactacaaaatttctttagtatttcgctgcaccagtaaatgcaagaacttgacttgaaagtcttgttggctatttgcacgaaatagagtcgggctgttttccttccttgtttgtagtacactggtgcagtcatgtttgcagcaaatagagagaaagttgtttcctgcctggttggtagtactaatgcagtcatatgtgcacaaaacagagctatttcctgccttgttggtgcttggtaatactgatgcagtcatttgcggtaacacatgttcttaattattagttttgttggtgtcgtatggtggatgagtcatgagtggatgttgattggatttcagtattgataacgaatagtttttcttagggaaatgaattgatagtttaatttgagccacaccacacatgaaagttgagcttgaatgatcttcctaaccttgcaaatttttttttttcgaaaacgtgccgaaggctcgtatttctttaaggagaaaaaggttcaaaacactcctgaggtaaccgtgagcgagatgcaccgggttacaacaggtcacacgaacacaaatcaccggcttaacggtgcagctgtaggagaaaactaagcacaaactagttggcgctacagaagaagaacgcgagaagtccgctacgcgagcaccgcgaacggcggcgtgagcttgctgtagccggccgagatgcaggcctcggcctcgctccgaattcgaagcagcacctgggagcatttagctcctccatcaaaagtccaatctaacttgcatactttttgtgccgaaaaccttgcaggcgtatgatggatgagccaaggttcccagaagaagacgctgacgcaacctcaaaggctcgggacgaggacgatgacaactgggagatcgatggcatcctgtgaaacaaaaacaacgcaatgtccataagctcacaacgtccagatgcacagacccggcaaatttgagttctttttggccccagtacgtaagacgcaaaccgtatgagcgtgttcaattccacctcaattgttacaaacagttgcaatgtacaactaaattttagcaaatgcagcatcctccgattcctttcagtttcattccctgagctcttgtgccgagtgtgtgtttgaaatcctactcttgtgtccgttccaggcttccagcatccttgtttagcttgtgttcatgaaagttcagaatctgatgaagataacagtatctctgcaaatggacaacctggaatgtactgcttgattcgcgccaggttcactgtctgtcccaaaaatagcacagtgctaactatagtaacgtctgggcaggcggttcggttggttgctcgcgagaggcgcctccgtgacacccggtcgccatgcaaccgcggaggccgcgcgcagccactccattgccgccttttagagcacccccggctgcaccaccgtcgcctcgccaaagtccgcaagggacctccgtgtgcttgcgattgcaccggcgtctactgcgaccttgcgaaaaagctttccgtgtgagcgtgtctgcctgtctgacatcgtcgatctccatgacgacgacgaccccgcgcgtgtggctgctcgccatggcgctggcgctcgcctgcgtgctgctcgtcaggtccgccgacgccgccgagtacgggtgcaacccggccacggacaagacgtgcaagcccgagggcatgggggtggtgctgccgggcggcggcattgacctcgacggcgacggcgacgaggacgagctgccgcagttcgaaccccacctcacgatcctcggccatgcccgagagtagttggtcgatcgtccgcgttacgtgtctcagccgatctactggacgacatgatgtactgtcacatttgccttgtaatttctgttgttaatttgagggcgagagtaattaaatgagcatatgatggtaatttattcaatgtgtattatttgttcaaacttgaaagtgcactgaccactacgggaaacagcaacgctaccgagggtcatttattttgccgagggccggatttcggacactcggcaaatgatatttttgccgagggccagtcctcggcaaagaacgaccttcggcaaaggcttcttcgccgagggccaggccctcggcagataaaagccctcggtcaaggcccatctttgccgagggccggccctcggcaaagaaggggcgctcggcggtgtgggtccagagtaacggcggctctgggcgttaggcattgccgagcgcccgtagttaagccctcggcaaagctctgccggaggtcatgctttgccgagggcccg

SEQ ID NO: 4441 - DNA, 5429 bp, Sorghum bicolor
cgcgctgtgcctcctccagacgacccgcacgcggcaggagggcctggaagcgattggagtactcctccacggtacccgtacgccggcactcggcgagctcgaacaacggagccgaacggaggggaggcccgaaccggaggttcaggaggtccttgaagcgcccccatggtggcgtgccctcatcttcttgcagctggatgtaccagagctgggcgacgtcctccaggttgtacgaggccatccaaactcgctcctccgccatggtacgctgctggcgaaaatatgattcgcatttgttgatgaagagcagcggatcggtcttaccatcataacggggaaaatccaatttctggaatttcggagggcgatcaagatcgcggccgcccatgctgctgtccgttgatgacgacgccttgtccttcatggccgccatgtcggacttcatcgttgtcatctccgaattgagggccttcaacatctccatcacatcggccatggtcggctcactcatggtggctggatgcggcgcggacgcggtggatgctgctggtgatggcgggctgttgtggtggtgggcggcggctgtggtggattggacggagcgggtgggcgaggattgccgggaacgggaacgcctggaggctgataccaggttgtcaagggcagcaaacccctgactggctggaccgcggctacggagctcgtagccgtcggccgtcttctccggtgaggttatacccctctaccgtaggcttacagagaatagagagagactagggataacttcattgcttgattaatcatgacctctagtacagtttatataggcccgtggcctgccacacttggtaacaagaaaataggaaataactaattaggaatgaatcccctagacttaaggccaatcaatcagccaatcaatcatctaatcaaatcagccactttccctagccgcaccttcctcctgatctcctgcgcctgctgcctcagcacgtgctgcagcccgcctgacatcacgggcccttcgctgacgtgcgtaagtgcggccccacatgacaccatcccagctgcagtctcagcgtaggccgtgaggtgttttggtttatgtgtaatctcgttgtcgttcagtgtaatactgcaactagtagatgttaaactttctgggtctgaacagtgtgtagaaacagcataaacctgttatcggcgaataaaaaactcttatgaatatttgcagggtcggcaacttcttagtgtgtttgtgtaaagtatggagaatcagaagaaaatttagttgcgaagtttagtttggtgcgtatgaagccttgttgcggcttacctgaagttgagctcatgatgtgtaacaggaatgatgcacttgttttcatacttaatgggtaatgcctacgaggaaattggttgcgtcataactcataagccgtgtttgcggtgaataaccgaaagtttggatggttgagcatgggataatttgtacaattttgtgggcgggcatgaagaacaaatattctcagtggtatgagtattgtttaagtcgagtacataactgagcacacaaaatgtacagatggtccctgatgaatgtttttgtgttcaataagcctgttagttccagatgagaagatctaatggatgttattcccaaagcaacgggagtatatgcatatattcccaaaggaactgaataatcacctccactgattgatttttctcttgattgacaacgttgtggtagcttaaaaatacgtacttggtggagtaactttagacctcctttgcattcttgccaatttttttgctagtgaagtttgttccagtcaagcaaaacctgggccaaaatttagctgggctattttgggtacaaaccagcccaaaaaaatcacagatcggagtgacggaaagcccacggcccaatattttcgcaaaccctcgccgtttaaaacctgacctgcagcagcagccgctccaaaacgcaacggtcaatccaatcccctcaaattcgaattgcagccggtgcgacacccacacccacctcacatggcggcggcggcggcggcggcgactgcgaaggcggcggaagagatggtggaggtgctcgacgaggagacgctggcgctgatgggggtcagcagcgccgccaccgcggcgccggtggcggtgggcgccgagtgggagacgttcaaggagaacgtgcggccgctcaagcgcgggcgcgacgtgtccaaactcaaccacgcgctcaaggcacacgccgatcccgcgcagcgcgccgctctcctcgagacccgcaagtgcgttggttttgtttggtctgaatttcttgatctggggcctgggtctctggaggagacaagttgctgcagtaatgcaaattgtcatgtgtgttcatcgttcggttgatttgcctgatccaggaagatgattgaggcaatcgaccagtaccaaggcgaggatccgctccaaccgtggctggagtaagcgtttctcaaagcccctttcactcgcctctttcgatctctttgttcgtggtagctgctctagcgccgaaatattgataatttcttctctgtttcgtccgcgtgcagctgcatcaaatgggtccaggagtcattcccgactggcggcgagtgctcggggttggtggtgttgtacgagcagtgcgtgcggaccttttggcacgacgggcgctacaaggacgacctccgcttcctcaaagtgtggctggaatacgtgagtcgtgcgatgccagcttgattgattttttctttagttttcttctgtgcagtgaaggaatctcacatattattccgctgctgatcttgttctgtttgcaggctgggaattgtgcagatgctgaggtgatttacaggttcctggaggccaaccagattgggcagggccatgccatctactacatggcttacgcatcgttgatggagtcaaagaacaagttgaggaaagctaaggagatctttgaccttggtatagctaggtgagatttccacgaggccaacacttgtttgttcatataaagctcttaaatttgaaattgctccgtagatcatgctggtgtactatctattccatctaaaaattttgccctataatgacatggggtgggtacatatccttgggaaaaacatatttctcctgtgtttgattttcgtacagaacaagagtcaaggatagaacaaacaatgaggctgatgttatattaacttgaatcaggcactcatgaggatgtctagcagggtacttagttctccatgatcacttctaatttgatacatgctcacgaattagaaactaatagttcctgttagtttctagttagcaaacgtaaaatgctaaagctttcttggagtcttcgagttcctattctttaagatatgacactcctttgactagttatgccactatcttcttgtgaatgataacaacactcggaattgttttacttatcatggtttgtgcttacctctttggttatggtttgttgtagattaattcatgtgaatgaatgaagtttcttatattcggtttttcttgtcagaaaagcgaagcctctggagaagttggaagctgtatacaggacatttcttcgaagatcaaccaaaagaagggaacaggaggtttgccatttaaatgatagcagtgtttatcttggaacgaataatctccgttgaatgaatcctttctttttttctatagccggataatacagcagatgatgatctgccaaatcgcagtttcgggactaacttgaaacgagatgaaaacagtaagcttgttccgttttactctgatttagcatgaacttcaagtggttgcaacttgcaacctaatacatatgcaaacgtggcaggaaatcaccaagcagggaactccggcctggggagaccaagggcactgcagaggtcagtacaactatgatgcaacagatgtaaagtatccatctacacctggagttttttctcgtaatgtcactgattatgtctttgcacacttgcagaatcgatcccaacaggccactttcaatttacaaagatgagaggccattactaaatcagggccttgacggagtgaggaacagagaaaataacacaagctggcgcaccctcccaacacaagcagatcgaaacaaggagaatagcatgatgcctgctaaatggacatctcacaaggtacttttgccaggccactaggattctttgaactgacccatgtgaggcttgtatcgaggacaactattgagtaatgaacttgtggtaacatcgcactgctgtacagattccacaaaagttaggagcaagaggagcagttcagtccacccgaaccagttccattgaggtcttcgtggaggaagacactgcacagtatgttatttaacatcctagtgttacagttttttgaaggattgttcaaagttactacaaacatatatttctaaataattatctcctttctattgctatagggaacctgctcagccggtgccgaagaccccaaatccttctgttctgaagcttagacaagcaacaagcaaaagccttaagaagtaagtatagccttgcaacttcagtttttatggaaactattttcagcagttcccctaacctgtgctcttttctttgaaacagggaaactgaattgcttaaggagaaccccttgcgcaacttccccctgagcagccttagatagtcagcattttgctggttctgagaagcattctcgttactgatttggttgtatgattgttgtgaggttgtgcctttatgcccaataagctttagcctctaaagctttgacaagcaacatgtgcgcgcccacgggctttatgcaagtgttgtaatcttattattgatagacctgcagatctcgcaggcttatgtgaatctaatagctacacaaaataatctgcttctacaaattccggttggtcctttctgcttgtttttaatgaatacctctggactaagcccgtgtgtatttgtctttctatatatatattttttgattaatttttctcaaaataaaaaaactagtaaagcacttgtttctccaaataattttgcaataaagctacggacaaaacgtgattgaaaactgacatgcaagtggatgcatggcacattgttgggccaggtacttctgtcaggactacaacttgcaaatttttttggtagacacatcaatcaaacataaacacaaaactctcatggccaccccaaacaacagctccagatcattgccataagaggagagatgagacgagtgcagatcttgagaaattcaggtgtcccttacatataacaaaacacaaacacgcctggatctgtaagactttcaggtgtttttgctcttaagatatatattgctactgtattctgcattttgcggaattaactatgcgc

SEQ ID NO: 4442 - DNA, 7856 bp, Sorghum bicolor
ttcaattatggactaactaggatcaaaagattcatctcgcgattttacagtaaaactgtgcaattagtttttattttcgtctatatttaatgcttcatgtatgtgccgaaagattcgatgtgatagagaatcttgaaaacattttggtttttggggtgaactaaacaaggcctaaaatcgcaagtttagctcattgtaatttatgtcaacatatatgcaatttcggttccaagaataaaaaccccttagacaaaatcataaacctgacaaaatgttatctatatattggcacaaagactattaacaaattataattgtttatatatatatatattgacaaaattttgataagtaatgatacaaagacaaataacaaatcattgaccgtcaagcacctaaaagtgttacctgaaatcaccttaaaaatcaagcacctaaaatatgatcttccaggaaaatatccaagtcaaactgctgattttcaagaggtgcacttaacacaaaagatcaaatgtgcacttaaaactaaaggaccctcaaatgtcgtttttttttcctaagaaaaagaaccctacaacgatctttttctatgaaagtgtggtgccgtctcgctttctaggtggcaaagtgtggcctagctaccaaattcaaatcattgacctgtagattattcaatcaacctttctaaacaatcaggatcatgtgtcacaacaatctacctcaggagagccaaaaaccgatgtccctttctttcctggggagtcgacatgaagaagcacgcgttgcatcacgttttctggctcgtactttgtaccattcctcattgtacacagtattttagtttgtaactatagcccatctctgtctcttaagcatctttttcattcatctgaaatcccatattatggtcgattgaaagggacgtcccttcatgcttagctcaaaagtcgtatgtacttgtgttcttttgtacccattttgagctttgttgaaacataaaacagccttccatccatgtaaaaagaaaaggaccctttcactagaaagacgaaacaaaattgtcgtctcagatataattttctcccaccatttccaatatctcaaatccaacgcaaaatggccataatataattcaaactgcttgttagaaaacacttatagttatagctatatactccccccattcactaaacaatgcaactataccaaactagtttaattttgattgagtttatagtaaataattttaacatttatttcaccaactaaatttattagaaaatgaattgtatgatcaacttattcatacttattttgcatcataaagattaatatatttttatactattctagtcaaattttacatcgttcgactttttgaaaagcgggtggacagagggagtatttacaaatttgtttatgaaacttcgatttcttttaactccccaaaatagcaaaaacttgaaattttaatccaaaaggcatctgaaagatattaatggggccatatgtgtatgtgtccggcaggcggcgtctggaatggtggtggcaccggactcctcaaccccccgtataaattcggctcgcccctcaccaaccgagaccgacgacgaccagcccccattcctcccccaacttttcaggctcccctcctccctcgccgcggaacacgcgcccccgtcctcgcccgcctgcctgcccgtgttcatctctccattccttggtaagcaagtctaggcctgatttttcgtttttattcgctgtgattgggatctcttctccatcgcgagccttcgaactcaatcccatcttcgtctccaatctgtgtcgcggattcgctcgctgcgtggtggggggcggagcagtaattatccgtttgcttcccctagtttcctcggggggtttctgttaaattcggctgcgctggtgacctgatgagatcgtctgttggtttggttgctgtgtctgcgcaggtgcggtcgtagccgagcgctccggccatggcgttcttccggggcctcaccgcggtctcgagactgcgatcccgcatggtgagtggtgtccgtttagcggtggcgcttttgtgtgtcgtgccgtttcaccgattgtgggcttggtgctgagattttttgtttcccgtgctgttgctgttgttgttggcaggcgcaggaggccaccacgctgggtggtgtgagatggctgcagatgcagagcgcgtccgatctcgtaagacagttcgtcttcctgttctaccttgtggtagagttttgtgtactctggatgggatgctgatcgtgtttctgcaaatgcaggatcttaagtcccagatgcaggaattgattccggaacaacaggtttgctgcttttagaccatctgtaaatgttgtaaagtcgaaaagttcctggggtatctgatgccttatcttctgttcctttagccaatactagcaaatagtgtcaatcccttttcgtttagctcacgtatttctgtatccgatatattttcatcaattcatctcaacatgcggtggaacatgaaagcaattgcttgtctgaaagtagcatctactggtacatcaattctcttccctcttctgtcagaggcaattagtctgcacacattcgttttgcacctagcagtaattgccaaatttataagtctaagagaatcaaattcacacctggtttatttcaccacttgtcttcgtgaaatatggacacctgttcatctggccttgctgttctcagatgttagtctgtctggttacaggatcgctttaaagaagcttaagtcagagcatggaaaggtccagcttggaaacataactgtggatatggtatgatatactacgtatcaattgtctatggatagttctgttgctttttctagagtatatattaactcatcatgtgaaattcctgaataatgttcctacaggtccttggtggaatgagagggatgactggaatgctttgggaaacatccctgcttgacccagaggaggtaatcttgcatgcattctcttcatgatgctatgctagcgtagtgtacagttagctcatgcccattctatgtcaaaatatgtacacagttccaaattgaattaaatattacaaaagatctatagaaggtacatggaaatttttctaagaacttactatagcacacgagttcgccgtaattgaagattataattgtttataaggcattttcttttagcatgatagctgcatttcttgtttcgttattggggttgattttgagcttgtcaaacctgaatggcttggatgcacatcactcatcatctttgttgttggatgtaataaatctagtttcgacattaacatatttatgaacttcaaagtgaagcaatgaatcacaacattcatgcactaataaccacttcttttctatccagggtattcgttttaggggcctctcaattccagagtgccagaaagtgctgccaaccgcagttaagggtggtgaacctttgcctgagggtctcctttggcttcttttgacggggaaggtatatgcctgtggcctgcctatatatcatttaattttgatttacaaatgtgccaaaggtgttccgtaaaactaggaaatatttattgttgattaagaatggggacatatttcttgcttatctttgtattgccattcctttaatatatttcagttttctccaattctcaccctatttctataagttttaagcctgtgggttttttcttgtttcaggtcccaaccaaagagcaagttgatgctctatcaaaggaattgcttgcgcgctcaactgtcccaggtattttgagcacactgctggatacttgtgttactgttttgaccaattaaatctacaaatcatctgactcaattgattctaatgtctccctaatccctattctaaaattcaacgatagcatacattagtagagaggtctatatgtttctgttagtacgattgttttaagtttatatgctctatcttgccactttgctctctaatagcttataattaatatgtttgcagctcatgtctataaggcaatagatgctctcccagtaactgcacatcctatgacacagtttaccacgggggtaatggctcttcaggtgagtccttccacttctggcatgctgtcttttctaagtataatatcacaattgtgaaattaaatcacatttccttgcaatttccttgcattttttagaactggatgccagtggtatttaaatcaatttcccattgtgttttgaatgctgtttttaaattctaaagccttgaaagtgacttagttttccatttttaaaccccatttcaggttgagagcgaatttcaaaaagcatacgacaatggattgccaaaatcaaagtaaacttgggatttatacagccacccattttctatgtgttcaatggttgctctccatggtgttcacaattattgtttgtataggttttgggagcctacttatgaagactgcttaaatttgattgctcggcttccaccagtggcttcttatgtttaccgcaggtagcttttgttcagaaatgcttcaatttttaatacgcttactggaggtgacaccagtcaaatttcgtgaagttaaagttgtgtgcaaattttatagttagtgaataacattgtttcatttgttctttgaagaattttcaagggtggaaaatcaatagaagctgataattctctggattatgcggcaaatttctcacacatgcttggttttgacgaccccaaaatgctggagctgatgcggctctatgtaacaattcacacgtaattttgcatccatccttgtttgtaattttgttatgtttcagaagtacttgttttcatactatgacttgtgttcttctagtgatcatgaaggtgggaatgtcagtgctcatactggtcatctggtaatatttgttcttttgttgtgatcttgatttttttttcattagtgtttttcttaacatgccaagataatgacagctgtcagtgtgataccttatcttgtaccatcatggcactttgcttttggtttggtgcaatgtgattattaagcatcgtgtgatactgtagtatgtactgttaaaacaaactgaattgatctggaaatacctctttaaacagtgcatgatagcacttattgggaactggaacctggaacaggataagagggttagttttagctggtactttgctaatttaatcatgatttgtcaggattcaattgtattccttgctccatgtttgttgtattccatagtagtgagtttaaaattttggttctaacagtagtgggatctgttgttacactctatcagtttccccctgtgtgggctattgtagatcaggagctccatgtgatgtaggatcataatgtgtgtcacctttggaagagggtcggggatcattgtagtttttttttccccatttccattaactaggacggaaatacaaaagattcatacagagtgattagaaactacaagaaggaagaaccagacatctaagagatagcatactaaggctaccaccagcatttccactgcctgcacactaacagagatcaacgccacccatggatcattgtagttgtagaagtatatttattgtgtgctcttaattcacagtttcatctaggttggagtagagctgttcgacactggccattttaatcctataattgcttgcaacctgctagctgctggtgttttttttgccatgtcctaggctttaactttatcttctgtctcatggtggtcattcacatgcaggttgggagtgctctgtcagatccttatctttctttcgcagcagctctgaatgggttagctgggccgctgcatggccttgcaaatcaggtatgctcagtttgacatactagatctgatctggtacttaatctccgccttgtgctttgttttacttgtggattttgaaaaaaaaggtttccatgaaaaaattcccacccctggccccacttgcacccattttactcctttcgcccaaaagagtacatgtctcgtttttttgaggagtcaaactttttaagtttgaccaaacatatataaaaaaactaatagtatttgggatgtgtaataagtatcattagattaatcatagaatatattttcataagaaacttatttgaagaagcaagatgtgcattgttttggggatggagggagtactattttttacttggtcactcacttgatatgtaatgcacctcatctctgaaagaagaattacattttcctgccacttgtatttctatatacttgctgttgtggtgtgtatgaacttaccataaattgcaggaagtgcttctatggatcaaatctgtaattgaggaaactgggagtgatgttacaacagatcaactcaaagactatgtctggaagacactaaagagtggaaaggtatatcagttcactgaggtctagtgtttgtgagcatgcttgaacgcagttctgtttcgcataggaaggctatatcaattcactgagatttgaatgatgtgcagcaggtctgatagagttgactgtttatgaaagtgctctctctgatggtctgtgtgcactgttgcttacattcaatcacaggtcgttcctgggtttggtcatggagttctgcgtaagacggacccacggtattcatgtcaaagggagtttgccctgaagcatttgcccgaggatccacttttccaattggtcggtctggaacctttttatctaattgcatttactttcttgagttgaatgattttaagtgtaatgttcggttacaggtgtccaagttgtatgaagttgtacctccgatcctcactgagctgggcaaggtaatgtagtgccagattgtgatcccacttttttggtttcagcttactggttatgaacaccattcttgcctgtgttttctcaggtcaagaacccctggccgaatgttgatgctcacagtggagttttgctgaaccactttggactatctgaagcacggtatatttatgcttgtcatttagataccaatttattttatttttatttttattttacttagcatacctagttctgattgagcactcatgtctggaacactatctgtgcaggtattacactgtcttgttcggtgtttcgagaagcatggggataggatctcaggtctgccttcttccttctctttatatagtttcgtattagtaattctgccgactaattttgtttgattatttatgatgcagctcatctgggaccgtgcccttggcctgccacttgagaggccgaagagtgtcaccatggagtggctggagaactactgcaagaacaaggctgcttgaagctgttcacaaatgctgctttttcccaacgtacgctgttaataattaaacaggagttatagaagtagtcattttccttttggccgttgaatgaataacgcaagagcaagatgctctcaggcggtagaattttgtatcttccgtcacttggtggacatccagatagttgatccgcggcaaaactggcagaagagatcaggacctgctgattaatctttatatgccgacacttgagttttttgaacgttttgttcggcagagttaaatgatagttactgcaaatttgggttatggcatgtatgccggttatctctgaagttctgttttaagttgatccgcgacacggctggattgctgatagtcgttttgtgtgcctgatcttttccccgtttcctgtgtttggttgggttgactagcaagaaagggaggaggggttccgttgggcagaagttggtttttccagcgtcacgagatacctagaaattgccacttggtaaagc

SEQ ID NO: 4443 - DNA, 5094 bp, Sorghum bicolor
ggcgaggacgggggcgcgtgttccgcggcgagggaggaggggagcctgaaaagttgggggaggaatgggggctggtcgtcgtcggtctcggttggtgaggggcgagccgaatttatacggggggttgaggagtccggtgccaccaccattccagacgccgcctgccggacacatacacatatggccccattaatatctttcagatgccttttggattaaaatttcaagtttttgctattttggggagttaaaagaaatcgaagtttcataaacaaatttgtaaatactccctctgtccacccgcttttcaaaaagtcgaacgatgtaaaatttgactagaatagtataaaaatatattaatctttatgatgcaaaataagtatgaataagttgatcatacaattcattttctaataaatttagttggtgaaataaatgttaaaattatttactataaactcaatcaaaattaaactagtttggtatagttgcattgtttagtgaatggggggagtatatagctataactataagtgttttctaacaagcagtttgaattatattatggccattttgcgttggatttgagatattggaaatggtgggagaaaattatatctgagacgacaattttgtttcgtctttctagtgaaagggtccttttctttttacatggatggaaggctgttttatgtttcaacaaagctcaaaatgggtacaaaagaacacaagtacatacgacttttgagctaagcatgaagggacgtccctttcaatcgaccataatatgggatttcagatgaatgaaaaagatgcttaagagacagagatgggctatagttacaaactaaaatactgtgtacaatgaggaatggtacaaagtacgagccagaaaacgtgatgcaacgcgtgcttcttcatgtcgactccccaggaaagaaagggacatcggtttttggctctcctgaggtagattgttgtgacacatgatcctgattgtttagaaaggttgattgaataatctacaggtcaatgatttgaatttggtagctaggccacactttgccacctagaaagcgagacggcaccacactttcatagaaaaagatcgttgtagggttctttttcttaggaaaaaaaaacgacatttgagggtcctttagttttaagtgcacatttgatcttttgtgttaagtgcacctcttgaaaatcagcagtttgacttggatattttcctggaagatcatattttaggtgcttgatttttaaggtgatttcaggtaacacttttaggtgcttgacggtcaatgatttgttatttgtctttgtatcattacttatcaaaattttgtcaatatatatatatataaacaattataatttgttaatagtctttgtgccaatatatagataacattttgtcaggtttatgattttgtctaaggggtttttattcttggaaccgaaattgcatatatgttgacataaattacaatgagctaaacttgcgattttaggccttgtttagttcaccccaaaaaccaaaatgttttcaagattctctatcacatcgaatctttcggcacatacatgaagcattaaatatagacgaaaataaaaactaattgcacagttttactgtaaaatcgcgagatgaatcttttgatcctagttagtccataattgaataatatttgccacaaacaaacaaaagtgctacagtagcgaaatccaaaatcttttcgcatctaaacaaggccttagtataaaaatatatgctctaataaccgacagctgtttttttttcaaaaagaaaactgcaaaagggaacggcgtcctcgtggtagtagataaacggaacggggaacagtcttgcaaagcaaagaagaactactgcgtaggcaccgcggaccgctagctctttgggctgagatgacaggtgggcctagcccacttaatctgcggcccatcggtcgcttcagtgattcctccccactccacacgcttctcgcttcccctcgttcaccgctgccgggacagctcttcttccgcaacggcaaggccacacgctcctggccgcggctgttcgcagcgcaaaccctaacggagccaacggaggcgcgcgagcggaagcatccatggacggcggccgcaagagggggaaggccgacggcgccaaaggggcctccgccggcgcgaagcggtcgcgaggtgagtggaccgcagcccgccctcgctctggtcgcgaaccccgttcctctcgggacgtgtttcctcgtttggcggctgttcaactttcgtagggcgttgcgcctcggagcctcgggggttagtggggtttgagctgtttgctatgtctgggtttggggattccggggaagctgcccggtgcggtggtcaggtcggatctgagggcactgaggctgttgatcggtgaaacgagaatcgtctagttcccccaagtttcgtgaactcggcgcgtaatattgttttttcgtatgtgggcaatcttgtcgtttgggttaggcattgggcttatttgttgcattttagcctgaaatcattcatatagtgcgcgggtctctttcgattactggggtttatgagtttttttttattgttggcttgctgtgtctcctgcccaatcgataatttggtcacagataccagctcaaagtccactttgcgtttaaattaatgcactacgctgatgcagacaaggcctcattaatgttcattcttttatacggggattagtaaaattagcaacatattaacctggcccacataattaatttgatgtaacagaatcggagtcatttcaaagtggcgtaggaagcaaatcgaagccatgcaccaattttttcaggttataatccaacttaaaatgaacttcacctggtaacattcattctacatagctgcttatttcaattaaaatttacttgcctttgttgtaagaatattttattgctaacagaatagttaagaaatattgtgctacaggttctcctaatccagcttaagaacattactggagtaaaattggaatgcacatgaacctttgaaagatgcaacagcagtataagacaataaggatatctaacccttttcagatgaacaatcagttgctgtcatgatgcagtggcatttgctcaaattgagaaaaagaagtttgagcacatgacttgggaactgcaattgaacacccatcttgaaattgtgccacctatatccttctccacctacaaaattttcctaacatttggttctgcagggataactttacttccttgtagtttgaaattattacatcagtagctgttaataaatgctcactgcctatatttatgacatttacatttttttttcttgtttaaccatgatgtagtgctaaaaatttaatgttgggatctagagcacatgttagcgatgtccttgagcccaacatctgacatgtatctattcctgaatattattttcacagcatggcaaatatttgcagttaagtcatgttagatttttcttcagattattgtaatgtcggtcgatggtagtacatcactatgttcagcaattcacattcaagaatgctgcttagttttgttttcttcagctgatgtcatcatttgtaatcatatattcgttattcagatgcttcttcagttgcttatcctgataatattctcatcatgcagtacttctggttgtccctttggtgagggctgccattttctccattacttccccggtggctaccaggcagtttcaaaaatgaccaatctgggtggcacaacaattgcatctcctggaagaatgacgatggacgggccacctacacccaccgtgaagactcgcttgtgcaacaagtacaacactgcagagggatgcaaatggggtgacaaatgccactttgcacatggtgaaaaggagcttggcaagcctaagttgatgggcagctatatgccacctcccatggggccaagacccactggtcattttgcacctccaccaatggccagccctggcttggccactccagctagcttcggcgcttctgccacagccaagatcagtgttgatgcatcccttgcaggtggcatcatcgggaggggtggagtaaacacaaaacagatatcccgagtcaccggggcaaagctggccatccgggaccatgaatcagacaccagcttgaaaaacattgagcttgagggcacctttgatcagatcaggaatgctagtgctatggtcagtgagcttattgtcagcatcagtggcaatgcccctccacaggccaagaacccagctggcggtactcatcgtggtggacgcacaggaagcaacttcaagaccaagatgtgtgagaacttcgcaaaagggtcgtgttcgtttggcgacaagtgtcactttgcccatggtgacaatgagctgcgcaagcctgctgctgcttgagatctatgccctgtttcatacctcagtagtcattagtcaatgtaactctaaacgtcgtctctgatgatggatttgctgacttctttaggcctgcgctacagatttactgacttcagggctactactgaatttgcggacttctttaggccctcgctattgccaacagaatttgttttcagcattcttcttgaatgttatgttatgaactacttaggtagtatgttactaggacccgttcaagaagaaaagtgtttgatgctgctgattggcatagtatctctaatctctgtgccagagcttgtgactattttgttatggtcggttccaattgttaaacataggccccctttggcaaaagaagccacttcactctaggagccaccgaaagccagagaagccacggcaggctggtttcagcttcggtcgtgatgtcgtttctcgcggagccgtttcgtaggttttcagttttcacattgagctaggatgcgggtaatggttcagttctgtaggtgttagtgggttgctagtccttgcaagttgcaagatagcaagagtacggtaactgaacaaattttaaggcgtcaagcataaaagaatgggacaccatcattcatcagccgacatgaagatcaaaatggctag

SEQ ID NO: 4444 - DNA, 9433 bp, Sorghum bicolor
tgtgacatctcacttcccaaagtttagatttataaacatgtcttaaatttatggggagtgaaagatagacattgattctgtaaccctgcaacttatacagttataccacgctatttagctcatttccctgcaacagaaattgattctgtagattctcatactatatttcgtatactcgtatactacagtattcattaagttacgagtatatttggcatgtaatgatagtaacttaattgatttgtatttaaattgtgattattaggaatgaatttcaatcccaagggtcaacagtggcatctaaagtagtcacatactcacatgtcttttatataatataaactgcaaacaggctcataatagcacttgagatcatctacaattcacgttatgatgtcatattacgctcccaaaggaacccttgttttaattgagcaaccactttcaaagtctcgctaagtgaacctatcatcaattagaactgtgggatgtcaaccctaatcagaacttgatctcacaatatctcaaatgttgagtacaatattactcatgctaaacaaactataataaatttgcttgactttgatccatttttaatgggcaaatgtcattttgtctccctaaagtatcgttatagtctaaattttcttctcgaactctaaaatcagaaaactgcctcccttgagtttcaaaaccatttaaactacctccttacactgctataagtggttttcaaggtggtcttgacacttttaacaaaaaaatatggtaaacacttaaataaagggttttagaccttaaattcatctctaagattgtaaaaagttttagaaatataaatggagatatattgagacatgaaaaacccaaataaactacttaaaaccatgaaaagtgtctctaagttggtgaaaaattctagattatgacatgagaaactcaaataaaatatatagaaaccatgacaatatgtctacaagatttgataaattagattcagctctagaaaaatgggtaaagtatcaaaaaaaatctaggaaagccccccaaaacattctatcaatgtctaagtgcattaatctaggaaattcgcaaaacattctaatcaatatctaaaagcattttaaaaacatttcacaacaaaaatatgagatgctaaaagtatggatgcaatatacattaatgttgaatgcattcatgctagtttcatcttgggtctcatcgtggaaagtttttaaagcacgcttcgtttgctatattgttttttagaattttctaaatatttttcctaatctcctagagctaatctaatttatggaagcatttaaatatatttttatgaatttaagtagtttctttgggtttcttgtgccccaatctatctataggattttttttgaaattttataaaaccttattagtttttttaaaaagtaattaaaaataacaaaaccttcttgaaacccatttaactggtgtaaagaggtaaattaaacgatttcattagtaattatttgattaaagtttgagaagaaaaagataaactatgatgataatttatttagagttttttagcagatatagtttatttagaggtaaaagagactgtttaactaacactgaaagtggcgtcaaaaaaaaactaacactgaaagtgggccctggagtccagcctggcccaggccaggcttcgctttccagctcagcagcgtgcagcgtagatcccttcaaacccgcgcccgaggaactagccgttgccaccccccacttcccccactacctcccaactcctggtagtggtctgctcctcctactactaccccctcccggctcccgactcctgtcctctacggctctacccctctccaatccccaaatcgcccaaccagctgcctgaattcgccgatccccaatcgcgaaacccacccccaagtcccaacaatcctctaccagaaccccgctcccctgcatcgccgcaggtgagcagaccgccggcgaagatgatgttcacagagggcctcgacgagtcggcgatcagctggatcaagcagggcacggactccccagcccccgcccgcgccccagcacacgcaccgcctcggtcgccgctggcggagcgcccgccgctggggcaggtgggggcgccgccgaggagccccgcggtgcacgccaggccgtgcggggccggcgcaggcgtcggtttcttctcccccaagggcctcccgcccgtacgggtgaacgggacgcgccactcgggcctgctcggccgccactccgtgctcctctcggccgccgactccgacgagtgggaggacgagagcgtcgcgtcgtgggggatgcccgaggactgctacggcggcggaaacttctcagagaccgccgatgaggcgtgctccagcgactccagcctcatgcggagggccatggaccgatgcggcggtgggtgggacgaagaggtcacgtcgcagctgagcaggaagggcggcggcggcggtggcgggatcgtgcgggggcagtccaaggagttcctgcgggtggaggtgcgagcggcgggcgcgttcgctgccgggaagtgctccggttccggggcagaacatccagtggactccatgtcgcaggtacgcttctcttctgtagccagacgccagtgataatattgtcctgtttccgctacgaacattacgattattcagttctgttaatccacttttgtttagataaaatgtccccctcgccttatttataggaactataaaacaaacagttctcacgctcttacatataagcatattcgagggcgcccgccaaaaccaaaattgcccaaaatcaacctcaaagtcacaggtacttagtacttactactagggatagtgtcctgaactcaagtctcgccacaagatcagcatcctagttgcttccaaggatattactctcttcagcctcctaattgctttgggcaacaccacattaacatctgtcagactcagacacctgggccttgtttagatgcgaaaagattttggatttcgctactgtagcactttcgtttgtttgtgacaaatattatccaattatggactaactaggatcaaaagattcatctcgcgatttatagttaaactgtgtaattagtttttattttcatctatatatctaatgcttcatgcatgtgtcgaaagattcgatgtgatagggaatcttgaaaactttttggtttttggggtgaactaaacaaggccctgttcctgaaaacacatagaattcctagtttcctatagtccatagaacattagaaatcaggagtcagagtttcataaacgtgcgagttctccttttatgtacagggacactactttgagggtcaggtattggggactcctagtgcccctccaattgcagggggcgaagaggaggttatgtttgatgcagttggtgagaacatcagactttgctatagtaattcatttgatttaacttgtcctggaagtgttgatttcattggcattcatatggtactggaaacagaaacggctgaaatggatggaggacttgaggggactggggtatcatcagtagcagatatactggcccaagatgctcatgagcttcctacgaggtaaatcgaaattgtagactgctgacagttatagtttttattacagcttggggcaaatctggctaacatttgttctttgcctgttgaaattatgcaaatcagctcaattgttcatgaagatggcattcagaataacttattagctcagataccgagcttcaccattaagtgagttttgatttatctttgaccttacacatttgaatatgttattgtctgcttccaattcttactgcttgcttgctcttgtcagtgtccaaaatgcatggcaatcttttgttgcatatgatgcatgcttcaggctatgtctgaatgcatgggcaagaaactgcatggaagctccagacttccttcgggatgagtgcatggtgctgcgaagtgcctttgggtatgcaacagcttatgcatgagtacctgttctgagtgatctagtactacatttttgcctttaagcacacagcttatgtgctctttttttatgaacagaatacagaatttcttgcttcatccaaaacacaatagtcaagttgacggtaaacaagtctatgataaggatgcaagttgtactataaagggaaggaaacttgttaaacagattgagattgaaggtacgtataagcaataattttagtcatcagcaagaaacattactcaccttgaaacattacattggaaaattcttcagaaaaggctagcatattacaataaggaatgtcagaactgtaaacttgtagcctactcacgcattgtttcaaaaacaaagcaagcttacactaacatatttttattaacagtaaaaaagatacgtgttgtacctcaaagaccaaagcttcgggcaacatcatcctttagaaatctctacatgcaagctggcagtgagtatgtcagacagatttctaagattctgaagagccaggttacgatgttgacatccacatcatctacatctttgccggaaggttaatatgaaagttttagttttcttatagcaagccctagtcactgtttatttataccaacagtaacacagtgccatactttcagaaatgttcacatgcactctagaattgcaaagttcatgcaaaggtcatcagagagattcaatttctccacaatatttgaagccaggaactggtgaatctcaactcttgtaagttctatccttagctgttgttctgtgatattcttgcatattcattctatcactggagctatgaaacttatacagataatgttcttgaaccatctattatcacttatgtttcagttatctagagagccagggggatgttattcttgttgaagtacaagacaacaatagggttgtcataggccgtgcaaaaattcaagtttcttcattgactgatactcaagtatgtgtacacaaattcatgagtttagtgcaaatgtttcatgataattctgcaatcactgaaagagtttgtatttgcacaaatttgaaaagcagcaggatgaaatcatcaggtggtggcctctatatcttgatgatcaagattgtgtgggaaaaattcagctttgtatgaatttatccatgtcttccaacaattatgggtccgaaaaggttagttattctcatcttttctttctccaaaaccatcaaacactgtcttaacttttgtgtcatctatattcttataagaacgcaatttgcaatattgttacaacagatgctgcaaggtggtcctgcagtagatactatcatatatgacatggttctggaagcggcaatgagggctcaaaatttcaacagcagaatgcttcatatcagtggtccatggatttggctgttagatgagttttctgattactatggaatatctgatgcatatagaaaattgaggtgaacaattgttttgcttgtgcatagtcaatgatgattggtgaatataattgtacatgatagcatcgcatcatctattcgtttttacaggtacttatcttacatcatgaacgtggcaataccaaccaaggattgtttggaacttatatacgaacttcttgttccagtcacaaaagcacgggaagatagaactttaacaagacaagaggtatcatcaaagctccgtgtatatactgtgtgttagcttgaatgtataggtcaagaactcagagataacattgcaaatattaaaaatgctcagtaaaatatttaccaaattatgtccatgttcattttattggtaaaaaatacactgggcaaaatgagaacctttacaattccaggtttcactagtacacatcagttatggtgttttgttcttttttacagagaagtattttgatagactgcgaagatcggattaagagtctccttgcagctctgtttgaaaattacaagtcactggatgaacattctccaactggcttgtcagatttatttggccccataacagattctgctgcaccagctttggcacctgctgttcagatattcagtgtattgcacgacattctctccaaagaagcacaagacatacttaggaactacttgcaggtcagacatcacagacacttgttttgagcatttttcatttcaatgccatcttccacaatgatcagtaacatgtgatagatcatgatgaaatgaaactacattatgtgagtgtttaagcataatgcatggtgcagaattggaacaaacaatctaaaacaacttccatctatgatcagtaacatgtgagatcaatatcagtaacatgtgatagacattatgaaaaacataatgcagtaatttcccataatgaggagaggggggggggggttgcaatgtagcatagcatttatgattttacacatggtcgtttgaaatgatcctatccatccttgtcagaatagatatatttagtccaattagcaggctacactgatgtattatttacctgttatggtacaaaattacagtcaacagaaaaaatctatagcataattgcattcaaattagcaaaagtgatgaatagtccttgtttcccgttgattctttttcaaagccaataacataaagttactcttttacagactgctgctgcaaaaaggtgcaggaggcatatgatcgagacagatgaattcttatcaagcaataacgacagccttcttacagactctatgactatatctgctgcatatcttaaaatgaagatactgtgcattaacataagtcacgaaattcaagcagacattaagattcacaatcagaatatacttccaaggtagcttagcttccatgttccaagtaataggattttcttctgtttatccacaggttgaacttctctcacaaatttgtgttttcttttagttccatagatctgccaaacatagcagcatccctatatagtaccgaactctgcaagcggctgaaaggttttctttcttcaagtcccccatcaagaccagtacaacatgttgctgaactgataatcgcaacttatgagtttgagagagatcttgaatcttggcaagtgaggtaagatatcccttttttggaacatgagttatgcaataccagccatgtttagctgatacatttttgttctgttcacacaattgttgtagacctgttcatggcggcgtaatttcgagacagctatttcatgactacatcatggtgtggattgaagacactcgattgcagttacttgataactgcaaagctgagaaggtaactataaacacatacttcctcccttccaaaatttaggttgttttagttttgtcaaatcaaacttctctaaatttgatctagtttatagaaattcaccaacatctacaacatcaaattagtttcgttaaatctaccatagatgttaacatattttgctgtaaacttggtcaaaagctagagaagtttgacttgtgaaacggaggtagtacaaggcaacaaatatagattatatggttgacctttagcagttgaacttaattgatttcactcacctctctttgcagatatcatgtcctgcagtgtcaacaatctcaccatttgttgagcaaatgtatgagcaaataaaagagagcataaatgagtatggagtggttatcaatagatggccccaatatctgatgagtttagagagtgtatgtacacacctgcgttctttgaaccagacctcatatttctactccagtggagttaatttatatttattttcttatcaggctgttgctgatgttgagagagaaattatgaaggcactggagaagcaatatatggagattctgatgcctctaagagatggcataccggaaaaaattgagaagcaagtccagagattaacaagaagacaatctatagctccctatgttgtgccaaatcaggtagatatgcgggcaagatactatggaacttgtgtggtggttagttcatgactgatcagtttgctgttcttaatacagttaggagcattcatgaacacagtaaaaaggatgctagatgtgttacactgccgagttgaagacattctcaagtcatggggagcataccttactatatcaaatgggaacactgtttttggagagcaaatgaactccatcacagtcatgctgaagaagaagtacaagaaatacctgcaagcgatagtggacaagcttgtcagcaatgtaagaatgattttggcaccctttataacaagttccactcttggtccagattccacggctaactaaggcaatttgcatgtagccagaggtcacagtttttctttgataccttttcaggcacaagctaaccggaatacgaggctcaagcgaattcttgaagaaacaagagaggctgatggtgaaagtgacatacgagataggatgcaggctgtccgcctccagctctcggattccattcacaatctgcatgaggtcttctccagcagaatatttgttgctatttgccgaggtttctgggatcggttaggccaggtaaaaaaacgtggcaacaacaaatgtactctgaatatttccttttgctgtgattccttatatgtcaaactcatttttgagcagatcgtgttgagatttctcgagagcagaaaggagaacaggatttggtaccgtggatctgattatgctctaggggtaagactcgacttatgttaggactagcagcaatgccaataaatgaaaatttgttgagttggggctctatatagcatgaaaaatggaattgagctaaccctgataattctacatgcagatccttgacgatgtctttgcatcagagatgcaaaagctgctgggcaacgccctgcaggacaaggacctggatccaccgcagtcagtgatcgacgcccgctccatcctctgctagggcgtggccggcgttggttctagtttttggttttatatatattctttggtgtgcagaatatgtacaggtggacacgaccgattattcctgttcatagtgtttttgttgaattgttccaaaagcggttaaaaaaaggctgtagctggtaaacagttaaacaggttttgcttttcaagtgaacacaatctgcacttgattgtgtagtgtgttactatgggactgaaagtcttatcttgaactgtataagcattcttatcttgaactatacaagaatatactactagtaagcatgtaatcattgcttatattgcattcttattacagagttctatatacttctatatagaagcataattactgacagtccctgttggcctgcttcatgtgttttcaacttttggtaccagtaccacgatccatggcaatgagcactggacctgcaggagccacggttgacttgatcgatgaggcgagcccgaatcggcctccgcctccgcctc

SEQ ID NO: 4445 - DNA, 3320 bp, Sorghum bicolor
ccgacatagtatgtcttcaatcagcacagcagcacaacctaatgatcagcatgcttctggaagtagcagctccccaaatgattttgtaaatcaaggtaaactagtttccatatctacttctccagaacagatggtgcttatgtcaatttatggtgcactaatttacaatgtttcattgtctgttctgtactcccatgagtttgaaaccaatatttgtttgttggagttccattcatgcttatttaaactgcatttcagtatggtgtgtttgtgctccagaaaattcagcaaaatggcaattttacaagacgctatgcaaattattacctagcatgactgtatgcagcagcagtttttagaactcagctatgctcctataattggtaactaattagtgttacatgttagctatgcagcctataatctagcaataagccatctaaactctttttggtctccatagaaggaaataatatattgtgacaaagagtttctcaagtaagtttttatttggcaataggccaactgaaccctaacagtggccacatggccaaatgtaagttgtttgctcttatgactcctgaatcccaaccctaaagggtaggcgctgagggagaaccactggtggttcattgcatcattttatatattataaagcaagaaaaccaccggtggtccattccctgatattctgtccccgtatttgtacaaacataggtcttctactatggcaccagactagacagcattggattggaaaacgaaggcgtaattctcagggtcaacaaagtcaagaaccaaaaataaggttagttctccaagtttcttttttcttatggaacatcaatggtcttaaattttctacatctttgcagtgaccaaaatatttccttggtgttgtagttttagttatgtgaaatatcttcttctcttcatgcttgaaaatgaaccagttgtggtttctgccactctttgaattgtcatttgaaatgcctcaaggttgtgatatattgtggttatcgatgatatgctatttatagtaatctccttgatagtggcgcaccagcagtgcgaaatcttgtttaatactttaaaattatggtagcttctgaactaatatctgcctggtgactgcagtggtaatgctacatatgagagccttctgggaagctcgaaaccatttccacaaccgatccctcttggtgtaagttgtcttgaaaagctacatgccatcagatcttccatttgatatatgcgtcctgtttagacaatgctattgacgtccctgggttgtctgctgtcaggaaatggtggatttcctcgtggtcagctgggagcaggaaggcctatacgattagagttggttatgcgaagtgtgttgtttgtagccacgttatgattcgctgaaatgtaacgcaacttcattatgctgcgaaagcctgtgtcgtgatgaatgtggattcactggattgtctcggagacaggatggcatcccgcttaagcaaatgtaaaaatatcctttgttttttattactagtaaattgtgttcacagcgtttagttcgtttagtttagtgtatagttcattgttttatactgagtacacgttagctttcgtaaagaaatcagaacgtctgcagggaacaaaaggaacagagaaaacgggagcctggtaagtttgtgatggccaaaatttggacaagccaaagtttttggctgccactgccatttgatttgtcaaaaaagtttaccaacatcttacatttgagtataagtatatccctatgtcaaatctgctttccatggatgctcggcgcgcctagaaggtgatggaagtgtccgtatgcctctccggccttctcagcttgcatccgtggcgtgcaaagccgcctctgccgctttatatgaacacacacaaatacacaatcaccatctgcactgcatctcgacgaagcgacaatcaagtcaagtgcctagctcggcgaaggcttcgagttcgacatggctttagctcgcctgtgcctcaacagggccctcgccgtcgccgccggccgcgcgcaggcgctggcgaggccggcgtacgccgtagccccggagacagatttgaagcttcgcgcccttttgtcaacgtcggctgccgactctgccgcctcaggcgaggcgagccgccgggaggtcgccgtgtcggaggagcgctccgcccccgcacgccgcggcggacgctgggcgtggcgtgacctccgcgacttcaccccgttccgcctcgtcgacggtacggcctatagcaccagcccgtcgtcttgattgagcaacccccatgcacgccggccggccggccatcgtcttgattgagcaacgcccatgcacgccgccggccggccggccggccatggacactgactgacgcgtaagcatccgttgacgcacgcatgcaggtctcgggagcgcgctgtcgcaggtggcggagacgctgagcaggccgctggagcggctggcgccgtcgcggctgctgtcggggaaggtgagggaggacgaggcgcggtaccggctgcggttcgaggtgccggggctcggcaaggacgacgtgcgcgtggccgtggaggacggggtgctggtcatcgagggcgagaagcgggagcacggggaggaggtgggcggcgagtggtggtcggcggccaccgggtaccacgccagcctgctgctacccgacgacgcgcgcgccgacgggatcaccgccgaggtcaaggacggcgtgctgtacgtcaccgtgccgcgcaccggggagcgcaggcggaacgtcaccgaggtcaaggtccagtgatgatgatgcgtgtcgtgtcactcgtgtgcgtgcttcttgtctcgtgagctcgtgaccgttgtgtattggtgtgagatcgtgcaactgatccgccccgagcgcgtctgcgctgcacaccagcagatgtctcctgaaataaaatctcgtgtaaagaaagaatggcatgatcatccatcaaaattgtacttatcaaaagaatactctctccatcttaaaatacgtacacgtcttgttttttgaggagttatacttttctaaatttgataaaattaggccccttttaaatacatgaataggaatagaaaaagtatagtaagaattttgtaggattgcaaccgtaaaaaggaatagaaaacataggaaactaatatgaatagagtgtttggatgggtatagagcctatcctagcgccccgtcgctggtcccatttctttttcctctggcgtcgctggtcccatttctttttcctctggtatctcgctagaggttgaagggagtgg

SEQ ID NO: 4446 - DNA, 6356 bp, Sorghum bicolor
ttctagcaaatcctgtggacacctttctggcttgaaatttgttatttttatatctcacaaacaaagttgagtttggacaagatattttacaatgttgtgtatcatcaaatcatctacatgtgtgattttttttgatgaatttagacaacttttttgctatggtttgcacaggttttcacggagattgtggtttgcactagatatgttcccaaatataattggtaacttttcttatccttaaaaaaataaaaaagttgacatagaaggtaaatataacttataagttctattttcgtttaattttttggtaaataaaagttgacatagaaggtaaatataacctataattgatacagacatctccggcagtctttctaaaatttactttttaaattattatttgaggggagttatttgagtaaatatcgctttctatatctttgtacttttcaataacttttgtatagcttgtgtgtaccagagaaccatcctcgttcgtcatcttcaactagcgagaaaatcggaatagaggatgtctatgtttatagatccaattaaagagaatgttggaaggtatattttcgagccttgtttagttcatcccaaaaccaaaaaacttttcaataatttttgtcacatcaaatcttacgacacatgtatgaaacattaaatatagataaaaataactaattgcacagttttcttgtaatttgtgagatgaatcttttgagcctagatagtccatggttagacaataattatcaaataaaaacgaaagtgctacaatatctaaaaacttttcacctcctcaactaaacaaggccttaattaaaatctctattcttataaattatagtgagactcgaaatcaatgtctaagtggcgagagaacgcagaaggtgggatgataaagaaataaaagaaaactgatgcaaaatggtgctaaactagcatcttctctccaatattttgcacctcatttattttttcttttcctacttctaccatcttaaaatacataatgaagctgctcttagactgtctccaatagcctagccaaaaccaagaacccatttgggtgcgaggccaagtggaaccaaaaaatatgtggttctcatcgcttgcgcacaaatatttcgtgggagatggagagaagagaaaaatgcttccatgttcgcggggtcttttttgtgtttggttgttggaaaacacaagttttgggtatatgacccttttactatgcgtaacccaaactatccgacggttctcgttcatattgttggagatagccttagactttattcacgtaagctgattctaatgcaatgaaaatccttataaaagatgtgatttctcctcctcctccctcccaactctaatacaccgtcaataacgtgttcatattaaacctatttccgtgcgattaagaaagtgataccatacccacttataataataatggtacaaatttctctcagaaataataatgaaatcaatagccacaggtctacgacaaaaagtgcagctgagcaggtccaataattgtaaggtttgcggtttgtgtagggggcatccacgcccaaaattaggcctctgcatatccttgcgattgggagcacgtaacggattttttctagcccccacccaaaccacggctgcctgacgcgacttgcacgccaggatttcgccctaaaaaagattccccgtcgcgattagcgccacacgtaaacgtaatctcggtccgttaacctcgggcaggctaatgctgaaacgactcccttggacccgcccgtcctttttgcagcacccatccagccgttgatctggcctcggacgcctctgatcgcccccacgtacggcgcccagcgggccccatccagccgggcggccgcaatgattccccctccccttcgccccccctcccgaaagcgaagtgagctgctgctgcagataaggagggaggccgccattatcgcagcacgccgcgtcatcctctaatcgaggcgaggggagagaggagggaaacggaataaatcttcatcgagcagcaggaagcgagagcgagggatttattttgtcttttttttgtcttctcttcctttccggcgacggcaggtgaatcactggccgggcggtgccggccaaggctagggttccggggatcgcgggcgcgggctcgactttcgtagcctagccgccggctgccggcgcgcgggaaccggatgctatgctgctgagctgcgggtcgctctcctcctgggtgcgccgcttcgtcgcctgcgttgggtaagccaccctctctctctctctctctctctctctctctctctctctctctctctctctctctctctcccgccctctactacgcgcggtcagttgattgctgggcttgtctgcttcctgctgctgctgctgctgcgatgtgattggccgtggattgggtttacctgtatcgacgcgattggccctgtgttgtatcccttgatgaaatcgagtaatctcaatatatgtttaaatggatagctagcacttaacacttactagcacttagcaggttccaaaatgattgttagtctcaaaaacccagttagctgttagctctaacaacccaactcatataaaggaaaaaaatagaatggccttattacagttagctgtatgaaatggttgattgatttgcgatgttattctggttgcttctacactagccattatctctgatcagcgtatttggtgatcttccagcaatgctggttgtcgccctacacttcgtgattgccctgatgcttgcaatcaatgtcctccacaagtaaccgatagaaaagaaaaacacatgtattgatgtttcctcccctctattaatattctagtgtatcatttatttgttaccagggtaatatgtgtctacacatgctcggtggaggctacttccacacagcacaccagccccaggctgcagtggtggagcttggccaataaaagaagaggggccaatataatatgaaatatgagaagagggggtagattagtatttcgttagcactaattaaagtagtgaagctaagacattcttggcccactatggccctcactaagctccgccattgccaagctggacctcctccagacctccacacacatgaagcacaagtgatcggcaaaggcagctccttgcttctttgtgcagccacatggctcacgcccaagaaactcaccatcactcagggtccagattggagaactagagaagtgaaatggctctatcaaccatccatgcctaaactacctgaactgcagtgcctccctcacagtttacacataggacatgcccttggcactgtattagtccgggtagtttccactctcatgaagctctcactttaccagtgccattctgatctagatcccctgcttccccttatagtctcgaaatggtggcatagctgagaaaagtagcatggatgtcctcgtatattaaaaaccactggtattgctctgagcttgacatccaatctaagtatcaacttcaacttttaagcaccagcactacaataataatatcctccagaagtttctttcacaacgagcccatcaagcaacagaatatgaagtcatgcttgacaacttgccatttcaagtagaatacgcaatcccggacaaagttggagcagggcatcaagatcatcatggcaccaggaaagggagagattcatgagcctgccgaactcgctggccgggtggtggtgccaactgccaagggaatatcccacatgttaatcgtgaagcagttagtgagttccattgattgtgagttccttgggcgtcagccatgcggaaaatgaaccgcctggtggatcactcgtgtgtcgtggaggtccagcaccaggctgttgagctttggagtgcggctttgactaagtgcatgtctgtactatttacttgttgattgtcctaataatttcagactgatgagttaaagctgggtctagtagctggttctgaacatgtaccgttccaccatttggaattatctaactatttgtttccaatgaaaccattttttttatttgtgttgttactcgtcaagtaccttgtagtgctaatcatttcttggtcaatcctggcttgcaacagagcagaggttgttttggttgtgcccagcctactccgataatagctgttgatgagcctgcaaaaggtttaagaattcaagggcgttcagtaaaaaggcacaatttatctgacgacttttggagttcaagcccgcacgaaatggagaacagtgccttgcaatcccgacatagtatgtcttcaatcagcacagcagcacaacctaatgatcagcatgcttctggaagtagcagctccccaaatgattttgtaaatcaaggtaaactagtttccatatctacttctccagaacagatggtgcttatgtcaatttatggtgcactaatttacaatgtttcattgtctgttctgtactcccatgagtttgaaaccaatatttgtttgttggagttccattcatgcttatttaaactgcatttcagtatggtgtgtttgtgctccagaaaattcagcaaaatggcaattttacaagacgctatgcaaattattacctagcatgactgtatgcagcagcagtttttagaactcagctatgctcctataattggtaactaattagtgttacatgttagctatgcagcctataatctagcaataagccatctaaactctttttggtctccatagaaggaaataatatattgtgacaaagagtttctcaagtaagtttttatttggcaataggccaactgaaccctaacagtggccacatggccaaatgtaagttgtttgctcttatgactcctgaatcccaaccctaaagggtaggcgctgagggagaaccactggtggttcattgcatcattttatatattataaagcaagaaaaccaccggtggtccattccctgatattctgtccccgtatttgtacaaacataggtcttctactatggcaccagactagacagcattggattggaaaacgaaggcgtaattctcagggtcaacaaagtcaagaaccaaaaataaggttagttctccaagtttcttttttcttatggaacatcaatggtcttaaattttctacatctttgcagtgaccaaaatatttccttggtgttgtagttttagttatgtgaaatatcttcttctcttcatgcttgaaaatgaaccagttgtggtttctgccactctttgaattgtcatttgaaatgcctcaaggttgtgatatattgtggttatcgatgatatgctatttatagtaatctccttgatagtggcgcaccagcagtgcgaaatcttgtttaatactttaaaattatggtagcttctgaactaatatctgcctggtgactgcagtggtaatgctacatatgagagccttctgggaagctcgaaaccatttccacaaccgatccctcttggtgtaagttgtcttgaaaagctacatgccatcagatcttccatttgatatatgcgtcctgtttagacaatgctattgacgtccctgggttgtctgctgtcaggaaatggtggatttcctcgtggtcagctgggagcaggaaggcctatacgattagagttggttatgcgaagtgtgttgtttgtagccacgttatgattcgctgaaatgtaacgcaacttcattatgctgcgaaagcctgtgtcgtgatgaatgtggattcactggattgtctcggagacaggatggcatcccgcttaagcaaatgtaaaaatatcctttgttttttattactagtaaattgtgttcacagcgtttagttcgtttagtttagtgtatagttcattgttttatactgagtacacgttagctttcgtaaagaaatcagaacgtctgcagggaacaaaaggaacagagaaaacgggagcctggtaagtttgtgatggccaaaatttggacaagccaaagtttttggctgccactgccatttgatttgtcaaaaaagtttaccaacatcttacatttgagtataagtatatccctatgtcaaatctgctttccatggatgctcggcgcgcctagaaggtgatggaagtgtccgtatgcctctccggccttctcagcttgcatccgtggcgtgcaaagccgcctctgccgctttatatgaacacacacaaatacacaatcaccatctgcactgcatctcgacgaagcgacaatcaagtcaagtgcctagctcggcgaaggcttcgagttcgacatggctttagctcgcctgtgcctcaacagggccctcgccgtcgccgccggccgcgcgc

SEQ ID NO: 4447 - DNA, 3216 bp, Sorghum bicolor
ttctcattaattgactcgacaagggcaacgaacttcatcaatttcattcacctttttattttacacaccttaacttctgtagcaatgggggtggttgctcgcctggtaaaatatgacccacaggcttcattttggtatcacaggaagaaggcctagtaccccagtcatgcaaatgactctgcttagagataggagtgcatgaccacaatgaaatttacatatactacgagcacacacgttacaactgattctttttttttttcatttctcaaaaaaacacgcctgtgaaagagagtacgagtgtacgacattccaaagtgcgacttcctgacttatattagcaagcaggcataagtcaaaacccattaagatacttcaaacccaagcaatgcgtgcaaaattatacttgcaaacaaaatggcaacaatttttcaggaaagcacccaaacaggaaagttgcgggctacagcaaacacaacatttaagtgtgcaaagtggcaaactgcaaccaaacacatcttcagcaaagactccagctccctttcaaagaacccaaaatcactctgaatgtttggatacagcaaaggatctagtcttattatagacatgtgtcaagcttattgctgaagcagactaccataaacctatagagctatcgtcttatggatagtttccgaaattgacaaaagaaagccaagttcaagcgaaatgaaatcttctacaaattaaagctcatgagttgttcaaaatggacaagaaatgaagttagctatatatacagattactataacccaacagtataccctttttccaacctgatttctattgtgaaaatattgcaaagccaaatataaaacatactatcaaattctccactaagcaacaattcagtctactcctatattataacgtcagaaaaaaaagtattatatttcttcaccgaacaaatatcgatcaactgagcacacaccatcgtcatcaccagcctgtacctgcagctacctcagacaagcttaaatgccaaccaactccaagcaattccagagctaacaccccaggacaaaggcaaccttgtcaattctcttacagatcgcactgaagaaatcactctaacagtctatattcagttaaagagcaattccatgtaaatttcaacatcccattacatatttatttatagagaacaaaactgggtgatgcaacataactagagattccaaatgaagcaaaagaattttgacgttatgtcgttatctaaaaaatacgcagaaaatatttcgacaccctaagtttcagcacaagtcttacctatatgctttgtggtggtgtccatgcgtccagtggtactcaaccatatgattggccccagtagctctggaaaaggagatgaagttaatccaaaacagatgtacattaaccctacataaacaactggagtactaagcaatcgacgactatgtggatcaacttagggttgccccacaaataaatgtggcagccatgggtgtaggtgagagtgtttattaccactgtactagcagggaaggtggttatgctatgcacacacacagttcaccgacagcccacacctgcagacaccatgtggccccccttcagttgccactcccctgatttctctcatctttgccctatatagttttatacattgacgcacgcttggtatactgctcttggccccagcaaccctgctctccagtcagtgtatgccgccttctatcatggtgacgtggtgactggtgagtgaaaactaggtcagacatattctccactccttctctgacaggtatcttactacctacgcagcgaaccacatttatcactcactgcagaagcaagtacaggctgggcagtttatattcactcaaaccagcccgttcctcccccacacggccacacacacttcagttcataggcgccccagcagagctcatctctgcatcgtgtgtcctccatgacagagaatctccactccaagaaaatggtacagccaaagaagtttcgtggagtccggcagcgccactggggttcctgggtctccgagatcaggcatcccctcctgtaaggccttctatccctaaattttttagggaagaacataaactactgatgcgaacataattctgaattgcaatgcacatatatttttatgatgcatacagtaagaggagggtctggctgggcaccttcgagaccgctgaggaggcagcgagagcatatgacgaggctgccgtgctgatgagcggccgcaacgccaagaccaacttcccggtccaaaggagcagcacaggggagccaaccccagctgcgggaagggacgctcacagcaacgccggcagcggctcctctaccgccaacctgtcccagattctcagtgcgaagctccgcaaatgctgcaaggcgccatcgccctccctgacctgtctccgccttgaccctgagaagtcccacattggtgtttggcagaagcgtgcaggagcccgtgctgactccaactgggtcatgaccgtggagctcaacaaaggtgcagcatccactgatgctgcatcacagtccacatcagcaacaactgctccaccagccaccccgatggatgacgaggagaggatcgccctgcaaatgatcgaagagttgctgagcagcagcagcccagcttcaccctcgcacggagatgaccaaggtcgcttcatcatctgaaaaagcatcgatcaaacagcacaagtcaccatcccagatcagagtttcgctaggccggttggtacacaagcagttcagttcagtaatatagatatatgtctattactaaatccaacttacaagaactataaggtttgcagttgtgtgcagttcatgtacttgtgaaaagctctacatacacatgttcctgtcaagatactttgttacacatcaatgtcagtgatataattgcttatagaggaaataaatagattatgattgtgttactgttcatcctttccttggatcctgatgtcaaactcagttgagaaatctcaacacagttctaaaaaaatagagagttcagagtcttactttatttcttcaaacgaagaaccaataatgaacaaataaatctcaaaacaggatgaaggtgatgtttgtgaataagacctttgcttttatgatagaatggtttgaagggccatgctctatgagatatcatcactatggcatacaag

SEQ ID NO: 4448 - DNA, 5842 bp, Sorghum bicolor
aagaattatattaaataatacctggttttatgaacacgttacaaaaactttggattacacaaatatctagaaaatggttttttcatctaaattgtacccatgctacgaattgattcagatctcaaaaccaaacctgtacgatgctttgcagtatggatgtccgcacagacaaatactcggcaaaaggcctgagaacagatgcccaacgaaccacggccaatatttatgtaggcgtagttaagaaacttcttctttttggactgatctgaagcttattctccctagtccttcatcgtggtcagatctaaccacaataaaatggaaaagaagacagaagaaaattattccatggcggtgacaccatttccgccttgatgtcgccttccgaaaataaatgtctccatgtcgttaaatcggtgaggatgccgatgacgtagttgttgcctgcatcttcaatagagccgccatagagaaaacgttttcacttgctctctcacgttgttggagaggagaagaaaataaatcctccaaaaccaagaaacttgacgtggagagaccttaactctaaaaactcgatctactagaaaaaatcttattaaaaatgataaatcctcgttccctctgacctccggtgatatgtcggaagagggaggggggagaccaatggtggtggaaatgtaagtgacggtgacaggctgacagcgcagactaggagaccctagggtcgactgcggtgtccggttatactaaggccttgtttagattacctcaaaaaccaaaaactttttcaagattcttcatcacatcgaatcttgcggtacatgcatggagtattaaatatagacgaaaataaaaactaattgcacagtttatctgtaactcccgagacgaatcttttaagtctagttacttcatgattgaataatgattgtcaaataaaaataaaaatactacagtgtcaaaatctaaaaactttttaatctaaacaaagcctaactttgtattctactcaatccgtgcctgagaactcagataaataaattgtctacacttgtgcttgcggcgccgatgtatggcagccagtattgtctacgcgggctgcccaaatgttcgtttgcccatgttgaaggcgaaaaaaaaaattgttcagcgtcctcccacgctgcctacaacctagggccttgttagttcacctcaaaaatcaaaaaattttcaagatttctcattacatcgaatcttacggcacatgcatgaaacattaaatatagacgaaaacaaaactaattacacagtttgtctgtaaatcgtgagatgaatcttttaaccttagtcagtgtatgattagacaatatttgtcacaaacaaacgaaaatgctacaatagcaaattccaaaaacttttcgcatgtaaataaggccctagtgtctcacactctgagcaagttcgatcgacatggctgaagaatcggtgcctcgcggatctgcagagcaccggcgatcattcgcttatcttataaattctactttttctattggttagcagtgttttttttaataataaatcaacgaaaaatacttgcaactataatttttcaaataaaccaataagctcaaatcatgatacggcgagcgcgcaaaccggatcatctgcccctgtgctgtatcggtctgtttgatcccaataatttcacaggatgtgaaagaggagtgcgtcatctgccctcccgccagatccgaagagctgcttgtccacatttcacaatccgcaccggatcccgtgtggcacgacaggaacggccaaaacgaaaccgacgtggccacttcccgcgccactcgctacggttaccccttccttgttcaaacctccgccgtccaatcccacatcaacggcccgcatcatctctcccaatttcctaactcccaactcccccaccgccggcaaaatcccccaatcctcctccgtccgcaccccgcgcgcaccctccgcccgcccgcgccgcgatggaggccgcaaccgccgcgacggcggcgatggtgtggttccggaaggggctgcgcgtgcacgacaacccggcgctcgacgcggcccgccggtacggggccggcgccgcctccgcgcggcggctgtacccggtgttcgtgctcgacccgcggtacctccgcccggaccccgccgcgtcctccccgggctccgcgcgcgccggggtcgcccgcatccgcttcctcctcgagagcctcagcgacctcgacgctcgtctccgacgcctcgggtcccgcctcctcctcctccgtgcccgcgacgacgtcgccgacgcggtctgcgcggccctaaaggatgtaagcatccgtccatctctgctgccgccctggacgcaaagccaactactagtttttttttcctttgccctttcaaccgttggttacacaatgacgagatcttgggtttacttcacccatcgttcatttgcgttcagtggaacatcggcaagctgtgcttcgagtccgataccgagccgtacgcgctggcccgcgataagaaagtcacggtgaggctgctaagatcacttttctccactctccggtatctttcttgggtgatgtttcctgatgaagattttggtacttttaggattttgcattggcgtccgggatcgaggtgttcacgcctgtcagccacactctcttcgacccagcagaaatcataaagaaggtgttcgaaactcgaaagcttatactagcattcagtactatgcctgtgaactcatgactcactactcaatactcgcaaccaaatgtgcttaactgattctggttttcccaatttgcagaacggtggtcgtccgcctttgacatatcaatcctttgtctccattgctggggagccgccagatcctatcatggaggaatactctgagctcccaccgcttggagacacaggggagtacgagctgttgcccgtgcctacagttgaggagcttgggtatgtggatatcagcgaggtaagggtagagtcacaattgctccaaagaactagtatttcagttactactggatcggtctctctgaactgctggatggccatttgcaggaggagattccaccatttcgtggcggggagacagaagctctgaggagaatgaaagaatcacttcaaaataaggtggctacttctggaatagcaacattctgaaatccatcaagtttgttattctttgctgtttccacaggtgttctgaaggtgacgacctagattcttttgttttgttctgagtaggaatgggttgccaaatttgagaaaccaaagggtgacccctctgcctttctgaaaccttccacaactgtcttgtcaccatatctgaaggtatgtttgttaataactcaatgcagttacttgtccttcttccctactatttatttagattgtaaagtgtcaaaaacggattgtcatgctgttattatgcagtttgggtgcctgtcttccagatatttttaccactgcattcaggatgtgtacaagagcgtcagaaaccatacaaaaccacctgtttcattgataggacaggtgatttgtaattgtaactgcatttgttgaacatgaaggaacaatctggctacacagatttttttactttggttctgagtgcatgtctcatgtttttgtaatagctgctgtggcgagacttcttctacacagtgtcttatggaactcctaattttgaccgaatgaaaggaaacaaaatatgcaagcaggtggctccgtttgatccgaaccattcttctttcagtgatgcacttttcatgagcacaattgtaaaccaaaccccatttaatttagattccatggagcgagaacgaggagctatttgttgcatggagagatggccaaacaggatatccatggatcgatgctatcatgattcaggttttctcaaatgaatatctaccagagaacctcaccttgcttttttttttcttgttctatctttctgttcatttgtgtcgttcttaagagtatctgatagctttctttttgtgtgtttgtcttccagctaaggaagtggggctggatgcatcaccttgcacgccattcggttgcttgttttttgacacgcggtgatatggtatcgaataagaactctgttgggaattatttacattgaaatctcctttacagaatatgtatgttggtaattgtaaattttgcacttttggcaactttcgagttctagttaagcaagaaggtaatcaataagaactgtttgttttgctagatgagtctcttcaaaaatatggctattgggttgttttgatgagctaattagtggggtcaatattgtgttggtagaatctgaagatttacttgcctaacgttctctgggacatatgtggacaattgacattatgcatctgaagaaatttctaaagactgattccaaactaccttacattgcctatactaacttctttttttcagaacatgcatcggcatgtgtttcattaagcagaaaacctatactaacttctgaacctatttcttttaaagtttatccactgggaaaaaggacgtgatgtctttgaaaggctactgatagattctgactgggccattaacaatggcaattggatgtggctctcttgctcatccttcttctatcaggttaccgataatgcacatccttcacatagcactttttatggacacttttgttcatactaatagttatctacatttcttgtgcctttttcaaatagtaccacagaatttactcccctatcacattcggaaagaagtatgatcctaatgggaactacattaggcatttcatcccagtgctgaaaggtacttctggaacaacgtttcagcaccaatataaatagtcttctgaagccagaagtcagcattgtttgtcccttcagatagaggactaaccaattttattttgcaattctatattcaactaatttagacatgccaagggaatacatttacgagccttggactgctccccttagcatccagaagaaagccaattgtattattggcaaagactacccgaaaccaggtaaaaatgaaggacactgtcgtaaagaaggcatatccatgattagtgataattgatttatattttgcatccgtttggttttacagtagttgatcatgagactgcaagcaaagagtgtaaaaaaaggatgggagaagcttatgcgtcgagtcgccttgatgccaaccctactaaagggaagacattgaactcgtctcgacgaaaaatgccccatggtgaccaagacacgtctaactcaaccatttccaagctactgaagaggaatagccgagctgaatgatgtgcagctcccctgctgtgacaactttacactaattgtttcaccttcagcatttataatttcagttgtgcatcctgcatctgtcatacgtagctcgtctgatatattaccaaagtaattttcccgaaaggaaatgacttgcgatccatagctagtctgatatcctacagtgatcgaatagatctgtagtatatgatcatgtaacaggtgtatgtaatcatgataactgctggccatgtactaggtcttacttgcaaggtggaagctattcctaattcttgcagcaaatgaactgttaagtgcaatccatttattcctcttcagtagctcggctgcacgatagaacaaggcaaaaaaagaattgtctgtctagactactcaccagggaacaagcaaagctaaacaaactgtgacactggttacagccgatatttcggccataccgtgagtactgcttcccagatgtgatctcaagctttcctctttgatagtgtgactcc

SEQ ID NO: 4449 - DNA, 9361 bp, Sorghum bicolor
cgtgaagccgcccgccatggccgcgaagtcggggatgatggccatcttgttcgtcgggagagctgtacgcacaccccctaccttgcgcgccactgtcgacgaaagctagtcggcagtctaccctggggtatacccacggtagtagtttatcggtagacggtgcgcaagctacgactcgatggtgacgcaagacacagacatggtttttatccaggttcggccgccgtgtgggcgtaatacctacgtcctgtgtctgattgtattggattgtgttgatagaataatgtgtctatgacctgtcctctaggggacccctgccccttcttaaatatcctgaagggacagagttacaagcaatatcttgtagccttgcggtgcacgccgaccagtcgtgcgccgcacgtcttcatcctgtgggccgagccacctctgatggtgcggcccatatagacctataaaggtataggggtttataccccacagatactgtcatcggaaaattaatatcctattactcgtgcccttgctccatttgggccggaattaattgggtgggaagtcatcgaatggaacattagcgccccagtatacttgcatatatatgtatatgttatagaaactgtaatcaaacctggcccatttcgtataaaattacacctttttgccacatttcaacattcatattttgtttccgatcactcggccaccaaacagaagtgaacacgtacctgcgtgcacacatacaagaaccaccaaagctagtacagaacgaggcaaatgcattgcaaattaggaggaaaagaaatttagttgtactaaaatttagtcacttaggctccatttgggtgttgcttttttctaaaactgtaatattacgaaaccagagttttaaagaccgtaggtatcatagtatttagaaaccaatgagtttctctgtttaaggaaagccgtgaagtgtttggctacataacactgcgtagcttttgagagtagttggttgtgtctttgctgctaaaaatagcatgtatctctgtatgtaccttacgaaaccttgcatgcaaaccatcgcaaactcaattgttaatttaataccttatatatcccatttcaacaaagaccatatctcttttctggatgggatttccaaacattaatgttgagtagaccaacctactaaggccttgtttacttaggaaattttttgtaaaattgctacagtaactcttttgtttgtatgtgacaaatattgtccaaacatagactaactaggctcaaaagatttgtctcgtaaatttcgaccaaactgtataattagtttttattttcatctatatttaatactccatgcatgtgtctaaagattcgatgtgacggagaatcttgaaaaattttacgttttggtttggaagtaaaccagacctaattctgacatgcacaatagccggccaaatccacccacctccgggcagctccaacaattaactcttaagctagctttaaatattctttttcatatttttaatagaagatagaaaaaagctagttcttgatcaagagttaagttctttcatatatttcaacgttatgtgagagtatcatatgagactatccatattaaaagctaatgttaaaagttatcgttattagagaaggaggatgcccttataaatgctaccacatccttgctggacactgtgtcatcccgctgcggtttcccgaaattgaccctttctttggagcaaaggaaggatgctcagagtagaagattgtaggggcaaaaccgtcttttgcacgtcgaaggccacggcttttgctctgacagtgctgtactcctggtgccttggcatgcccgctcccagtgtccaattggaactgccactacacttgcaagcgcagcagcagagtcttctctcttctcttctcttctcttctcttctcttctcctctcctcgagctctccacttctctccaaggggaggagccggccgagcggcgaggcgatgggtgccaactacctcgcgcagaccaatgcactcttcaggaagaatctcgtgatccaggttacgcgtcctcatctcctgatcactctttcgtttttgtaggaaattttttctttgaggtttcctttgcctctgcctgtgaattccgaggaactgaagaatgccgctcttctgttttggtcccaagattcgatcttcttcttgccggagcgcatacgaaaaacccccaaattctcatttcgcctcgctgcaagcaaatctattgcttttcgctgatgaatcctgacatgttgtgcctacactctgaatctgcagagacgcaaccacaggtcgaattgctgcctcatctgcttcccactcctcatctgcgtgctgctcggaggggtgcagttgatcgtggcgatagcttacttcacttcgtcggcgcacagggcgccccggaccgactgcggctactgcgccactagcacgaacacctccagcacggacacggtcggagggctcgtctgcccaacccaatgccccctgccgatcgcgccgaaatggccgccggtgctgcagctgccgccggcaccggacgacttggatgatttcggttcctcggctgcgtcgaccaatctcacggcggccgattcgatcacaagggcgaaagcggaaccccccgcggcgacgttccttgtcactggtaccaaccggtcgtttgcagaaagtatgctcgcacatcttgggcttgtttagttgtacttgtacccaaaattcaaaaactttttaagattcttagtcacatcgaatcttgtgtacatatataaaatatataaagcattaaatatagataaaaaaataactaattacacagtttgttatgagatgaatctttgagcctagttagtctatgattggacattaattaccaaatacaaacggaagtgctacagtagtcaaattcaaaaagtttttgaatctaaacaaggccttgatttttttgcagaaaaaataaatgctgttgcaggtttggaatggatggagtttcatgatttctggttcttgcaggggtgatgagtaacatgctacccaagcatgatgatgagttgaagtctgcagctgacatctccacaattgccgatttcgcactggttggtttggttccctgaattgagctttgtgtgatgctcgcttgttgaattgagccattggtttaacttcctgttcctgcgaaacattttcagggtacagatgcaatgcactttatctctaatggtgctgaggaacttggttccgattttgaccaccggaaccacatttttttccttcagagcaactgcactccgaacgcaacactttcttttccggtccaagaaggtcgcagcaatttcaccaaaggtgagattattaatggctggccaggagctatgtagagaagatgatttagtattttacagagttgcataattctttctgattttttaaggaaaataaaactaatttacaaaaagaaaagaaaaggaaaataggtgtctaggagtaaaatttagtgcattattattactatttttagaatgggatttaccagatattttttcccacaaatactcgacgatttggttgagacattatcagacagagtaccttttctgaaatatgactagactaagtcattatgaaataagatgaaccttatcagctattcttatctgaaaaactggcctgaatcagatgcgggatgtattaaaggattatttctttggcgagaggattcatctgtcattaacagtgaatcgtacagagtttattacaaagaggataagcaagctaatcaaattgcttcaggttttaccattcttctccttgaccatttccttttccgcctaattgataactctaatcaattaatattgttctgtttacagcatatgacctcacaagctcaaacctcaacaagtttaatttgattgtctcatacaactcaacatacaagggtgctactcaattgtcattgtcgttatcttcactttcattttcaccaatcttgcttcgagttccacggttactgaatctggtaattatttctttcgacccacccacccaccactcagctcaccattatataaatttcataaggaactaggatgtactagtttaaacttccttgctttctattttatagattctgctatctgtgaccacacccctctttaaaaaaactattacattttgaatgttctttggaagtcaaaatcttgtgctactaaatgccttcgagttgaaaaaattattcacgcattgttttacttattttatggtgctcctatgcaggtctcaaatgcataccttcaattgaggggcaatggtactaagatgcagtttgagtttattaaagacatgcctagagttgctcaacaagaattgcctattgatatatctttcttagtgggaaaattggttttcgtatggatgataatgctccttttccctgtatggtcccctttaccgtagactgaacagcatgtattagattggaacttcttttctttcctgatatatatagacattaattaactttcataatcagatgtatacttgctactattgcaggtcatcctgagcaatttagtctatgagaaggaacataagctaagaactataatgaagatgcatggcctaggagatatggcatattggattatatcatactgttattttcttcttctatcgctactgtatatgctcttcttggtgttttttggctctctttttggtaatttcacaatttgacaagatgcactccgttaatattcaaataaaagggtacattttagaattgttagttatttttaaacgaaccggcaggagagctgcttgttatattaaagaggagaaaagccctgacaaacactatacagagaatggttagggttgtacaaatggttaatagcacactagttttagttttttttgttttcttgtaataatatctgctttcgaaatggtcgagaattatttcgaatatgttgagcatgcattagggaccacttgtgcatttcaaataatgtgaattactttgctttggaaataatacttgtctttctgttgccaggcataaagttatttatattgagtgactacagggtacaatttgtgatttacttcacctacataaacttgcaaatttcgtttgcttttcttatggcaacatacttttcaaaagtcggaactgctagtggtatgcttctactccagtgtttgcatttttgtttcttcaaatggttccagcaaatttcaactttcattacatgtaactgtttcatgcagtgacaggatatctcttcacaattgggtctgcctatttaggagaatatttattcaggcctatttttgaagatatgtccatgtcaagtctgtgcccaaactacttcctatattatggctaattctgttgtgatatatcttatacccccctactattacttctaagaaaaaaatataatttcaataaattccagtagggggtgaaacccctcctgttcctcaaaaaaaatataatttcttctttacttcaggaagctggacaacacttatggagttcttcccaccattttctttctactgcataatctacgagttctctccacctccatcacctttgtatcgtacagacttttctggaatacactgggaagacttgagtgatcacaagaatggaatgacagacattctcatcataatggcagtcgagtgggccacattccttttgttaacattctttttggacgaattttgtaccctgcgaaacagaattagaaaaatagcatcagcttgtcactcaagcacagattggagctctcacacttgtcagatgcagactattcagcttcaagaattcgtatcctcagctgaagcagacaggactgatgctttgagagaggtgtacttccatattatctatcaccattcttatacagttctatttttgtacacttttatgttctgcttgattaaatctgaataatagaataaagtagaccgtgtgctaacttgatattctgcacactatatcgacccaacctcaacccatcccaccaaacttggatgttgcagatagtgtgacacagcaagttgagataagaacattatttggagttactccgcaatgaatgttgttttaccaaattcttggcacaataatattgctttcccctttttttcgttttcagagagaaatagttgaacaactcttacaagaatcggatagcagttattcagtaatatgcgacaatcttaagaaagtgtatcatggcaaagatggaaatgcagagaaaactgctgtcacagggttatcactttctatgcaacgtgggcagtgttttggaattcttggtccaaatggtgctggaaaaacctctctcattagcatggtaaatacaaacagtcttagatgcataaatgtcaccaatttaggagtgtttcaacactgtagtttctctttcctaggaaatgtcaccaatttaggagtgttgctatacacatttgtttaaatcataaaacatcatgtttagaagttcctgattccctctttattccagaagactagctattgttccatagttcatcgattagcatatataatttatttctcattgctacatcacactatcaaatttgattaactcttaacctgacaacagctgacaggatttactaaacctacatctggcacggcttatattgatggaatggacataagattggacatgaacaaaatctatacaggaattggtgtttgtccacaatttgagtaatgttaacttcctgtctctcacaaattctctgttagaaaaaaacgattcatataattgcaaaccaagtttcttgcaaaattgatcgctaacctttttcattgataatctccatgcagcttgctatgggaaacactgacaggtcgagagcatttgatgttttatggcagacttaagaatttgaggggtggagcattagatatggtaatgtctggctacaatttaatttttaattgtttatttttggaactctttccatgaagctgataagttccatttgccaccctaagttgatgcactgtccaattatccccatgcactatctcgtttaaagttgtatgtgacctgcatatttacttttttgctgacccgcaccagtaggcaatagctatatgaacaatgtttcaaattgttttaacatactggctaagttatcatgttaaaattacacgtcactaaaagtatcaaaagaagatattttcaaatgaatttgttggtaaaaggtaccactgcgatttatcagaaattggtagatcgacatactaaaaattgaccatgattatgtaggtattagacatgtatagtctagtccacatatacaggactatactatacatgtctaatagtaggtcccagttaaaaacatccctctcgtcaaaaagttgagtaatggttattctagatactagattatgccagtcaatatttcgtcaccagttaaatttcttcgaaaagaaatattaagaggcattgaattcaatacattctcaacattagcaagtgggtaataaaaaatattatacatgctagagaaaatctcttttaggtgtgtaaagcctatccaagtacttttcccataatctagtttgtgagctatctcttattttgaaactcccacattgcagaaaatcttttttgagaaaaaaaaaacattgcacaaatcaccctggacctttaaaagacctatcttattttgtacagtattcttgtttcaataacatcaatcacattgaccattatgtgttgtgtgtcaattaaatcaaagtctctcctccaggctgtggaacattctctgaaaagtgtaaggctatttgatgatggtattgctgataagcgtgtggcaaaatacagtggtggcatgaagcgtcgtctcagtgttgctatatctctaattggtgatcctaaggtgcttgctatacctgaccataattctggaaaatggaaatagagtgcatttattgtacaattaatagaaagagttgtgtttgcggcaaatcaatgtggaatgctgtgatgtgtatttcttgtacagttcgcccatgtaaaaggctatatgtgtttggactttggagcattttgtaggttgtttacatggacgaaccaagttccggactggacccagcgtcaaggagagcactgtggaatgctgtgatgtctgccaaagagaacagggctataattctcacaagtactatattccacctgtatattcagaaaccactccattctcagtttcccctaacaacagtatttttctgtcagctgccatcttgaacttgacaacatatatataattgtgccttcaactttcagcgcattcgatggaagaggctgaagctctatgcgacaggataggaatcatggtaaacgggagtctgcagtgcattgggaactccaaagaggtaggctttacccacgtcacaagtctgtactgaactactactgatctattagcttgctgaaagatgtccaccacttcatggcctttttccagctgaaagccaagtatggaggcacatatgtgctcaccataacaactgcagcaggagaagaggaggcggtggagcagctcgtccggtccctctgccccgcggcgaacagagtgtaccgcatctcggggacacagaagtttgagatggcgaagcaggggctgaggattagtgaggtgtttcaggccatggagcatgccaagagctggctgaacatcgctgcctggggcctatctgatgcaacgctggaagataccttcatcaaagttgccagcgagagtgatgtatcctccgtgtaggctgtagatagaggtggtatttggacttctttagattggatacattcgatcgactgtacgtatcctgtggtaatattaaccgtatcttgtactattctttctattctacattgtaactcgctttagcttttctagatacatgataaaaacgatgtatctagaaaagccataataacttacagtttaaaacagagagactaatatctatacaacactgttcaaatttagctaatatttagctgattttttttaatcaaaatttgatgaaaagacacgaagaagaaccgaatggattaaactttttataacaagcaagaacttgtgggtttatttgaactctagacttgactagcctaaaaatttgaattgagccaaaaaaaaattatcgatacgatgttgtttcaggtcttacagaatttcaccaaaatttaatcattttagactaaatcccaaaaccctactttgcacaacacgtcataagggaagtctcattaaaagcg

SEQ ID NO: 4450 - DNA, 3988 bp, Sorghum bicolor
aaaagaatctatcttcttgtgcataatagctttttattaattgattgttgaagcaggcctcatttgcataatttctaagccagtctatgagaacctgagaagggtacatattcctcgatcgattctttaaagaaagatttcgctgaaaagaacgaatgggattaataaaactgctttccattttacaaagagctgcgaaaaaactgtttccttaaactttttaaatatagtttctttcaagtcaaaagataaatcagaaagcaccatgacgtttctctgtctttccgaaatttcttctggaagcaattgtttctcaaaagtcacaactgtacatcatgaagatgatggtggaccttttacaaattcagtggtgtatcaagtttggtataaagacctaaatctcaattccttacattagaaccacggaggcattgcttttggaccatttggagatagatatacaagaactttctactatccaaactggaccatagagtttaattgcctggttcattgttgtgttggaaagtagtagaaatctttcatggaaattaggcggatctgacatatacatactctcaaataaatcatttttggtgctccaaattggaaaatactatttaagtttagaaaatcatgaacttgaacagtatggcatcttaaatcggcttaaagatgcattattagggctttcatagatcacatatctggtttgtttacgcgaactgatgcttttgctactgcattgaagtacgccatgcataaattcatatttgacagatactccactataatatacagggcatatcaagagacaaagattactagtaaccctatctctaactcttatggtgtgctctactctacagtaactattatagccatggtgctagggtaatcctgaatgcaactgattattcagtcaccgaaaatattctcatatcaaagcgctttttttttgtatcttgcaatttgtaatacaacgttacgtgctgtatggaggtgtacgctggtctgaaatgagtttgaaatgcagcgaagcaggttaaggtgcactaattaatcagattagtgattagtgaccaggtgtggctactcagcagccacaatgccacaactactggataggaccaggcattgccgtggcactcgggagttatatttgcagaatattggcataactttcgaacaggtccactggtttggtttgaatgcaaatcgtggtcagtcatcgccagaacaggaagagatctaagagtttcaaatatggaaattctggttgggttgggcttgggccttcatggatcggaaatttcagagaggacggagttgcctagttttgaagaagtcgctaataaacaatttgactgctggccaatgtaagctgcactgcaaattgcaagattttcaatctttgtgtgccatatataatgctacgtataagatacgaagagtgtcagctgagcgaataagttgacgtgcgccgcacacaccccacccctatggcctatgggctatggccttgtttagttgggaaaatttgttggttttgaatagtgtagcattttcgtttgtatttggttattattgttcaattatggactaattaggcttaaaagatttgtctcacaaacaaactgtgcaattagttattctttttatctatatttaatgcttcatgcatatgttcaaagatttgatctaaagatttgatgtgacgaaaaatcttgaaaattttttaaaaactaaacaaggccataaatagtctatacaaagtgtcaaagtccgccaaacgcgtgacaaggaaatggcgaggaaggtcgaaggccggcaaagccgtgtgattgcgtgaagttccacgaggaggagcgagacgactcacaggagcacttgtcagtgtcaccgtggggcccagtgtaaccatctcgtaagtttcctcgaagcttcgtgccttcgtggtagctataagcctataaaactccaccaggtcacgaagcaccacagcgtcgactccacggcagcccttggcgaccaggagccttgtgtgtttctaggcttttagctttcagatttatgggttgtggcacacagtttgttttaatctgtgcgctgaacaaacaagtctcatatttgtgacttgtaggattgttacaatccaacacttgccttcattctgcaggttttagcaagcaggttgaaacaagcgtggccttcaagctggtaagaagcagattattatgttgcagtctgttctagttcagagttgcgccgtgaagatgttctcgtttgctttagcttgagattgtgaaagctttcctgctacattctgtttccacccacaaaacccactttcctagctcgacgaagagccctcacctccagtcatgacggcgccccaagcagccatggccggtcagccagtgaatgccgccgcggtggatgagcgtctcctggtcgatcaggaggccaaccaccacccccaaccggagaacaatggtgataacagctgcttcccctggccgaccgttttgggtttcctcatcctcagcttcaacgcggcaatggccatcatccgatcccaaggcgatgtgatggccatcgccttcgtcggttttgcctatgccatcctcgtcgcgctttttgtctgcctgaggatgtacgagcgtgcccgtgctgggtcgtccaagagggagtggctcaagatcgctgtatggatactgactactctgctgacgttcagcttctcctacaaagttgccgccatcatgccagcgcccatggccgtggtcgtttggctgatggcctttgcgaccattgcaggaggcttcgtcgcgttctttgtctacaaagagaagtgatcatcggcttctcggtctctgaattaataaggcaattcaattgtcattgaggcggaatttctctatggcgaatcatcgactctttatccgactgtcttggaagaaattgctttgtagcaaatcatcaattctttatccgagccgtctttttgtgtgtagtcgattgtatgaacaatttatgccattgcagagccaaaaagcggaaacatcaggtttttgaacagtcagaacaagccttcttttgtaataatgtgttcagctctaaagactgagttagaactatgttagatccaaatcctattatttgtgtcaagtattgtgtcttgtatttatgaagtctgttacctatctagatgagaaccttgccagctcttcagatggggctgactgcgagttaaaatttctggcgcgcgtgaactttagtagcttccaatgtgttatatgttcctagagattgtaatagagcggttcatggattagctgctagtgggtatgaatgtgtgggcaggctcgagcaaattataagctccccccgtgaacatgtaatgtaattgtcgctgacgattgtcagcccaagagtaatgtagttgtacccaatttataaaaaaaaagagaacattttcgtaagtcatgtgttgttttgtgtcatcttgtgcattttttttttggaaaggacgggaagaactgtattattattacaagaaaaacgaattagtctaatttataagaaaattagatctgaaaactactactatacaattagccatgcatgtaggttgggaactgatcaaccagtgccatacccagtggcggacccaggaattaggagcagggtatgcccatgtgtcggcgtctagattcgtggtctaggcactaacaagtataagtctgcgtgactgaccaagcttggatggtgatgcaagtgagacacagagggtttatactggttcgggccaagaatgccctacgtccagtgcgaccgggggtcctgtataaccttgcacccaaaggtgcttgtagtagtgggtacaagcaggttgcgagagagggctaagtcccaggtctcggcttggtggtggacagagtgcggattgctgctctgtgaaagagtgttgtgcgtgtgagtgtgt

SEQ ID NO: 4451 - DNA, 4788 bp, Sorghum bicolor
atctacttggtatcggtggctcacagaagaaatatccttcttattcaaggcttgtttcagtatagttttccacttaattgaagaatacatatttttgttatgcaagtccgtaactgctattagcccacttatgcattacagttttattttggtcttgaacatgaaggaaaagtatgtattcattgcaaataagacaattactaacacccaccactccccgggctcccccaacttatatgacaataacatttgcgtctgttttttgttttctttttttttgaaagaaaacatttgcgtctgttaaaaggaggaagacaacgacccaacctacaaacttaactaactgtgctagaggtggtaaggaaggagagccccttagctcatgccataacccaaagctatgattcctctcatggagagataagaccttggataggctcggagtagcaccattaaacacagtcatttctgtgtttccacaaactcattgcacatgatatgatgagcgagtttaggagctgttggatgggaccacccatagcagaacaagctctacaccacctagtcatcaaaacagttctccaaaagttgaggggagaggacagcaagcttgtctctttgcaagagaaaatactagaattgctgggccaaaacgcatgacacctattgtgggtgttggatagtctctgactgttgatcacaaaattggcaggtcccaagatgtggaagacctctctgtgccaagcggttggctgtccagaagcaattatgagccaccagccagaggaagaaacggcattttctgggtgaccaagatttccagatgcactcccaaaggaccaaaactaatagcaccttgaagtaaagcattgtgctctcatgcctaaaagaagtgtcactaagagaacagtattattgttctcttagtggcacttcttttataggctctaaatcctcaattgctgccaaacaaccatctatctttccagaataatgtgttggtgtcatcatcaccaacctctgcaatcactgctagggggaagagagattgaatgcagccacttatctgaattgagaacatcgaccatggcttgtttgggtcagccttttgtagacaaccatttcacttgtaatgcccatccaagacatttgtcagaaataccaagcccgccaagctcccctgagcgagtgagtggctcaccttgggccagtctattaggcagtgacctccattggctaacttcctccctaaccaaatcaaacttctgattttatcaatagccttaatagcccaaggaggaagatcaattgccattgttaagtaaacaaactgactcctgtactcttgcattgtcatcacaagaataccggataggcagcacattgcttgatcatttcagaaaaaaggcccaaagcttccccaaatgatgtagagtaccaagtgttaaatttatatctgttgcatctggttggaggaagaggactgtttcatcagcatacaaagacagccggtgtccgataggctgagaagagtggggttggagcagctcaccctcttgagccctcatcatcatgatataaagtatctttgatcagtagaaacaacattcgaaagagaggatctccttgttgtagtacccaccagcgatagatgaattccctcgatatcccatttaggagcacttgggtggaggaagactccagtcaaccactcaatatatcatgccaaaaaacttagtttctctaaaacctcaatgagttaagtgataccatattgagtttcagttggttacacattgctatcctttttcagattctactgacatcatattgcttataggaatttaaaccattgtgaccatcaaaaaaaaatttaaaccattgttttttttttttgctgactgaagtgatgcaacaaggcactcgttttccttaacttgcgcacactagggatccagaataccacccagcccaatggacttgcagttcctgacgcaacaatgtgtcctgttgattcgacttctcatgttattcaactaatgcaaacagggcacaacaatagatccatgagtgcaacagccttgaacgagaggagtagcagatctcacaggtaaattacttgtgctgcttgtcttttgtataaagagaccttgcttgtggacaatttatttatttgtttatttattttgtgcagtgttgtgacaattcatgtccagggccaggatttgaaaaccggtaacactttgcgtggtgctctgcatcttgtggaccttgcaggaagtgaaagggtggaccgatctgcagttacaggagacaggctcaaagaagcacagcacatcaacaagtctttggctgcactcggggatgttatattttctttgtcacaaaagaatgctcatgtaccatacagaaatagcaagcttacacaagtcttacaaacttctttgggtgatcttctttactagaaattaagtttggattacatcataatttttatatggtttcttgacacacaaactttttcacgtttaggtgggcatgcaaagactctaatgtttgtgcaagtcaacccagatgtttcgtcatacactgagactttaagtacactgaaatttgctgaacgtgtgtctggggtagaactaggtgttgcaaggaccaacaaggagggcaaagatgtcaaagaattaatggatcaggtaatcatttcttttttttcttttccttcacttatatccatgctagggcgattgatacgaaacagtagatgcaacatgtgaaggtaatgacttgacttttggacatgcaaagaagtcaagaatgtcatgttcaaaatatgtcatctaggtggctgaacttgatccagaaggaaacatacagatgttgacatctaatttttcacctgcagctttcactgctcaaagataccattgcaaagaaggatgatgaaattgagcgattgcaaatagccaacagtagcaactccctactgaaatccacgaaacatggtgactctgtgttgaagcattcggcctcttctccaggaatgacatctctaggaaaggtggcaagctttggtagcggggcagcttctgatcttgacaacttctctgacatcagtgataggcattccgaagctgggtccatgttttctactgatgaggcccgacagctgggccagaactttgctgatcctggtggtgattcagatggaaggctaagtgatgtatcagatggcggtatacccacgggtgcagaaactgacagttcagttaacaacgttgtggaccaagaacaagagaaaacatccactgctggaaaagagcggttgtgagtattacccgttatctataatcttagatctaataatatttttgttcatttgtcatttagctcttgcaaattctgcagaatggtttctggccttggctgttgtctgtaacttcttcattctttctcatgcagagccaaagcagtaagtcgagtccagaagctaacagtaccaaaagttggccaagcatcaagcttgcggcctaaaccaagagatcctcctgctcctaaatcttcaggtaagatgcctctaaaagcttgcacttctgttacaacttaattttatgggaatgctaatcttgaggatctgatggttggggtaaatggatctgagtctgactcagtagttctatagatgattaacttgatatgacaggagaacactaatagaatgtaccaaacagatgtctatgtcaatatttgtttgtacatggatttgcctctagtctgtacttgcattgccaaacattatgatcaacttgacaaggtttttttttagaacaagttatcttgagaaatcgaattaggctatccattattaaagggaatgaagcaggccatgaaagaattatatccatatagcagtcagtgcaacttaccaactcttgatgcaatcaatctaaatagtagtactgcgatacaattttatcgaagctctttagttcaaaaataaagaaataatattgtaagtcttaaggtttcttgtatacatgtgactcttcaacagctcacagaaaccttgacaaagaacgattagtcatggcattttttactattactccctttattttctgtgcagtttaatttttccttgtgtgttgtctcatatgcacataccattttgttagtttcacatcatatattttccataattgcagtcacaactggtgtgcgaaaaagtaccaccactcaagcaactccaccagcaagagctagcagcacttcaaaacgagtaccataaatcaagataatcatttggcgaagccacttcccagtcatttttcttttttgcgtagctttttcagaaaggtatatcttcttgccatgatgtatgtaacaccgatgctgcatgtgattcttgtgccaattagtgacttgtgcatctcaggtggataggttcttttcttttcatgtttccaaatgagggtgttgactgcatcagtatatgatgttagcatgttataagataccattgttcaatgtgttatgagataccattgttcaattagtgaaggaattcggattgatcaaattcaagtccttactgtttttcagaatctattcatgtcgatattgtggtgttcagcagtccttgtaatttcatagcaatgcaacaatgcagagccgttcaccctaaacaaatagttattttctaagattcaaactagacgattcctgttttgttcttcataggtacaacagttatcctctgtactcaaccggtcattggatcctcaactt

SEQ ID NO: 4452 - DNA, 5515 bp, Sorghum bicolor
cccctttttctctactagctgtctcaactgtccggtcgattagcaattcaatggccgaaattaaattgatgcgtaattatgggagggaggcatccgatcttatggtacgccatgtcgccttgtgtgtcagtcactcacgccccgttttgcagggatccagattgtcttagaaactatcataatttttatagatattaattgtagtatcacttaagcattttgctcatatgacaagatagttatgacctgtttagttccaaaaaattttgcaaaataggaatagtaccactttcgtttgtatttgacaaatattatccaatcatgtactaactggacccaaaagatccgtctcgtcaatttcgactaaactgtgcaattagtttttattttcgtctatatttaatacttcatgcatgtgtctaaagatttgatgtgacggggaatctgaaaaattttgcaaatttttttggaactaaacttaaaaagagtgagaaaaatcataaaaatcggatctaagttagaaaccatgagacatgaagtgatatggttggttgagaatagagagacaataaatatgattggataaaaaattattctgtagaaactatttattgtgacaatagtttctatatagtgtctatataaattaatagatatagtagcattgaactgcccttagaaacacttcggttccatatttttctaagaaatgttttatgtggtgaattggaatcactttaataaaccatttggatgttaattggattttgtttcccaaacaaaagattttttttaaaaaaaaatcttgacttttttgggggttaataacaacctaagtgcaaagtcattttaattggttgcactaaaaaggaataagtacaaaagaaaccgattgctagtgcatatgagagaggaaaatccgaaaccaggctcaggtcgtttctctcgcataggctaaaaagtcagaatcgctagaacacactgctacacaaaattttatcgtgacgggcatttttgatttaacgaggtggccatcacaacagccatggcaaaaaggtcatggtaaacatttgatttatcaaagccgttatgttactaatatccgtcttggttaatacttattaactaagatgattattttataatgatcactttggttaatgatttaccgagtcgattattttacaatgttcacctctattgttggtccggctcctctgcttctaatcaaggaaggcaaccgggccgctcgtctctgaggccattttaaaaacgctgcgcaaaaagattttatatagtagtgatgttccaaggtagaaaatgttttgacatttctctgtttagatccgattcttcggatccggattagaaaccgaggccttgtttagttcacgctcaaaaactaaaaaattttcaaaatttcttgtcacatcgaattttgcggcacatgcatagagcattaaatatagacgaaaataaacgtactaattacataatttgtctgtaaatcgtaagataaattttttaaacctagttaatctatgattaaacaataattatcaaataaaaacaaaaatgttataatactttaaaaaaaactaaacaaggcccgaaacatttgggtcgcgcgcgttcttttgccctcctcccaaacaaacacttcagttcatatatgtggtcgattttagtagtgtgctgtgtgcaggcagttggtcatttgatccctttgtatcagggtcattgatccagattttaagccgtccaccacccctagcaatgactctgagcggtaatctctggataattacttgatttgcactaatactagttcgtagagttttttaaaaaaaaaaacaagatgctgggccccaccaaggagaaggccgagtcaatccaaacggcatggaaagcgatagccatagcgacgaggagtccggtccggcagtgggctgggcttggcgccaccgccaataaataggcgcccggccgggtgatcggccaacccccatcgccccctgcccctgcctgctctctctctctctcatctcatttctccctgccagctctgtgctcatcactgcgtgtttcccatctgatcctcgagcctcccagcagtgtggtacaggttgcagaaagaggaagcagatcgagatggctggaggcggcgaccacaactccgcccagacgaacggcggaggtcacgaccagagggccatggaggagggcaggaaggaggcggagtacgctgaccaccagggctgcgccgccatggtcgtctccgtcccattcatccagaaggtacacaacagtcactgtgagatcgatgagatctgccaaaactatctactactccgtcttcttcggctcttcccccggcccgcccggcgctaattactctctccgggccccaataccaacattcatcatgcctccgtcaaattaccttccgttctcgacccctgatagatctcgagttttcctctttgtgctgcactactgcatttcatttcgtttcgtctttttttctttataataatagctgtgttctaaaataaggtgtttttttaattctcaagatcctactgtaccggtataactaaacgtcgtttcctagttcaggttcatgcatggcatggaaagcagtgactgagtttagtctgtctttgtctatcacaccaagacgacgacgttattagctagcatcccacctacttaaacacctaacaatgcatgcttgtccccgtcgtcctagctatctatctgcatctcatcatgtcatatgacaagaattaagatactaacgcggatgtgtgtgcagatcatcgcggagatcttcgggacctacttcctgatgttcgcggggtgcggcgcggtgacgatcaacgcgagcaagaacgggcagatcacgttcccgggcgtggccatcgtgtggggcctggccgtgatggtgatggtgtacgccgtcggccacatctccggcgcgcacttcaacccggccgtcaccttcgccttcgccaccagcgggcggttcccgtggcggcagctccccgcgtacgtgctggcgcagatgctgggcgccgtgctcgcctccggcacgctgcgcctcatgttcggcggccgccacgagcacttccccggcacgctccccacgggctccgacgtccagtcgctcgtcatcgagatcatcaccacgttttacctcatgttcgtcatctccggcgtcgcaacagacaacagagcggtaattaataattaaggatgactatatatcgtcttttgttttcgatttttttcttttcctttaatttttcattcatgcaactgatcgacgactatatatgcgtatatccgtatctgcagatcggggagctggcagggctggccgtgggcgcaaccatcctgcttaacgtgctcattgccgggtaaatatactctatgaaggcctcaaattcatagtttcgacaaatgttaagtagggcctttgcatgaactagaatgcatgcatgacatcagtcggttgtcacaggaataactttaagctttttaacttttcacactgggtgcacaaagtgacaagtagtgtttttccaagtcaaagaaaaaaaccgaaatatgaatataaaagtagggctttaatttgttgtgggtgtctctgtcggtagcagggttttatggagccataaagaccgtcatgtgagtagtcatggcgtactagcaggagcagctagcaagctttgagtgtggttggtgaaacaccggggcaatgccattaatgtgaacgtaataccactcctgtgtcctgctaggctgctagtatgcagatgcaaatgcactcagatcccttctcttgtgaacactgatgaggtcttgtttacttccgccttaaaatctaaaatttttcaaaattcctcgtcacagtttgattagaatttacaaaataaatcttttgagtctagttagtttatggttggacaataactatcacaaacaaataaaagttatgtagtatcgtgaaatttttgggaactaaacacggcctgacctgcccaatagagagactcagccgcttctgacttgtgtgccagtgcaagagtagcacgagcatcatactgtatcatagggttaaaagctgagtatagtattaaaactttttttactactagtacaatgttttctacttgttattagtaataactatagtcctaaaattaattattaaattttggaaataatcttgtacccatgcctcttttctgcttgacttgctgctgcaacttttccaacgaaaacaagaaaacaaacaaaagcgcttttgttgacggacccatatgtatggctttgttgtgttgtggcaatggcaggcccgtctctggcgcgtcgatgaacccggcccggagcgtgggcccggcgctggtgagcggggagtaccggtccatctgggtgtacgtggtgggcccgctggtgggggccgtggccggggcgtgggcctacaacctgatccgcttcaccaacaagcccctccgcgagatcaccaagagcacctccttcctcaagagcatgagcaccaacaggatgaactccgccgccgcctgaggcgagcaccaccaccgtggccatggccggccggcgtgtcctgctgcctcctcctgtggaagggctactactgctagtaatttagcctactacacctattcacctgtgtgtctgtctgtgtgtgtgagtatatatacaattcctgcgtgtgtgtggatggatggaaaacagatggaaaagggtacctagctacgacgtactgtggtttgttggagcattcatgtcgatgtggcacgtacaagcatgcatgcatgcgagggaagaggacgaccgtgtcttcgattccgggcaactctatagctgggttaactatagttggtctaccccgtgaatgtgcttaattataagcaattgctgcattgtcatgtactacgccgcctattttgttaactcaattaatgtgttgctgaaagatatgcatgtgcatccttgtgcttagcctctcttattctctctattgtctcttatgatatgactagtaaaaatgtccatgcgttgcaacatgatccaatatgtgtatgtaccagatttcgtgtttatgtctttatttattacaagatctaatacattgatatctttgaatcagatttagtattcgttctaacttgtatggacacaagtcatgagttccggtctcatatattgtggatcgatattaatttcggctgttaaaaaagcttattagtccattaggtggtcgtgctagactgctcaaaaccagatagcttttacagtctcttaaccaacatagtacttcatagttaatcataaattgaattgcttaatcatcacaattggttgcattattttcggcagtaaaacattgtagtcgtctctcagcacccttaatctcatatcctattcacttgtttggtgaggcttttgatggagtcatcaagcaggtgcacagaacgcagaacgt

SEQ ID NO: 4453 - DNA, 4218 bp, Sorghum bicolor
agaaactccactcatgatctctttttttaaaaccatatttttttaagaaagggactgtatttcattaactttaaagcccttttacaattgagacctcaatataaaataaaattacattgaagcacaccactaggtccctatacttcatctacctcgcatccggcggtgctcctctttaggaagcttcatctcgaccatgaaagtacactagatctggacccaagaaccataatccctaccaacagaaggctctagaaacatggagactgcaaaagaggcacgataagctcaaccactatggggagtaaatggtgtcgagagcacatcggccatatcttctaaaggatgaacggacataagattcgacgctactagcataatcaccagcaatcggaatggcagatctgctgccgctgcggccagaaagacaatcccatagaagggaaaaatagatccaatccctcctcgagaagaactatgccaatataccttgatctctcaacaaagagcatcccatcatcgaagacgatgacacatccatcaacgatccgacataaaacagaaagctagatcgaaaacattgaaatgaccaaccaaaacctggcccaaattactatggagcaaagaaaaataaaaggagaaaaacctatcctcagcactggcagggaggttggaggcgaggggaacacgggccgaaggcggcggtggcggcggagtcgcccctgtgggagggggctatggtttacaaatggcaactgttttggtggtgagtgttacatgaaaaagtgtctttcagctaatgcgcgccactttgcatgtccggtagccaaatgcccctaacttatatgggtcagcaatgtatatgtacaatgctatttcaatttatcgagtagtagaaatggtaataggtgagctgttttctaaaatatctttgatctggcatatatatatatggttgtatctcattgttgtcaatgtacggtagtaacttcatggttgcgtaaatgctcattaatatttctatgacaatcgaggataattcattacaactataagaacaactatagttaaagagttgagcatgtgttgtaaaccatctgatttttgccaaaaaaaatagttgacatcatctaattctaggaacaatattttcgcattataatgcacgtgcatacacacgtggcgccatgattctcagttgcatgaatgtacatgaaactatcgtgctcgtgtgttttgtattacatataaccgttgatagtaacacaaatcttcattgaatactaaaaagcaaatattttcagtaactccatgtcaaagtagaagtggcgacactttttccctcgagtccccgttactaccatcatttcggtaaggagtgcgttgctattgcctcgagaaaatatccaatcatgcacgtaaaatataacgactttttaccaaaccaaacccgcacgtatctggagtaactgaacccgcacgtatctaaagttacttcatggttgcgacaccgatgaccgcattgtgtctagggtttacatactccatgattgcaaaaccatggcaaggaataaaccaacccaatgggaaaggtcagatgtggtgctggtgcatcaggagccgctccatggcgatcaacaggtccaaacctgacccctttccatgctcagggctggtttggcaccagttctagcttcactggccccaccagtcggtctcgtatatattttttgtaccataatgaatgtagctctcataaaactagcagtcatctatgtttactctaaccagatcactccttgtcatccattcttggcaggtcattaaggctaatacaccattgctaaaaattgccactgctgcaataggtacctgatgcaattaccaaaggtgccctccgcgtccttggctatcatgtgtactcgagccatgggcataatgggaaaatcactgtcctgtcagttatcagtggcggcctacataaagtgcacctgcagccgatgcttcaccaccaccacagcagcttcgtcctcaccacggaaatggtgatgaagggagtaggagcgggaggaagtgggggtgacggcgcatgggctagggcaggtgacggaaacgggaaggagaacgggaacgggaaggcggcggtgcgggagctgccgtggcgtgagcgagagaacaaccggcgccgggagcgccgtcgccggttgatcgcggcgaggatcttcaccgggctgcgcaaatacggcaactacgccctccccaggaaatgcgacaacaacatggtgctcaaggcgctctgcgaggaggccggctggaccgtcgaggccgacggcaccacctaccgcaaggtactcattactctttctcagctcgctgttccgatgatcgagctaattaatggtcgccgccggccggccccccgccgccgccgccgttgcctttccattgtttcgtttgcgctggttctcgttcttgtcgtcgcgcgtccggcttcgtttcgctctgccgagctgcgtgtgtagtgtagtatcgtcgacagttgcaaacttttccgcttcgtcgtcttttgtttgtagcaaaagtccaaaatttgttttgttttaatttcagttgctcgtcatctagctatacatcaactgttccattgcctttccaacaagattggatgagcttccttccttctcaaagctacctgcagattggcgtgtgtgcagctagctgcttcagtcggcctcgttagtcgtactgttacgtcgactgtaaacggaataacggatgcgcagggaaagaaaaactgtcgtcgattgcacattttttgcgtgcatgtgaatgcatgtctactctattgtcgttcgttgatgccctctcggctctaattcgatttgtgtttcttcagggacccaagcctccggcaggtgatgatcagcatatggccgacgttgtcgggtcgtctgctgcggtgaacccaccaggcgcaggcggagcttcctacagcctgaaccgggcgtggtcaccctccggcggcatcacgctcggcggcgggggcagcggcggcgcagccgaccccattccggcgtggctcaagaacctgtccaaacagctcggcgacaactcgtaccccaacttcttcgcgagctcctccaactccaaggcgccggcgatgccgcaggacggctcccggccctcgtccccgccgcgcctccacaagaaggtgcgctactactcctccccgccacccgccaccccgccgccgagcccggcgagggcccccaacaacgtgctgccgcctccgtgggccacgggtgctggcgccagccgctactccttccagacctccaccgcgccgctgatgagcaccgtcgtcggccggcccctcggccccgacccgccggtgacgaccctgctggcggggttccacttatcaaccggcgcggccaacaagggaccggcctacagcagcttcgtggcgtccggcgcgacgtcgctcggcgccaggagctctgcttctgcctggatgctcccgccgctgccgggacgcagcagcagcggggcgtcggcggtggtccgtggccgcggtggcaagcttttgtcaccgctcgggttctcgttccacaggagcggcggggaggaggaggtgatgaacgacaagaacaccgacgaggaggagggcctggagctcaccctggggaacacggagacccgcaaggaccgcgcttgagctcaccgatcgatcgagctgctgcaacaagacgatgcgcgcgtgagctgattgggaagctatctttatatgtagggactcatcagacactggacgtacgtggtcgtagtttagcctcagcaagactgctggcgtttaactttagcctatcttagtactatgcatcttagtatctcatggtaactttagcctatcttattattactactgtccgtctagtatcttactatccatcaggtatctcgatcgtcatcagttatcctttatttcgcatctttgttttttctcttcttcttcttttttatctttgcaagaaatgaaaaaggaaacagatatggcaatgggaaggcttgtcttcatgtaatcatggattgccaggcagttagattaaagctagtgaaaagtatcagttatagttaagcaaatgtcttctgctgctgctgtgtgtgttttcttttgcaataatttttcagtttccatggtttcttcaactgatttgt

SEQ ID NO: 4454 - DNA, 7477 bp, Sorghum bicolor; identical to SEQ ID NO: 3500

SEQ ID NO: 4455 - DNA, 4783 bp, Sorghum bicolor
tagtatgcttaggacttgttactcatcctggatactcatcgctatatttttcaaatataatgattttaaaagtaaaaggtgtgagtggtgaaaataaattgtgggtattatgaaagggttaatgaacaagttatagatgagattactatggagatggggcggatgggatctcttttggggatgccctggtgttgtggcttataccttgcggggttaagcgagaagatatccgccttgtctcgattaaggactgagttgatgattcatcttgcctaactcatttatcgtacaaccactcgtcttgcatggaaaaggcttagtttaaatccctctagttagtatggcaatcacctggaggcaggtgtgcaacgggacactaagtgatgtatgtgaaattgtggaaatgtatgaaaagagctttgtaaattattgtggtatcatgagatgtggccttagtgttcccgtggtgagcgccattacttagctatggagggtaatgactttgatggatctgtgcttgcacgacggtgtaagttatggtatcctacttgtgggaaaagtgtacaacctctgcagagtgtaaatctatctggatagccgtgtccgcggtctcggacgggttatggtttggtttcaacaactagatgggttgggatgagtgaaagcatgagagagagtgtgattttggaaataaatggttgactgccattgtgttgtgggaacaagagttcaacaacacttaaaattgtgagcaaactccccattttcagaaatactatcatatgtggaaaaagaggtcttttacaacaatatttgtgaaatgaaaccttgcatgtgtaaaaagatagctttatgcaaataaaactaagcctcatccttgatttatccatatgcatatatattgttaaccccttccgtagggtaaggttggatttgctgagtactttgtactcacccttgctttattaaacagaggaagatccggacttcgatcccgaagtggcgttcgagtaaggtcgtgtctgcacccaactaagcctgtggcattgggacttgtcagatcttcggttgtgatatcttttgtttctgggtcctttggacctatgttgtattttggtgtcttattattatagcatgccttcattgtccacgcttaccgagactactgcgcttaaacttatctgatgtaataaatgtgttactagcctcctagaactagtattgtatcacatttgagttcctggtttaccaggggcgcttcaacaattgaattgcacattaacctctatggcgcatccacttgccaacaacttctatacttgcaagcatcctattaggctattacagcactagttctctagattcaaaaaaaaaacgctaagttctgtaattttctacggtactattgttaaaataaaaaaatcaacataggcctagtttacattcaaaaattttttggattttgacattgtagcactttcgtttttatttgacaaatattatccaatcatgaagtaactagacttaaaagattcatatcgtaatttacaggtaaactatgcaattagttatcttttttactatatttaatgttttatgcaagtgtcgtaagattcgatgtgatgaggaatcttgtaaagttttgggtttttgggtgcatctaaacagggcgatagacttttttttaggccttgtttagttcccaaaaaattttgcaaaatttttcagattccccgtcacatcgaatctttatacgcatgcatgaagtattaaatatagatgaaaataaaaactaattgcacagtttggtcgaaattgacgagacgaatcttttgagcctagttagtccataattggacaatttttgtcaaatataaacgaaagtggattttgcaaaatttttccgtttctgtccagacggccacgccgcgaacatttcccgcccaatcaaacccaaatcccccacaggccacagctccccgccgctgacggccgccacgatggagctctccgccgccttcgaggagcgcgtccggcagatggaggacgcccgcaaccaccgcctcgccctcctcaacgtctcctacgccgctcccctcctcatctcgaattcccctcatctccgaaaccctgactccccggccctcaccgcggcgcctctttcctccccttgccttcgatgcgcaggccgagaaggagatccaggccgccaagctccgcatcctctccgccaagctcgccgccacgcgccggctcgagtgccgccgccttctcctcgagcgccgcgcagccgacctcgcctcccgcgccctcgccgcccgcgccggcatcgacgccgcacgcgcgcgccgccgcctcgtcgcccgcgacctcaggtaggcaaaggcaagcccaccccacccgtgatccgatccgatccgatccgcccatctcactttctcttcctacaccctgaaacaccgggcatttcgtttttggttgttaagattcaaacatctgcatgctctgatcgggcgcgcagctcgatgaggggcgagatcgaggaggccgagaggagggagcaggactgggaccgcttctacgaggccaagaggaaggagatggaggagttccaggcggagtcgcggcggttcgaggcgcagactcgcgaggaagtgcagaggctgagggattcggtatctcaagtatggtcccgatactttgcatccataaactatgatctattgagctcatcagagtgttcctagcttgtttatcctaattaattgcaactggttgcttggcatctgggtgaaactggtaaattgttcgcttgggcatgctcaaatcaaacggcaataatggtgcagaggtgtttaatatgctttggtctgatctatctggccagtagcccgtcttctcggttcaaaactagccagtagcccgtcttctcggttcaaaactagccagtagcctgtatgtagtttattgaatattgattgagttttgttggcttgcccgatggaatggaccacaggggaagctggaagctagtaactcttgccatctagtcaaattgttgccttgccatttcattgcatttgacatggaccggatcaatgcgggtgataaattcttgggccatggttgttgcctcctgagttggatttgaattattgacaagcctgtgttggtccatgtgtggtttcactattcaaacagtgaaaaagagcatggttatcaatgaaggctaacctgtattttattgggtctatcccttactaaattatatatgaacactaaacaagaatgtgttatgtacctaaaaaaacaagaatgtgttatgaacttatggtgtcaaatggtcggctgatatattctaatgtctctcttgtatatgtgagatggtaatatcgagaaggatagggtttgttatttatggttgtacttggatcataagttattgtcgatactagatttgtaaacaggaacgttgctgggtgattttgttctattaggcctaggtagtaagaaatagctgttcatggaagttgtgtatattgtatatgtatatactgtttacatcttggtggattctctatctatcagtctatcttatcaagtagctattattttacttgcccgatgcaagaaaactattcatggggagtcatggaccatggtctgcacataaccataacttcacaatcacaagcatccaaataacattaatatgaatttaaaagacaacctgttcttgcataaagagtctgctctcctaagaaattgttgattggtccattttgttaggtttgcagtgcattgcagtgcaataatatagcacagtagcgaggaactatctcaaatggcatacacagttcaagatctacagacctgagccctgaggccaatgaatagagagccattgctcaatatcccaccaagcacttacagctacattattttttgcattgtttgtgtagctgtgcgttcatacagggccgaattaccgttctgctgatgttgtcaatttgtatctgcttctgattaacggatggttcctgtaatggctacagctgaaatctacactgcaagagctgcagagcagcgcgatgtactcaaacaacacggagattgctgcggcagaagctaggaagtctgatctgattgctaagaaggcaaagctgggcgagagcctggtttcagcccgccagttcagagcgctacttcagcagcagctccagaaagcttttcagtcacaggtggacaatggggatcaggaaacagctcaagctaccatttgaagtactactacttcagttccaatcatgcataaggaaatcgagggcgcctaggttggtatgcccagcgacttctttcggtttcatgcttgatatatgttgtacaggtggaaggggttcactgaagaacaccgtatggcacttcatcacggcaatggaagcatgttactcaattgatacttcattgcaacgcttgaccagaactcaggaggcctgtgcctttgccataagcagcaagtgcaaagcatatatagtcgccacatttgctgcaggatctttggcaaagcttgatccttgacgctgtgaagtgtgcagcgtactcctctcatcaatgtgtagggctagtcgcccccatttgcgtatttgcatgcagcccagaggcaaagtggacgctttagggttggtgttggtgcccccacgcacttgtaccatctcgttaaatgctgctgctgcacatgaggaagcttttcttgcgatgccaggtacgaatcgtccgtgcattg

SEQ ID NO: 4456 - DNA, 5902 bp, Sorghum bicolor
actaattatcggtcaaagtgtaatttctcgtagtcaaactacaccctaactaatattttttttcttgatgatgccttcccatgccattttcttatatttttcatgtattattttttaaatggtgccaagagatttgctgtaaaagttaattaaaagaaagaagtaaagtaacctacataggagtcaacaaactagaaaataactaaaaccactagaggggaaacacacaagaacaactaaaaccatcgaccactaaatgggaaaacacaagaacaactaaaatcatcgatcactagaggggaaacacaagaacaactaaaaccaccgaccgctagatgggaaaacacaagacatggcatataacgtagttcacctatgggaagccgatgtttgatttggtatcttaactacatttcttagtcttgttttattgggaaaaatgctaaacttgagccgggacttgtttggcatcgctcctcgtgcttcactcttttacgtctaagctttagcgcattgttcacatatagagccgaagcagcacaaaagcccctctaaacaagatcttaactgatttgatttgagtttgtaaaaagaaacctcgaatatacggaacttgaggcaggctagctaagatcaaaatactcgtataattttgatttgtttccatgctaggtgagacaggaccaaccaaaggtacaaacatgttcaaaaaaaggtagaagaattacaacatacatacggagggatactaggaaaaaaaggacaaactactcatgaatgatcatcgacacatgatctactaaaccatttgatccttgatgagtcgagtcacctcatatctcaatttttacttctcatatactgtaggctccgtttggatccacttaactaacaattagctattacctggtctaactattagttgtattatctagaaataagccaatgaacaggtgctttttacctggacggtagctaatacattagctaaagatatctcgaattagattttaccgggtaactattagttgcagagtgaaacaggctttttaataaatgtgttttttttttgctatttttattgtgctattttttcccctgatttctatctgtttctctgaatgtgatgcattgccacgtctcctagcgcgtagcggtggtttttgtttccttgtctggccttgtttagttccaaaaaattttgcaaaatcgatactgtagcattttcgtttgtatttgacaaaaattgtccaattatggactaactaggctcaaaagattcgtctcgtcaatttcgaccaaactgtgtaattagtttttattttcatctatatttaatactccatgcatgtatctaaagattcgatgtgacggggaatctgaaaaattttgcagaattttttggaaactaagggcactcacaatgcagactctatcatagagtctaaagttatttattgcctcgaacaatgtggacttggagtctaaataagacttggagtcttattttttctacctctttcttcaataaatatgctgccacatcagcaaaataccataaataatatgtaattaagtgtcttggactttgtgatagagtcttacattgtgagtgccctaaacaaggccctgggttaggccggaaagagctccaagtccaacacattaggccgggaaatggaccgcgcgccggaaaacgcttctacgagtcaaacccccacatttttttcccctacggaaccccccacccaatcttcctcactctctagctgttcactcgaccgacgacccatcttcctcgcccatccatccatcaagctgattccagagctgcttgcagccgcccgtcaccttcctccaggcttcgcctcgccctcgtcctcgcctccttccccccatccattccccattttcccacacctccgcaataactccctcccccccacgcctaactaatttattaatccgccaaacaccgagggagccacgccaccacactccctttccctctcctagctagctgcagcatcgagcgagcgaggaaggcaaagcgcccaagaaaacgccgcagcagccaccaccaccaccaacccctccctttccctctccgtcgcccgcccccgcctccgcctctcctacaagaacccccaccccgaccgccgatagctacctagctcccaccccgctcgcctcgcccctcgactccccaccttctccattcttccctcccttcgccggagatccaagaaacctagtgggggaagccagccagggggggaaggaacgagggcgggcgatgggaggaaggggcgcgatgctcgccgtgttggcggtggtgcttcttgcggcggccggcggcggcgccgcggcggaatcgagtgaggcgtcggccaaggggatgtaccacgcgctcttcaactttggggactcgcttgccgatgccggcaacctcatccagaacggcaccccggagatcctggccaccgcgcgcctgccctacggccagacctacttcggcaagcccaccggccgctgctccgacggacgcctcgtcatcgaccacctcggtacgtacgacggggaggggtttgcttcggctgcgtttgtttgctcgctccccagatttgggtgtgtgtgcctgactgacgggtttcctgggcttccttgccttgcctgcagcgcaagagtttggcctgccgctgctgccgccgtccaaggccaagaacgccagcttcgcgcacggcgccaacttcgccatcaccggcgccaccgcgctcgacacgccctacttcgaggccaaggggctcggtgccgtcatctggaactccggagcgctcatgacccaaatccagtggtttcgtgatctcaagcctttcttctgcaacacaacggagggtgagattcccatcccaccttctctagcttagctgaaccaaccactagtgatgcattatatatatatatatatatatatatatatatatatatatatatattagaaaattgggagactattaacggtaaaacttattacaattgacttcatttccttttgcagcatgcaagaaattctttgccaaggcactgtttgtggtcggtgagtttggcggcaacgactacaacgcgcccctctttgccggcatgggcatcccagaggcctacaagttcatgccggatgtcatccagggcatctctgacggtatcgaggtaggggtttccccccctcccctttgttgtgtattgtacaagggtagtcgtcatgggatgtgtttccaactgcaaatgtttgtgcatggtgcaggcactgattgctgagggggctgtggacatgattgtgcctggtgtcatgcccacaggctgcttcccagtgtacttgaacatgcttgatgtgcccgaagagggaaagggctcccgcagtgggtgtgtccgccagtacaacacgttctcctgggtgcacaatgcacatctcaaggccatgcttaagaagctccgggctaagcaccccaatgtgaggatcatatatggcgactactacactccagttatccagttcatgcttcagcctgaaaagtttggtgagctcttgcattcttgatctcttttatgtgataaggtttgcttatatgcttagatgtttagtcaactactacttggaatcaacactgttcttgaaaaacgcaacatattctaattagatagtttagatctcggtggagatgccttaaccttctctactagcgcattgctgaatatacaaatcatgttttgaatggcgagtagaaaatttatgatttcaaaatcagttgggctagcttaatggtcagagtatcttcaaagcaaaggtgcttacccttgctcatttggaacctgctatctagtctgtaaagggtcttttagctatcactgctattagcacagttcatttgagtgcttcccattaatagttgtctacttgataggaggcctttccattgaaaatgagattccattagaatggatcacttggagctaacagtagaatggtttgattcccttcactaaataatataaggatgtattaggacttaaaacaataatggttctgttaacaggttaaaattcaaggtcagggctgtagtaattattttcccatgatagttttaccaccaatccttctatggtattgtattttgagctgaactagctactacaatgacctgcatagctaatttaaaaatctatgaacagtagacacattatttttttgggaaacaatcgcccattacttaacatgttgttaagatggacatttcagaagtgtatatgcactgttgcaattaaataaaataatcagtgctttgctacccgaccttcttacttttgctgctccagtttctaagcattgctgaatcaaaaaaaatcaacaagtccttgttgcgcaaagtgcaaacacctaggaattgctcagttagctgaaccatcgttttgggcgatcacttttgtttctacctactactatctttccttgctgaccataatatttttttaatagaaaaataaaataacaggaaaaggcacataacaaccatctgcatctagaacgatgccatgtccttgtcatctctagatcacatgtacctgatttctagaatttccatcacgttgttgctctgtagtagcaagcaacctgtactttatttagcttgaatttgctgatggagacagttttcctgtctcaactgctagagaaaaagtaggcagatattgttgtcgattaaaacagaaggcacctttgcttcagtcattaggcctttgattctaatgcacgtctatgcagggacctaacaactgtgtttttctcattcaggttttgccaaacaactgcctagggcatgttgtggggctccatctactcctgagagagcagcttacaacttcaatgtcacggccaaatgtggcgagcccggtgcaactgcctgtcctgatccgacaacccattggagctgggatggcattcacctgacggaggctgcttaccgccatattgccaaaggctggttatatgggcctttcgcggaccaaccaatcatccaatcttcatgatcacaccactcctgttgtagagtttgtcaaagtagcgcactgaaagaaaatggagcggggaaagtagttcttccgtacagttccaatgtttgcatacatgtacatctccatttgattgtattcatttgccattgggggtacaaaggtgggataggaggctacacaaaggcctgattttcttgatttgtcaggtgggtataaatatgaaaaatgtaacgcacagataatcatgtatattgtgtcccggaaatgtgatacagactgtctgcttgaggagcttctgattctctgattaaagatgagccagttttgcgattcttatactgcagcttttctctgaacatggtttgcattgttgttcagagatgggatgagctgtgtgtgaaatgatatgaacaaacacatgtaagtccggtttgtagctgtaaacaattagagtactgccagcaactatcttttctagtgtttagtgaacatggcttggctctggctagaagaagaatctgtaatataaaactggcggtgatctgaacggacggatttgagaacagtgcatgcaggtgggagttgagagttgaaaccaatgaactgaagctgatctgttgtactactagtagttagagttgtttatcccactgccatgtgggttagcagcccacgagccctattttcgcttttcaagtgaccctatagaccctagctactggttttcaagtgtgagttgtaaagagatttcttgggtacttaaaaacaacaaaatccgttcaaactacggtggcaatgcaaacaagagatggagagcaagtagtctgcattcaca

SEQ ID NO: 4457 - DNA, 4278 bp, Sorghum bicolor
ctacccatgtgtcactaagacctgctcgccgatgcgtcttctcccgtattgcttcttcttcgtccagcacaaccacatggttggggccctctcccttgtacgcttggtattgacaacaccgacacgtgctttcacccccgacgcgttgttggatctggcaaatctagctgcgcctcggcgcttaggcagcttgactacatcgacccttctgtttccaccccatctgcttcaattctgtcgttgcctttcttctatgtctacgacagccttgactacgtcgacttcggcatcaccccctcccacgacaactatctcaacgcatcttcatcattaccatggcgcccttgtgtgcattcagctcaatcgacatgcaacctgaccacaactacgttgacctcgaccatcttcagcacgacttcttcaaccacaactactgtgcccttacgctcgactacctcaacataggtacaaaagggataccgcctttgcttgagggctcatcagcttcttctctaatcacatcatatgcagcgcatcgactgttatgaccgagggggatgtacttattagcttcttctctagtcttaccgtatgtagcgctcctgctgtaactgtaggagatgtttgagtaaatagaaatagtatcatattatgcatccacataagatgttagtcctatatatcttgtataatcagcccttaaggctcaacaatatatctaatattccactaattatattgtggttcagttagtccacacggaggctagtacttgtggcgccatttggctcatgtgctcatctctctttttcttttaaattttggacatgcccaactgaactaggtagatcataaatttatacgcacaataaaaattatgataatatgttcggttgaagtctagatagggatatttatctagaccataactttccaaagtatagccttgtttagttctaaaaaagtttacaaaatttttcagattccccatcacatcgaatttttagatgtatgcatgaagtattaaatatagatgaaaataaaaactaattacacagtttggtcggaattgacgagacgaatttttttgagtctagttagtctatgacaggataatatttgtcaaatacaaacgaaattgatactatttacattttgtaaaatattttacaagtaaacaaggcctatagagattctcgaggagaaagcatcccaatggtaagcgtccctatggtaaaccgaacagtttggatttgccaccggtaccgccgaatcaataggaaatctcgagaaaaatttagagaatttgactatttttgttgtgaagattattttagaattggtatagtaaaaagcaggctccaatagatatactacctgattttgtaaaataaaaaaattagctatcctttgattttttgtggccatatataaccaaccactaacactgactaatatactacctgattttgtaaaataaaaaaattagctatcctttgatttttggtggccatatataaccaaccactaacactgactatcttattttgtaaaatagtaaaattattgtggacttctttttttttaattttttctattttataaaatagataaaaatagaatttaattattaattttagctaagcagtggctcctagctctagccgcctttaaaataggaaaatcaggtcgaaactcgaagctcctgccgaaagcactggttgcgggcgcgctttcctcgccactcttcctccacctccctccaactccaacgaacacccccgcgagctcgacgatttccccgccgcaacaaaccaaaacgaaccaacgaaaacgaagctccccacccacccgcctcggtggtgccgccgccatcacatatccccccctcatttcccctttccctccgctccgcctccccactcctcgctcggtcactcccccacaccgaatccgcgccgcggcaccgggcccccaggaccgcgcccgcgccggcggccatgcggtgggacgcggcggaggcggaggcggcgctcgagcggatctgggacctccacgaccgcctcagtgacgccatcctcgccgcctcccgcgcgcacctcctcctgcccgctcccccgccccctcccgtgccgtccgcgccctccgccaaagggccggcctaccgcgtcggcggcggcaggaacggctgcgtcttcgtcaagggcggcggcggcggaggcgaggcgctggccgccgccgcggaggccattgccgaggccaggagcctgcacgccatccgctccgcgctcgaggacgtcgaggaccacctcgagtttttacacgtgaggctcctgctccccttccaccccctctgctccccctagggttagagcatcccagtcccagctcttctagggtttcgcggttcgtacttggtagtgcgagttaattctggttaggaccaccgcttctgtgacgaatgggaactgcttttcggagctcctgtcgcgcgttcttctcgtgattcccagtcgttgcgttcaatcggttcaggcatgagaaatcagcgagtcattagcaccaataaataataatgcccatgtctgtgcttgttatgtggccaattgatccttcgttctcgaacagaattggacggtcgtatctgtggtaatccacaatgaccacttgtgttttaatggggtataatgcttgtatgctactctgctggtacaaactgagttgctgctgaatatctattcgactaggtgggttgtcaatgttttgccatgatagcaaatatttatttcttatttatgtagtgttcaggtcgtggctcacaagtagttggccacttgcgaatggcagatatctcgatcacaggagccatgtggatgctaagggcgtggtagtaatccacatggatttggttgcccttccagtgcttgctctcttttgcttttatatctgcacttagggcacaatattaatatcttgttttatagttgattgttactttgtgcactcattggcagacttccttgtcttgtgatgtgaggacttagttcacttttctttaaattaaattaaatctgctttactattttagctaagtgagttctcagatgtttaagaaaaacatttcactgccagaaaacttcccacgtccaaggattagtggatttagtggacatttacatgcatattgacacttcagagtgccagggcttttagttaacttagttttacttgttcctcttaggtgtttttgtgagatctatttttcacttctgttaatcttgcttcacagactgttcaatcacaacagcgggcggagcgagatgctgcaattgctagactggagcaaagccgtctagtacttgctatgaggttagcagaacatcaaggaaagaagtatagggtcatcgatgaggccttggcatttgttggtgaagtgagtgacaagagtcaatttatctcacctgaagatgttcgtgctacccatagccagtcagaggataacaggggcaatggttcaaggattatgtcaaatgtgttatcttgcagtttgtcattagccaagaattcatttcgattggacaagattggcggtgctctcggtaacgccgcagtgtttgcagtaagtatgcttgctttcttgcagctgcatcaaattacatttggaagtaaagcaccagccatggaatacaggaagagaatcgagtacaatttccaatcaggaagctcacaacctaccgggaaaggaaaacttctggaggtttacctagctagaggctgaagaattattagatcatgctgtttggatgtacagaaagttttgaccaaagttcaattttgtgggttttgttagggcactgatcgttctttatgacggactgaaccctgttccatgcaactagggaactggctgtccgattcttttggatggatttgaaggataccacgtattgtatctcaaactgtaaatggctttatgcttagagatggattgtttgtaaaccatgttcaagctaacttgaactgccgttttcatccagcctctacgttcttgccagttttgatcatattcattctacaaaaagacagcttcttgttgtgctcttgaggaggtgtgttcaaggttcgtcgcttgtgtgacaagtttgaggccttgttcagttcgcaaaaaccggtgaaaaacggcactgtagcattttcgtttttatttgacaaacattgtccaattatagagtaactaggctcaaaagattcatctcgcggtttacagatgaactgtgc

SEQ ID NO: 4458 - DNA, 6515 bp, Sorghum bicolor
tttggagtgtacggaggaaaaatcatgactgtagggatcaaaattgtgggtgaacttagtataatttcaatggtccatcatagtatagactagtatagtgcccgtgctaacgctatgacaatattcaaatttgcaaattataactgaaatatatttaaattaaaacaaaccaaatttcattgcagaaaaggcaatataagtgttccaggtaagaaagaaccattatccatgccaatgataggggcaaaacaatcctgacaattatgcaagcatcttccatatatggggactattatgctacaacaatctactatgggcacactcctaacttcctaagaaaagtaaggtcatcaataatataattttatttcagctatatcctctggttaattttatccccttccaaagattgcaaagaacaattgtgcgcacattcgtcatcagcactgcaatttaagacagacgaatcacttattagccacactcttggaaggagaggaatcaagaagggcaaaatgccagcaaattagggttcagcctagtggaattaaaataattgaaaaattttgctgtggggcactcggattatgcaaaattggttttgggacactgaaaccatttttctttgctgtggaacattattttctttgctgtaggacactagacggtgtgttacagctaatatttttttctccagtgtcccacgactaatttcgacaattgttagtgtcctgtagcaaaaatcatcagctagagaaatgcatatccggccattgttcaagcaaatttacaaattagtcatgacaaaggattaacaaaaatagggagaaaattgcaacataattaaatcatatatcttgttcaagtccagaaaacttcaccgtgttgcaggtaataatgagtatattttggtggtagtgagtactaaccataaaagattagtattattttccaatcatcttttcatcccactggcttcctaaaactattgttagatcattcaaacaaggaaaaagtctatttttcctctctcaacttttgctaacgtctattttctctctccgaactctaaaattaggtaaatcatctccctcaacttttgaaatagtgtgttttacttcccttgcccagttataagcggttttaaaggcagttttgtcttatttatttattttgattgaatctttaaaaaattatagtaaataactaaaaaaatcataaaataaaaaatctagttttgttggactctacatgacacagtgaatatataatatggtatgttttagtataaagtttttgctgtaaattttgatctattcttttctgtaattaattggaataatttataactgcagtttctatagttcaattgtgataaaattttatagtgacctaattattgtatgattgaactgtagtaaaaatttcatactcattttttctggaatacgcaggagagctgcgtatcattgcattaagatatgagagaaaaaattttatcataattggattatagaaactgcagttatgaattatttcaattaattacaaaaaataatagatcaaaatctatagcaaaaaaattatactaaagcataccatacgttcactgaaataaaattagtttttctattttatgatttttttatgatttactataatttttaaagattcagccaaaataaaaagaaagaaaaaggcaaaaaccactttcaaaactatttataacgaagaaagtgaggtaaatgcacagtttcaaaaagttaaaggaggtggtttgcttgattttgaagtttagagaaaaaacgaactttcgcaaaagttaagaaaaaaaagtggattttttttttcattcaaacaaagaaatatgtcaagtgcccaaagctctaatccagcccatcataacctagctaatctaagcaaagatgttcaaacccatcgagaatttcttgtgcgtcggaggatacccaaaacgaaacgtctccgtgtccgtgagcatccacacctccactcagcgcaccagttattgctgcactagccagtagcctgccgagtgccgacgactcgccggcgtgcggtgcggcgccctcgttgcaagcaaagcaagcgcaggcgcagtacaaacagcaggagcacctcatcgcacgcagagggaccagatatgctctctgcgctcctcggcggctacctgaccgcctacccgccgccgcctctcccacccgcaacagcagcagcaccaagcccgagcgcgcgtctcccggctcccttccctgctcgcctcaggcacgcgtccctccacgtcgcccgacggcgcgcggcgggggcgggggaggcgctgagcgcgtcaaccgcctcggagggcgacgacgagtacgaagcggcggcggcgctgcaggaggaagggttcccgagctggacgggcggcggcgaggaggaggaggaggactacgaccacgaccccgaaatcggagacattatgggggactatttcgacgaccccaagaaggcccaaacccgcgtgggctcccctgtctcttctcttcttcgttctgacgaatgcacaatttggtgtttgctttacgccctgtgctcgctctcgtgcagatggaggataggataagaaagaagcgccacaagatcgtgcaaaccaagaccggctcgcccaaccccatgaaggtcgtcttcaacaagtaatgtgctcctctgatgctgccatatatttgtacagtgtgcaaaatgcagttagctagataggactagtttatacttatactgtgcagtttgaactgacgagtctccaaattttcatttacaaaattggcctcctaaatagatctgtcagtgttaaattcttttactatattttttgataatggaatagaagtatcacagtctccactccaagtgaagtgattctttagccgttcattattacaattgctgcactcgaagcaaaagcaagctcataggtgaaaaatagcgacccaacacctttaaaatagtctatgtgtacttgaccagcaaaaacctctatcgtggtgacctccaaagccacttctgagcatgattcttttacagtatattgttaaccatgatctcatgaaaagtacttctgagcacgagcccaatgtcgtatgtgagatgttggatcaactattggtgaaaaatcacaaagtttagatctcgagtaccttataatgttcaatgaagaagtcaaactattgacaaccattttgagatctttcttgattgcttaatggagttttgctggtttcctattctagatttgacttctccaattcatatatatggttcgagttctacaatgctctgttgccaaaagatgttaccttaatttctgatgtgagttctttctctttattttttcccaacaggaagtattttccacacttataaaagaagcatagtatgtatcaaatctatacgcatgtttgctcatgatgttgcaacttcccttttattgtgcttgcagtctctgcgatcgtggcatatagttggccgtcttggtggctgcaattctatgaatatgcaggtataatggttggaccacatttatgctgtctgaggccttgttcagttcgcaaaaattttcagatttgacactgtagcactttcgtttttatttgacaaacattgtccaattataaagtaattagacttaaaagattcgtcaagcgatttacatatgaactgtgcaattaatttttgttttcatgtatatttaatgcaccatgcatgtgccacaagatttgatgtgatggggaatcttgaaaatttttgggaactaaacaaggcctgaatgtcattttggacaacctttttttgttttcttgtcacgtctttcaaatgtagtaaggaaacaaagtggttgaaatgatactagtcagggtaacataatccttccattagtaagaatgtaaaactctgacctccattcttttcttcaaaatgttggtaagttaaatgatttgatcaaacttctatgctttgaactaagggcttcaaaagttcttgtttattttacagttatcgcagttgcctttagattgtaaaaggccaacttatgatgctcttgaaggagctaacgtcactccgacgtccttttacaacattggtgatcttgagattcaagataatctagcacgagtatggtgtgtaatatttctcttctaagctggctttacaaactgtagactgtaacctttttatgttgtcatgtgaattatcgtaactcattgaactaggtctcatccatttcccggtcctcaaattattgattactatcatctgttctcacatcattctggattacaaacactaactgtttgggttgacaagcttatgaaaaataccataaatacgaaaagagatttatcacattctagactctctgtattctaatattcatgacataagttccatcaatgtgggtttaatcatgaaaaatcatttttaggtgatttatgaatttgtggtgcagtaagcctgctggaccactttggctaaaaaaaatactgactaccatttaatactagtacactgcaatcctatggctttctagaaagctgtagctctatccatgcaattgtatctttttgcaccatgtatgttcgaaaaaatatttattccagagaaaatatgcagatgcataccttttcaatttctaatcacattgatttaacccatgactctttattttcatattattaacttgcccagggtagacattggcattcatgagccattgcttttggacatcctgcttaatgccttaacaacgataagttcagagtaagaaccagacttttgaattgtcaatattttggtaatttatttacttgtattatgttatttctgctcatcaggatctggtttctaacatatggtgcacttctatatttatatcttgctctggttttctgtttggcgcctctaaaaattaaaagtatgtgatgtggcacaacttgagtccactgcaacctgtcccacaggaatgcagtatgttttgccgaactgccatgtttgtgagccctgtgttccacagcttatacacttttcttctgttataggaggagaaacaaactgtacgttttattttaactgaagggaagtagtaactactgatttggaatgtaatccttgctagaaaggtgttcctgtagtagggcaagattgggcttgtggggtttggcacaccattatggaggagcacacttttttattgcctcatcataactcaacatagtgttgtactgttgttactcatgaaaaataatatgcgagctgcctcttatcttaatgcctcatttgttccagattaattgtgtctatgggtgtgtggggggggggggagggggggggggggtccaagctgacactacttagtgcttactgtatttggtcatgttaatttgttatcatactcctgtgtctcatccgttcttctgtttgattttttacagtcatgttggtattaagcaagtacagtttggagggttagagtttttgaactggagtgaggacttgaaaacagaagaagttggatatagtgtgtgcaaaatctaaaatagcacgatcctgagatttgcataagcagctactgttttagctaaaacgcaaatacagcatctggttccagaacgtagggtttcaaccaccttgatcctgcaaatgagaagaaaaatggtgacaacacaatggatgaaaagttgatgtccaagcatatgaacttctgaaaagaggttgcggtccttacaggactctgcaagctactcatcattggtaatccttttggatgcatgtaatatcccaggtcctctgatgtacaacgtctggattgttactccacaatctgacactagctggtaggtgaaaacttgtaaaattatgttttcttagggcttgtttggtacagctcagtttcactgcaaatgagaacaaaaatggtgagaacacagtagttgaaaacctgttgcggtttgcgtttatcgatatgcataaatatagttcttgtgaaacaattgttcaatgtgcaaatacagtagattcatgtgattatgctaaactgaagtacatacaaactgaaaatacaatagattcatgggccgagtccaatagcaggcactgagagcaagggagaaggcaagtcaggggaaggaaactggtgctggcaaccatggaggaagcggcggctgtggttctggacgagtgtgggttcagtggggcgctcattgcgcggctgcgcgcagagtggaggctgttgtggagcgtcgtggacacagggaaggggcagcacggtggcggctatcaagaattgtactccctcagtatcgcaaacaaagtcataacgacacggtttttaaagtccaactttgactctttattttttataaaaaatatttattaaaaaatgatatatatatatatagacacccataaagaaagtacttttcaagacaagtctattcatatgtttttcatatttttaaatttaa

SEQ ID NO: 4459 - DNA, 12733 bp, Sorghum bicolor
cctgcatgatcttcatgttcttcgttttgtcctttccttatctttctggtagccaaaaccaatttaaaaacagtccaagaacttgtagaccaaatcaatcttgtagaccaaatcaatctcaatcttcatgttcatgatcagaaagccgcaagtatactataaggaatatgctatattacccacatgttaagtcatttttgtcgcagatgatactcgatgccacaagcaacatggccgcactagaagttggcggaggcccctggttcaatgggtggaaagggacaactgttacgaacgaggctgtaaataacattgtgggcaccccaatcgatgtagagagtctcttcccaatcccatttcttaagcccccaggcctgtaggatcacctaggaatgtcacaatgaagggggaagtgtcattgatatcaatgtggatcatgcactaaaattttgtccacctcaatagtaattcatgatttttccttgtttattactacaatccacaaactaccagggtagtacaaacattttttttctggactagttcactgcagcgtacccttgctctggagttccagttgatctattcgtccaagtctgcctgatttgatgttcacctaaactgttatacaccgtttctatttaatcagttgtttttgcctgtttaaatgctgtttagatgtctgtttttcttgaataacggctaaatgacaagtggtcgactgtttaccatttaaagttaggataagactgacccgattccaacagagttgagacgccgagttcaccgttgcagggatgtgcccagaaacttgttgcagggatctgacgttacatgtgcatcaacatctttcttagctcacagttttccctttttttcgaaagcatgacgcttttcacagaaccttctattgttggggaagactatttcagggcagatagagacacctctctgaatataatggcaaaatggagcatgatagggtgaaggctagagttatggagcccattttagcaagggtccaaaaagttgtagcagaattgttgtcgttcccttttagcccggtctgagtctctgagatgtgatgccatatggatcttgtagggctgaaattatgcagtcctcttgcccattgccaatgcttttgttgtcctggtgggtagatcggtgcctaataagtttatatatatgaatcaaacagttttaaaattagcattattacttaaaaaagtttgatgcgatggaaaaggcattactgtacccacaaaaaaaaaggcaggcattactgaaagggtttagtattctgcttccctagactggtttgtcatgccccaaatccttagaacaccacgagtctaaaccaaaatatcttgtaatttagaaaggcagacacattatttacataataactacaataaaatgccagggcgcgaaaactaaacccacttggcctgcccttttgtttgcatgaagttgactcttctatcggacactgtagcactttcgtttttatttgataaatattatctaatcatggactaactaagctcaaaagattcatctcgcgatttacagtcaaactatgtaattagtttttatttttatctatatttaatgttttatgcatatgccacaagattcgatgtgacggagaattttgaaattttttggaaactaccaaaccacaacaaatttattcattcctccatcaattctatcgtttcttttcttctgctcttaaatgtctccgcccatcgttctgaccatgctagtccccgttcgcatacaccacatacgtaccatagtgccacccaaaccacaaaaacccggacacacgctcttccaatcgctgacatgataaaataaaaaccttactgcaccatcgcattcgcgtcgcgtcgaatccatctcgtctcctgtttgttttgcccttttttttttgtgtgttcctggcgatttatgccatcacatctggcgctgctgtcgtgcctgctggtactggtcctctcgttcgacaagttcctcttccactacctgaggcgccgctggttctccggcggcggcagcggcgccaccgtcccgagggcgcctgccaaatcgcggcggaccatggcggccgccaagtggagcgagacggccatgctcgtcatcgacatgcaggtctgcttcttctccttctctctccacgtctcgcaggggcctgtttcggtttcttgattttgagttcaattctgggttctaacggcttggtgtttgctggaattggtggctccatccagaaggacttcgttgacccggcgatgcgcagcccgatgctggtggccggcggcgaggccgtcgtccctgccgttgccgaggccgtcgccgtcgcaagggagcgcggcattttcctcgtctgggtcagtttcgccatcactgttctttttggccttccctatctgcgcagtttctttgtttagtacaacatctagattattattgggtcaatgcaacgaggcgtactgatttctcggtccaatcgaaagaggaatcttttgttgcgcgcgttctaagtaagttcttgacacgatgctaggatccaaatttgctgcctccattccgtttagcttcatttttttttgtttgcgcttttgacacgcaaggaacatcaggaattagcacgttcagggacatctttatccaaaaaaaaaggaacgttcagggacagaataaaatacctttatcccagaggtttctccttcaatgcaatgtgtgatgcgtgtcccctaccgttaataggctattctactaatttccctcttgtcatatgcatgtggtcgcttcaacaatttctaggttcattgaccaatgtcttgttcctttctggaccatcctgtccgttgtaagtgcacatgccactcctgaacctactttagtcacagcagtactgagggttgtttgggtctcaacatctgcagcaattcagcattcgatggctgggaagtgcaatggttcttggaatttctcactgtgtctgctctgattaactactaattcggaatagttcccttttgccttccactttctctagggataattagaaccagatcctgttaaaaaaaatcacaaaattgagggttttacaatatatgatgtttgcaatgaatccatccgatttttttgagaacgcaggagaatgtgcatatagttattttaatgatgataaggtaatgagttgggacacctgacctaccatatttcttgattagctagtaggcaagaacacaaagcccatgtgttaaatgtttaaatagtgtgttcttctaaactcttcttcaaaagtaataaaacaaataatctgttgggtatatatttccaatttcaggaacttgtcctgcaaagaactagattgtatactgcttgaagcctgaagattttctaataagttatcctgtattctttaaatcatcttggatgttcaggtgtattggtgtacatgtactgtgcttaacatgtttttcagatattcactgaaaacttgtggcaagcaatatctcatagcataacctaaagcttttcacataaagcagcatatcattcagaaagtagagtaatagatttaatcgtctggccctttcgttgctctctgccgagacattgatgtatagtgaactcgagtgtaggttgtcagagagcatgatccttctggaagagatgttgaacttttccgcaggcagcattactctgggggaaagggtccaacagtgaaaggtctgaaaggagcggagctggctgatgggcttgttattaaagaaggggaatacaagttagtgaagactagatttagtgctttctttgcgacgcaccttgattctgtcctgaaaactgcaggaataaagaacttggttattgttggtaagcactgatatacatttattgatatggaactgactgccatttcactaacattatattgatttctgtatgattatatccttgttacttaataatgttagtccttttccttctgtcaccctattcaattcttcatttttctacaatatagcaacctgtgcacccaaaaagggaaacttagatgccattctttcttttctgcttgagagagaggtcaagatcataaagcattatggtacttatatatgtgctttgattttcaggagttcaaacaccaaattgcattcggcagactgtctttgatgctgtagcattggactatgagaaagttacagttcttattgatgcaacagctgctgcaagaccagaaatccatttgtgtaagtactcatgcttcataaatctcctatattactttccacatcaaaatgatatttccactctttagaattttatatgctatgattagactgatgttagacatgttcattgacattaaataggaaaagcttgtattctagattttctgatcttataaatttatttttaaaagcagtagattattcataacgcttattttttacggtatacatattttgtcccacccatacacagccaagttttattttaatttttattttgtcctatgtgattggatagatatttaagttatggtattgggaagtgatgagccaaagaacagacatattctgtgtcacagtaatttgtaatgttctgtttcagactgctacatcttttcaaaagctgttcttatctccaattttgtatgcaactgttagttggaactgtctttgttggacctgtaatagaaaaaaaaaatcccattagaattaccaatatcctctagctaactagattccacagagcagcacagcagtacagtatgcctagtatcaaattctgaattcccaatcagggcattagataaagagtgtacaattattgatttttctcttgatttttttgtcgaatgcaaggcagatacacagttgaaagtgatctgatagatgagagataacttttcattgcaaaatatcggcatagtttcaatccattaacaaattatgacttaaattagtgctttatccacagtttccattgtagttatggaaacagggcaatctgtttcggaaaaaaaaatccaggttcacaaaaaagttagaattgacaatatccctatgattaactagattcctcagcagaaaacccaacactctaacataaaactctgtactctcagtatgcattggatgaagagtatgtacatctattgaattttcaacatagttttttctcaaattgcaagtaggtactcgtgaagttgtagttatctgatggttagacgacagatcatttaacccttctatttcgtcatatgttcacatttttgaagtaaactaggatcatgcccgtgcgttgcaacgggaaaaagatagaccatactctgtaataatttaagtttacacgtgccgtaattacctaaaattgatgtgcttgagtgtaatacacacatccatgtcatacaatcctctcatttttgcatatatgtaacatatcaaaaggttgacaccaaaggtaagaccaataatatacatattcatggagtacaattctaagcatcaaaatcgtgtctccatcatcataccatggaaataacttcaattcctcatttgctgtcaccaaaagtgcttctccctctcatccgtttggtgcggcttcggctccttgcaagtggtatcgtcgaagtggcaccagacatggcctaaaatccctataatacttttaaaagtaaaatacataaaatcttaagtcggaatgagggcaataatctacaatggaatgcacatatactttacagtgaatagcaaaaaaaataactaataacctaaaaacggagtgaatgatcccattgggcatgagcatcgacaaaataggatggaggtcgaggcaaaccatcaggaagcagattgttggagccaaaaaaacacccaccgggagcacctcaaattaccacttgtatacctaccggtatcaatggcaatttatttttagtatccatgattaatcatattttcttttctaccaatagttaactgtaagatggtataaaaaataaaattgacactatagtagccctgtgatattcctacattataaatgcccacatattcatattagaatctagatcaaattatttagtccacattagaagatcactcttgcagaccaatgcatacatctataaagcaaaagcaaaaataagtgagatgttttcataaaacagaatatgatagcagttttttattttatcttgaaactaacaaacataatgttctctctctctctcattccacccctctctctctctctcaacacacaaacgaacaaacaaacaaaatcactcccttgtttatggaactaacaatccccctttgcttatcaaacactatattgataaaacagtccaatggagcagaaagccagacacctccatatgtaaggctggtatcatgagaatagaaattcaaaatcatgatatggatataaatgctagataggacagtccaatggagcagaaagcccgaaacctccatatgtaaggctggaattgtatttctagttttctttatttactataagaaaaagagactatatgacatcatcatgatgtcatcctttaagaatcagagccaatagaaaaggccctaggtggtgaccaaattatattgaatatgggtagctgaacaaattaaagctaatctttatgccttgatgtagtctgtatatgcaaaccacaccaacagacatattgcagaggcatattaatattatacaatcaatgaatcacaattgaagatttaagaggcatttatatccaccaagtacctacagagcatacgacactaaggcagagaaggattaattagagtatccaaaacttcaactcagccgagaaatgccatagtgctagcttgcagtcctaaaattgaggtgtctcaacacatattccacttgggattatctgaacctgcaactatgacctataatcagtatcaactaaaagggtagaagccactcaacaaatacaatgagaattagagaaggtcatggttttgaagagctgcaacaaaaacaacatgaatcctccactcacggcatcaacaacagaatctcagaatgaagctttcttttgtaacctttagcattcagctgagcttcaaagtcaagttaattggtcatgccaaggttagcttcctcgatggcaccacctaacttgttgtgcagccattatgtcctagatccccgagacaaaagcttacttgtgttgaatttctatagaaagtcaagaacgttcaggaaattcctcctggatgctgcagggaaagaatgagaaaaacatgattctaagttaaatgtttggaacacaagaagaacaagacttcataaacaaagtacatagtacgaacaacaacagaccaaacacttccacatctaatgtagaaagggtaactggacagcctcatccaaaatggggatgccagtgctgaatgaaggcaagacctttaagtcaaccaatatttaagcttcattattctgtttctactttctactctagaccctaactgctaattcaattttggcaagtgaagggcgtcataatgcagaacatagagagttcaggttgtatatggtaaagctagacccaaaatatatctatgaaattatgcttagcacaagttgtaatatatagtttataaagtcttcttatgggggcacaagtttaatcaggaaaacatgtcatgggcataaagaggggcgccatagggcgcaagtgtcctagttaggccttaagcccattagtgttaattagtgtctctcttagttatttgtctataggaatagtaccatattgtctaggcataagaggtgttagtcctatgtaccttttatattcagcccatgaggcacaatggaaataaagcaatgaattatgaagaaacaattctagtctccctcaatctctcaagctcttggcaaagcataaggcctagttatcccaaagctcttggcaaagcataaggcctagttatctatatcccaaaaatacccacgttcataacatctagagtccagcgatcctccttcatcagccggatcctccatcagccgaatcctccagcactttcgatcctccatcagccgtttcaaaaaaaaaaaaaagataccgatccagatcgctgcgtcgcctacctcatccatcgtgccgcgccgccatagcaacgccaccagccgccgccgcacccccatcagcacagccgccgcgccgcagccccatcaccaccatccaccgctgccacaatcatcgatccagatccgccacaacacatcgccgctgccacgctttccctcgatggatttccctaaatttgcggggaaatctgatcctgtgggcttcgtcaaccagtgcgactcctacttccgccgagagcgcatcatggaggaagaaaaggtatggctggtttcccataatttggaagatgacgcccgggtttggttcctacaagtccagcatgctgaaggcaccccggcgtggcgtcgcttcactgagctcctgcacctgcgcttcacatcgcccccgtgccccgacctgctccaccatgtgtcccctgctgccaacgacacttcccgcatctttgctgatatattcacgcagctggatcggatcaaggagttgctcaacgcgaaggataagaaggaccgtgaatgtcgggcggctgtacgtctccaggcagcagcacggagactcctggcacgtcgccgagcgcaggctcttcgtgccacaaaagcatcgaaggagcaagcaacggtgcgcctccaggcagcagtgcgaggaatgcttgtccgtcacatggtgcggcagatacgcatgctcctcagctcgacgttgtcgtacgtgttcattcactcggactcgccgatacagcctgcggctccaattgcagtggaggtccaagtatgggtgtttccagtgcagcgacctcgcatcagcatccagcatcaggcatcaaaggctatctcattcatccttgtgtctgtcgtggtgctagacactttcagcataagagccggctgcttcacactccacccttcagcctacatgaagccagcagaggcgctcttcccatgggatccaggtggatatccttgtattttagtattcaataaaaaggggaagccgagatgtaaaaggcttaaccctatttcgcgtcagctctccagctcgaggacgagctgggtctccaagggcgggggagatgtcatgggcataaagaggggcgccatagggcgcaagtgtcctagttaggcgttaagcccattagtgttaattagtgtctctcttagttatttgtctataggaatagtaccatattgtctaggcataagaggtgttagtcctatgtaccttttatattcagcccatgaggcacaatggaaataaagcaatgaattatgaagaaacaattctagtctccctcaatctctcaagctcttggcaaagcataaggcctagttatcccaaagctcttggcaaagcataaggcctagttatctatgtcaaaatatccacctcgttcataacaaaacatgaataccgcatagagtaatatgtaaatatgaaactccgaaatctctaaatctctaaacatgaggcaataacacaactctctgaatctctaaatttctaaacataaggaatctctaaatatgaatccaacgatttttcttcccaataatattttagtcagatcaaggatcaataaaaaatcaataatcatcacacataataaaaagaattggcagtcatcacccagatgtcacaatcatgcatcacactacaacagtgcacaccatgagacaaaaatagacgaagtggattctggtgctttcttacttcttctgaccagcaaagtgcacaccatgaaatgaatcttgtcaaccacactgactaaatgtcgagcatcattgtctctatctctatttctatctttacaactattcagttaaggcatgaattatgttttagcatacttctatattaccaaactggactttagttatgtggtcaaaggaagatcagtaattgataattttttgtgcaagactctgcaatctataaaatttggtataaaagcaatctaggttgtaaggtattatcaaaacaaatatctctaaatttcacataaacaccagggggaacatatttcagggttcttgcagccgggcaacacacacataactacaggcacggatccagtaaaagtcgtgggtgtgcacatgctcggatccagtaaaagagtaaaggacatgggtgataatatttgaaaggggtcgaagttagcaggcataatacttgcatcctactatggtgacactggaagaaacattttgacgagcagcttaggagcacaagcaacacacctcaatggacttggtgttgaggagatcctcgctgcaggtggcctgattctctctccttgggcgctggggctgggttagggaagacaccggagaggaggtcgagagagacgtcgcgggacgagacattggggctggcactgggacagacgaagaggcggcgcggagtcgtcggaggctgccccctgggcgcgggcgtcagggatgcgcccaaggttgttggggctagacgaggaggaggttgtggtagcagtggcagattcgtcggaggcgccctgggcgcgggcattggggatgcacccaaggtcgcggcgtcagaggtcgacctcagagcttcggatggccgccagttgggtcaatggcctgatcttgacgggttcatgttcttgcagccgggctgggcgagggtgctgctgctgctcgcagggcgctggagcgagcgagctatgctgggtggcatcatggatgaccttcgttgagggtactgaaggtggagctacggttgagcgtgcaggagagaaggacatgggcgtcgtgcgggtgatgctccagtcatgcgcttgcggcaggcaggacgccagagagcccaggcgctaggcagggtggccgcacgtgctctccgctctcccccgacgaacaggccaatgacggcagcatcttctatcggtagcggctggctgctacggtgctacccacggccgccggcaccaggtggatggctcgggatagggcagcgaggaaaaaccacatcctccgcggcacggggttgcggctgctgcgcgcggcaaggaccagggagcgtgggcgagcgcaggtgaggacggcatggtagacatggtgcctgtgctacgagcggatgcgaggaagagacgctgtggcataggcgaccgtggcgctaagggaaagggagcgcaattgaaggtagcatctcgcaagggagggagcgttggtccatacatgggggagcgtgcgtgcgtgcgcctggagagccaacgagtgttggggtccaccacgtggggatcctacgcgtgctgcggaagtctgagagccagcgagccatcgcaagtctgtggacgattggagtccaaacgttttagttgtagagatagagatgtaggactttacccatgctttgtgcaggttcacaaacgagttagtttggatagacaccatgtatagaccttagctaacaaacatttcggaaagctatgcgaacttttttgaaaggtgggtttttcagaaagtagtagtttttttaactaaataagcatgagaaaagcctgttacaaaatattgttgcctcaagaagaaacggccagagctcctgctatcgaatttaacactgcagcatctgacagttggcaaagatgatatactgtgatataccgtcttgttagattcctggtgattttttttaacgcaatggattcctggtgattgatggcatctactacatgtgttacccagcaaatatcagggatatgaagaacatcggagtggatacgccaaccgtggaagaatggcgccgctagggtccgctgccacctcaccctgtctcttggcagcaccagcaaagagagatgacctgatgtatgagatgcatgcagcacctccctccctgcatctatttcctttttctaatctccgtctaattgcgtgactgcacgtacgtagctgtagtgttataccctgtgactgtgaggtagaacaatgccagatggtggtatatagtgctatatgcaaacttgtaattgtaatccctctgtgtagagttctgttcagcataccatgtgcttcgaatacggcactgaatcctgtgcgcgatacactaatcttttgttgtcgaggtcgaaaactcttatagttggcgcatcaggtagggggtgctttgtgcacagattccttgtgttttcatatgaggatcctcttcaatttccacgacaaagtaaagtgcatccaggcgactagatcaccctcgccagcatagactccattgccgaccgattcaggaacttgcatctgcaggaaccgaaccactcgggtaggaggaagagcaaccgcctcccgtctgcatgttccttgacaaacttgaggacgccatggtggctgggacattggcgctggcacaccatatgaaaactctatgctcctgaggccttcgccaagtttagccagaagttcatcctcgacaatgctcctagcagatctacgctgggtcccatggacccaacacgggcctcttccccgttgcatccagactgatctccctgtgtcacacacactcaggcctactttggcagcaggggatcccgaagggtttccggtcgtttccccgtggagg

SEQ ID NO: 4460 - DNA, 3874 bp, Sorghum bicolor
agccttcttattgtcgtggtcgtaaatattttttatatatatcgtacagtggtgtttaagacaagaagggagaacaacctatgtgcatattacgtgtgcaaattcatgatggcacaagtcaatcaaacacccacagagacgctcagagtacgttacatgtctcttttcattatctcctgaattatattgaataacttagataactaataccttttttattttatttcaaattaaagacggaatggttgagggaaaaggtcatgcataaagaccgaatcaaagctattcaagagacgatagcaggatttctccgtgagcaagtgatcaatccaaacgacgagtttcacttcaacggcaacgaaactcttattctaaacaacgatgatcatttgtatcggttttagacattgggagaaaaaactctatgtatatatgtgttacgaattttgtacttataaaactatatataaagctttttacatatctatttaatttttgatgtggtcttttcattttattatatgcaaagcttaattataaagctaagcctataatttccatttatatatgcttaatatgcgtgtaatatatatattattatatcagcataaaatatgtattgacaaacctattattattatataaaaataataaacagaatcgaagaaataaaccgaaaaaaagaaccattttaacaccggttggtaataccagggtcctgcaacgtggcaaccctggcaggaccctttaacattgattggtattaccaaccggtgttaaaggggaggggggctttagccccggttccccgaactgggactaaaggtgggcctttagtcctggaagggcagcaccggctcgagaaccgaggctgttaggccctttccgaccggtgctaatacccgaacatgcagcactgatagcaacacgaaaatgaatttttagtaacggaccgatatatgcgttgtaaaagggaggtctgtcttgtagtttaaatatcaaacactacagttttatgagcttataataaacaggcttaaccccctcctatatgtcgatcagcgaccgacaattttacagaaaaaaaaagtcaactaaatggtgcccacgacacaaaggcgccaacaacaagtcatgtagtccacagctggaacaatattggcaggagatttatctgtcgtccagccactgcctaagttgaagtagccaagaatctgaacgaggcataattgaccagcatatagaaacaatcattccggacttcttcgtatacatggagaagatgccaattggtacaaatattggaggctctcccggccccttggtcgatctcaattatatatacgtgttatattaattaaaattaaatcggcgaccgctagtgcctactccctccgtcccaaaaagagtgtcgttttaggtttttataccacaagtttgactcgatttgtagaaaatacgttcaatatttatatctctaaataaatttgttaaaaaactagacttaaagatctttccaatgatattaattatgtattataaatattaatattttttactatatatttagttaaagttatttctcggaaagcgaaaacgacacttattttggtacggagggagtacgtctctatctttccttgacggccacacacgatgcaacgttgtgcattagcactactagctatagccatgtcaaaaactagcagagactaggaattacgcgtacgttccaagcccatcgaaatcacacaagctggcagcactacgtacaaccgacaggtggtaacaattaacatctatatattatataaacatacatatgcgtatacgtaattacgtatgctgcgtgtagtatataagcagatgcaacccctctgcgtttgtcatcaagcctagaagaagcacaagtcattcaacatacagattgtgaaccatctccaagatcaaggcgccagagctagctaggtagctgcggcaagaagaagaccaggtcagagatggtgaggttgagggctctcctccttgttgctgtggccgctgcggtggccggccttgccgctgccaatttccgggatgactgcgacatcccctgggagccccagaacgccaagtttaccagcgacggcaacggcctctcgatgtcgctggtcagcaactcctcaggtgctgaatcatgcatatctcgtttgctgcgattctagctagcttgattatttgtttttaatatctgtctctagtatatgtcaacataagcatgcagctgatctctccatgcactgcaccttgatggattatattgcgatgcaaaatgcatgacatgcatgtgatcacgcgatggttcttatgcgcgctactgcccgcttgcaggctgcatgctccggacaaagaagcagtacatctacgggaccgtgtcaaccctcatccagctcgtcccaggcaactcggccggcactgtcaccacatactacgtaagtactagtagtagtctactttaaactgtagtctcactctcatataatccatgatttattacctcatgatgatgttgatgatgatcaatctgctatatataaattaaacaaaaattattcaggcatcctctgttggcgacaaccatgacgagatcgactttgagttcctgggcaacgtgagcggccaaccatacaccttccacaccaacatctacaccaatggcgtcggcaacaaggagattcagttcaagccctggttcgaccccaccaccggctaccacaactacaccatctcatggagcccctgcatgatcgtgtaagctagctacctatacctactgcacgtatcgccttgttcgtttggacagtcgaattagaataaatcagtcagcggtactttcttccatgcatggtttatttgagtatgagctatatatatatatgacctagaaaaacaaaattgacacgaaatatgcacacccatgcaggtggtacgttgacagcatccccatccgtgtgttccgcaactaccaggagagctacggcgtggcgtacccgacgagccggcccatgtacgcctactccagcatctgggcggcggaggattgggccacgcagggcggccgcgtcaagacggactggtccaaggcgcccttcgtcgccaactaccagaacatccacctcgacgtctgtgagtgcggcggcggcggcggcggctgcagtatcaactgcccggcagcggctgcgaagccgaacaacggggcgtgccagctgagccccgaccagcgggagctgatgcagagccggcagagaaactacaccatctacgactactgcgtcgactccaagaggtggaccaacggcatcaagccaaccgagtgcagcctgccacaatactgatgatcccattactcagtcgctatacatatatataccttcccgtgtctttttgggccggccgtgacaccaggaaggacagtgtggtccgttattattattatacaagtatatgtttctttgtttatttcttacacatacatggaatgaaacttcattttgggggtgtttagttccaaaagaaaataaaatgcaaaataccaactactttgaaatgatgaaatataaaatgccaaaattttcagagtcatgtttagtttcatccaaaatgcagaatttattgccctcatgagggcctcatgagactttttgggtttttttttgtctcttgaggccaaaatccaaaatggagaataatcacctttttatcaaaaattttgcatggtatttagttctattttgcaaaaatgatgaatcaaaacacaaatttttttggaatttgaggggaattaaacacccccctttgatgcttctttgtttaacacactacaatacaaatctta

SEQ ID NO: 4461 - DNA, 9768 bp, Sorghum bicolor
ctcccgggtgagagcttcgatggtttctttgctagattgcctaaaaactagccagttcttcgtcacacaagtacgttggttatcctttggtggtttgcttgtaaacctctctgttcttcaccatgaaagagtaagatcctcgctacgttcttcggtccgcagcggcccggacgtccaatgccctttctagtgtgtgattcggaccacatctaatgtcaagacactttttggcgactttgctggggaagaatttacttcggctctactttgtagccgattcttcttgccctagccctatttctcactgatctatcttcttatgtttgtcattaacgtttcatctggccctaaagggcgatcgcatctggttttaaccccttatgatcttgtttgttattttgcaacaagttgtgctgcttataaggcggtcaagctctaaattatggagtaccaaggggatatatcacagatgtggtagaaccaccctatttatatggcccacatgtacctgtcattgtctttaagacctctgactactgcacttatgtgaaatgtgcacaatccatgatatgatttcaatgaatacattctttattgcttttcccatagctgcatcttgatcgtataactagttttaggttgcttgccattgtgagctgctagagggtcagtattctttatttgtttcaaaagtagtgtcaaatgtcacgacatcattaaatatgcgtagtcaagagtcattttggcatcagtccaaaatatgttggttatatgctcatcacaatccacttgcaaagaataatggaatggtggattttcaaagatcttgtcatgaaaatatttcaacatacaaagcctgtccaaatgcaaactcactctacctcttgctctgtaaataatttttgcggtcacgacaagtgtaagtaaggttaaatggccctctaacttgacggataactaactcttgggcagcttttggcctaattccagaatcatcggtggtctcgatttcaaaagcctgtagttttgaaatttttctttgtgttgccatcaagtgtcgagtttcaagcaagtgaaggaagtgattgtgttgaaggacaacatcagtgacttcgtaattttcttcccctcggtccaatgtaatagactaatagtcattcatgctttgcaatcagttcttgtttcaggtctgaaacacttcgctacggaaactttccacttttcttcgatggctctcattggcacaaacttatctacatgatgttgccttacgatcaaatttgctgtaatttgtactgtatatcttttcctaacatcaaagccactacgatccccataggccacccaaaactgccaagcttcatctgaatttttaaatctgaaaccaacttgaggtattcccttgtcaagttcagccattgcatttcacataaaccagatttgcctttcataaagctcaattttttcttctcaaattctgtcaaaaggaagaactttactacacaatggatagcacatgattgcagatttgcgttttctgatcaagcaaaggatcagctgtaaacaataaatgacacatagatcaaacatatgaattctaaagcaataaataagtcagcctatctgaactccatgtgctgaactacggaactatatgaactattgaactatctgaaacaattgaactactaaactactcagcctatcgacgcatttctagtactagttggattttaggttgagatgaaaaattgctgtacgtgaagtgagcactaaatataagaatgtgacagacaggaggtctgatacttttttaagtcctcacggagctcgttgacggtgtcctgggccggccgcgatgctgctgaacggcgttccttcggcgcatcacggcctaacgtacggccctatatccaagaagcggcgtcaaaggcacgtaagcggtaagcaaagcagtcaaaggcacgtcagcggtaagcgcaaagggactcagattgtcaatggcggaggctgttgccgcggctgccgggtggccggcagatgaagaggcgcggccgctcaaggtggtcttcggctccccggcgaagtacttcaccgacgcggcgccgatcgggaacggccgcctcggcgccatggtctggggcggcgtcgaatctgagaggctccagcttaaccgtaagccaccgcttcccctccatccatgttcttggatcgtgcttggatgctttgctccactatatatatcagttcaagaaggggaaaaagggggcagctgcctcagaaattccattttgttgaccttcttgctggttcctggtagactcatcctgaaccagtagggcatctgcttcacgagcagctagcatgatatgagaagcctggtaaagcgtaagtcataaagcgacagaaatgtggcattagttaatcaatacttctttttgaaggtcaacggggggagtcgttccccacctgaaatttatttatttatgttggccccaaaatggcccatcagataatgatgaaagtttacaagggacttacaacatcacctagggggtgatgtgtgttacagaaaaaacataatttcttagtactaggcttgtcttgccaaatcaaggatctgacaccattgatcaacaatgtgcttcttcctgtttggaaacctgtatcgccattgttctgctgccgccttgcaggctccaaatacttgcgagattgtgtgtgtttcattcctgaaaatccttgtatttcttgccttccacagctgccaacatgacagggcaatgaacgctgaaaactcttcaacggtacaccatctggaggggttagtgtgtgcaaatctgtagtctgactgacatggctcatattgatcttttcccaaaacagtttgcccagcacgcagccactgattgcgtgttcaggagactcatcttcggcctggcaaatttcacagatagcatcttgtagcacctttttcctcagcaagaccgtgtggcattgtatgcggcgctgtaccagcaaccacatgaacagctggactcgtggaggcgccaagtcccgccagataaagtttgatctctcgtcacagggctggccccttgctttgaggaggcggtagatggctccactgtcaagactgccatctcctttactagatgctgaaagtcgtcggtccggaacatctgatagttgtgttgtggcaatgatttcgtcgacgtgctgaagttgctgtgctgcacctaaggatagtcttggcactaaaacccgccttaggcctgattggagtatctctgagactgaagcatccttcgcggtgcagtgactgtaaagtactgggaagagatcggctagagactcatcaccgtgccaaatgtctagccagaaggagcaagacctgccattgccaagctgaaccgaagtgagtgcctggtaaagaggtagtagagagcgcagtacctcctagtgttctccatgaacatcacccttcaatgtgcaggtggagatcctgctttgcacccactgagcccaagcagatgactgagggaagtgaagtctttggatgagtttaagtaataaacatatgttttgtgtccccatgtcctttatgcccaaacaaccgagctccttgggcatgcacacccggatccaagcaacaaggcagctagccggtgaagatctgcctgtctgatcacctgaccggaggaaggcacgaagccgcttgtcaagttggtgtattaccaggggttgtagctgaagggaactcatgaagtagactagctgagaatcaagcaccgagttcactaggacagccttgcccatcggattcagaagaccagcctgccaggaagacagatatctgtccgttttctgaacgtaagggttgaaagcggatagcgacagcttgttaaccgacagtggtagtcccaagtatggctgtgggaaccccccttgcacaactcatgatctgtacgcagcttgccaccacttgctcctccatgtgtatagcaccaaggtgctcttgttgtagttgatgtggagccccgaagtcgctgcaaattggtcgagaacgtccttgagcatggtgactctagtgacctcacctctaagcacgatgagagtttcgtccaacaagtggggattgactacaacaacgcgttcgctctagtggcgcgcatagtattgatccgtgtcctcacgttggtggctcaggaagggtggcacgtccaccacatggacatcaagtccgctttccttaatagcaacctcaaggaggaagtctacgcgcatcaaccacctagctacgccgtcaccggagaagaaggaaaggtgtacctcctaggcaaggccctctacgacttgcgttaggccctgcacgctcggaacacaaatctggacgccacgctcaaggacatgggtttccagcagagtgcgcaccaggcggcggtgtaccagtgggacagcgggcactttgtcttgctcgtcggcatctatgtcgacaacttaatcatcaccggcgctgaagagaaggaggtacagtccttgaaggcacaaatgaaggaggtgtttgactttgacatgccattgtgccccaggccgcctgctctggtgcccggtggcgctcacaggtgttgccgtgctggtggagtggaggtgagctaaaattcatcccctgccaacgctaagcgatgagagacaacagaaggcacaacacacaagctaggaagaagcaggtgtgcatgggacccatgttgtggaacagcgtgattttcactcttctgcatattgtgtttcgcttgattcattggatgtgttggatgatttggattttaatggaatggattggatgggattgaatgggaagagtttttttttaggattggactggatggttggtgattttggttggattctctattcaattttgtttgctggacatggatgtgtgtctattgttaggtctacgaagaatcggtccaaaacagtgtattcttcccactaccaatctcggtagccactgctatagtgaagaaacctttggttgatgcatggaggggatggtcgcccatgggtgatcaggttccgccgtctgtagccaaagccatctcattcgaagtgcccatcccaagttttgaaggttgttgataccaagtcaaagttgaattggtctagtaacttttggccaggccaacaaataatgtccaccatttacctcctttcctcttcaaagaaagttcaaaattgtaaaaacctctcacaagtagcatactatgctccttgaccccgtcgactaggggaatttgtggctatggtctagctctctagtgtgtagttcctctccacagcttaacaaagcaaattgtcatagaaatcttgaacagccccatgtttatcttgtgagatctgttaagtaacaagattgatctgatcaccgacctgaagtttgatagtggaattattcttttctcgaaaccgggcttgctggtgaaagaacgatgaatttgcatccaggtagagaacttgggaacgaaaaagagcaatagtgcgctcaagagaggctaagcctagacagtgatgcttgagttttttccgtggccactcttcagtcctcaccatggtataaatcatgagtatccctcatgttttcagttccagttcgatgaagtatctccttggtcatgcccaattggaccttaatattgctgacttgcactggctccattttcgtagcccccaactaaggctgtgtttggtttgggggtaggactgttgtgggacacgagggatgggacgatccttgaaactcttcagatgctgtcgtggtagccaaaacttgtgtgcctcctgttgagcgtcaggcctgcgctgcccatagtggctccttgtcgccgctgacgaggccagctctgccacgatggccacttctccgacctggctcacttcaacgtgttggcacagacagcggcctcggaccaatgcgcaacggacagtggtgggagctccagccatagttccgctaggcagcgcctaggcgcgattaggtgctgggcgagggttaaccgcctcgcctagggggggggggtaggcggcatctaggcgctgggcggcgccgaggcggtagcagagctgggcgagccacgaaattttgccccagcaggctgatggcgcggcgcgaaggcggatgacgaggcctttcgcacgcgcgcggatggcttcggctgtgggagatcacgcaaaatccccgccgcctcctccgtcctcctgctccgccgccggctgccaccctgccccaaggtcagtcccctcccctgctcattttctctccctcccgccggcaactcctcccctgctcatctcccctccgccgccggcagctcctcctcccctgttcctcccagcgcctagggaaacgcctagaacgcctaggcgcgattactcctgcctaggcgctaggcggagggtcaccgcctagaatccggcaatccgcctagcgcctagctgaactttggctccagcggactccggtgcaaccaacatgggcgggcagcagtgcgagctctaggagaacaacggtacaagctccggaaatggcggcctagatcctcctgttgccaacggccgcattcgtcgggcgctctttctgactccgatgggcaaggatgaggaactggatcgactcctttgcgtgaatgactgaaggttgagataaggcaccagaaaaaaaaccatagttataaaaagtagagaagatgacgtgtgggtccatggacgattgatttaacggtgactaacggtgtgaaagagtggctctcatcctatctcttctgtcactccaactaaataggaaacagggatgaccatagccctctaaccaaacataatactgggactgtcccataccagataacagtgacaggattgtcctgtccccagtatcccaaaaccaaacacaccgttagtcattgcagcttgagaaaaaggtgctcagtggtgcaatggaggaaaggagaatttaagcatccaagttggtaaatttgaaatatttgtttcacatttctgtaaatgtctttgtaattacctttatttttagctgattgctttgtattaaaaatgtctgtgaacatctcaaagaaaaaatgttgctgcagatgacactctatggacaggtgggcctggtaattatacaaatcccaaagcacctgctgttctttctaaagtaaggagctttgttgataatggaaagtaccctgaagccacagctgctgcatatgatctgtctggtgaccaaacacaggtatgtgttgtacttttagatcgatagaaggatcatgtaactacacaaaaagaattagagacattaccaatttgaaatattacctgtgtttctactgaaggtctttcaacctcttggggatattgatctggtctttgggaagaacatcaagtacacaaattacaaacgagagctagatcttcacactgcaacagtcaccgtcacatatactgttggggagatagtctactcaagggaacatttctcctcaaatccacatcaagtcattgcaactaaaatctctgcaaacaaaccgggaaatgtctctttcacagtgtctttaactactacactaaaccacaagattcgtgtaacacatgcaaatgaaataatcatggagggtagctgtccaggcgaaagacctcaagagggcaacactgctgctgatcctcccattggaattaaattttgtgcaattctttatgtgcagataaatggtgccaatagcacagtggaagtattgaatgataacatgctgaaacttgattgtgccgactctgttgttttacttcttgcagccactacttcatttgaaagtgcattcatcaaaccctcagaatctaaattggatccaacagtgtctgctcttacaacattaagtattgctaggagcacgtcgtattcacagctaaaagcctaccacattgatgattaccagactcttttccaccgtgtttccttgcaactatcacaaggctctaatgtagttcagtcagcagagactagttctcagtgtgctactgtatcagattatgcttttcaaatatctgaccacaccacatcgacagcccttaaagattttgtgaagcctacggtagaaagaattgtaactttcaaagacaatgaagacccttctcttgtggaacttctatttcagtttggtcgttatctactcatttcgtgctcaaggcctggaacccaaatttccaatctgcaagggatatggagcaatgacccttcaccaccatgggagtatggttttgcaatgactttgtttttctttatttctttgcctaattaaattatgtatttcttggtttattaatttttttatagctttcgaagggaaatagctggagcagaatatggatttcaccctaagtcgatcctttaattactagtttttattttggaaaaattctgttaaacatcaccatttagtttccacatcttttagtcattggtattgtgatcatcttttttggtcttcatttagatgttttgctgtttggctaaccctttttttctaagttaaattgctattggagatactgtaatattccaaacacaaataaattaatggccatgtgagaagaatacaccatttttttttctcgaattcacaggaaagttgcgtatcattatattataagaagaaaagaatgataccatatagttttagtttgtttgctaaataagctttaaattttcttacccacttttccacagcagctttatgtaaggacaacactacaatgttaaactggcccttgctattatatattttgattgggtcatgatgatttgtctcagagacactatcctggtctacttgcggatggcaataaatttttataattccaaaaagatgtacataaatctctagagtacttctgcaaagaaaaaagcagaaaaaattttagtctcgaacaatcatgtataaatccaaacttgcacatctttctaatgctggttctcctgcattacattaaaattgttttgtttcctctttttcctagtaactactaattaataacttttctgaaaatttcttatttctgtgcattatcttgttctcttataatttatgtttccagtattttccaccatcccatcatcccatgtttgaattaacatgatgtatgattcatttcccagtgcagcaccccatccaaatataaatctgcaaatgaattactggcctgcgcttccttgtaaccttagcgaatgccaagaaccactgtttgactttattggctccctctcagtcaatggggctaagacagcaaaagtaagtcaattggcagaaaaatctaatgtttatagttttctaccttctatacgtgagaaaattagcatttctttttactctttaatttctactgaatgtactgacatgtatatcaatgtgaatttttagtgttattcttgctgaaccctgtgttggatattatcaggatgatggagaatttttctgtcatgttgctaatgacttataatatgacactgtaaacctgaatgcaggattttaagttttagttacaagcatttctttaatgagggagttacaagaacttgcgcgcaaatatgtaggaatcatcaatacatgcgaactaactagtaatggcatgcactgtaagcctgtaagcagttagtactgtgatttttggctagcagattctctttccaaacaccttaatgtaggtatttgatgtttg

SEQ ID NO: 4462 - DNA, 7877 bp, Sorghum bicolor
  misc_feature (2702)..(2801): n is a, c, g, or t
atatgatcgctccacaaaaatctgatggttacccttcacctgaggagataaactcgtagatgactcggtttcagagtcctgctctccttattcccgtgctcacagaaactgggatagggaaaccttaaatgcaacaaaagtgtagaaaccaatgggataggaaaaccttaaatacaacagaagtgtagaaaccagcgtatgagagactagagagagtgaatattgaagctggtcttgcttttatcttatagccagcaagccaagtagagccagccaaagagtggaggggacgctaggagcagaggagagaagacagatgctacgaaagaaaactcccataaccttcaactcataatttttcaatcgtttctaacacaagctacccctgagacgaagacgaaggagtacacttgcaattaaaaaatgtaacaataatcattcaacctttgatcattttactttgaattaggatatgtaagagttgctattacttttttttgacttagagttgctattacttgcaacgtgaaacttaaactgctgtaagtggtaggtggtactcttaccaccacatagaataccaccacatagaagaggtaatcaaaccttaatatacgcaactaaccaaaattaactaatgttgcatttgcatttattcatatacgtctataccatatccgcatcaaatacttaaattatctgacatagcattaacacctgtattcgaatctaaatatgagaaacactataggatgaaccatatgtattctatatctatatctataaagagacaatttcagtttgcccacctatttccgttggccacctgaatccagcgtcatctcggaatcggccgtagcttcaacccgatagaagagaaaaaaaagaatataagtttttctagagtttccaatgcaaaatctcctcacgatatatatcagagtatattaagaataacgaaagtataggggcctaaatggaaattgtttatcctattaatttacttttcttttattctttaaatcggctgaaaatgataaatacatagtaattcatagaaaaatctaaaaattacaaaacaaattctgttctgctccacatatgtagattcatgtagtaaacaaaaaatatctcaaattttagtacattttttttctagagatgcttgcctatgctttttagtgcaacattgaaattgtatttatcttgctccaattattataaaaattttatggttccctatttaatgtgatgcttgatttgtgataaaagttttagcaccattcgtgcatatttcactgatttactaatttacctagatttatgcttgctaaatagtttacaatcaatttaagtatgtaaaaataaaaaaaaagatgcttccactatctttgcatgatgtgttgttatgtcatatgaacatttcataagtccatgtgtttataatctacatatacatttaactgatatatcctatttcttaggaatcttttaaataaaaaaataaagctagcaacaaacttctcatattttaacataatattaatgtatattaagaggtaatattagagttagagtaagataaagtttgactaattattattattattattaaataaatatgtctccaagctacatatttgtaaatattaactatctaataccatagatgtcatggttatcaataaaataaactataaactttaaattttataaaaaagataaatataaatagatatgtaacattatgtcattattttctacgactatttaatgtttttacctcgttgcaacgcacatgtatatttattagtaatagttaaagtatctgacatagctaacactcgaaactaaaacactatagcatgtgtattcctgcgggggtcgaacggccgaaggagcgttcacgggcttccccattcggcctcgaatctgaataatcccccatctcaaaaagaaaataaggaaatagatagatagaaaacaaaaaagaaagaacaagtgctcgaggttcttgctccgctctcacactttctttctgcctgctcatcccaacccgtccaccgtaactcacgaatccgcggccgccccctccgcaatcccgacctccacccgccttgcccgaactcgacgctctcttctcctgaacgcggtgcctagcccccgggggcgcggccaccgggggcccatctactgcggctgggctgatggggtggagtgtaatggaggtccggccggagtgggatctaggcaagatgagggagctgcgcttcgttgtgttggttctggtgatatccttgccgtgcttctctgcatccgatcgccaaggtactaccgaactcccctatcgttcctgcaaggtgacgctctcatcagccgtcagctcttgcctctgcatcggcatgagtgtgttttgggtgcctgttagctgaacaaatggaaatttagtttgtattattaaattgttgctgtattgtgaccagcgttttagaaatcagtaggtagtagttgggcaccttgcttcatgtagcaggctagcagttggacaggctatgcagctgctgggcaggcaatttggcgctttgcttcacaggagagtgttgcctagcgcaaaggcgccgccttgataggccagctgtctgattatcgaaatgacagttgaaatatttatgtattgacttatttcgcttggttttcacttnnnnnnnnnnnnnnnnnnnnnnnnnnnnnnnnnnnnnnnnnnnnnnnnnnnnnnnnnnnnnnnnnnnnnnnnnnnnnnnnnnnnnnnnnnnnnnnnnnnnggtccgtggaagctagcatatatggcaatgttcacactaaaacattgtatctgggagaaaccttgagtatgggtataactgtcgtcatgactctcttggtacaccaaactaccaatgtcatccattgttcttacggtgtaaaggcgaggcacggcgatagggggggggggaggggggggggggcctggacacctaagcgcccattctgcaaggcgatgggggggaggggcgcctggacacgaactatgatgccatctttttttgtctcaatgtttaaggtttggttgacatggagaaacaaagttactttatgttcttcagggataatgtaggcatttaaagaaaagaggaaaatgtaattctcaatgtccgattggatctcttgtttacaaaaatcaagtaccttatgaagactaaataattgactatgttttgcaggagatgctttatatgatatgaaacaaaaactgaacgttactggcggtcagctttcagattggaaccaaaatcaagttaacccttgcacatggaattctgttatttgtgacaacaacaacaatgttgttcaagtgtaagtgggagcccttgtaccttctttctttgtttgctttcatatgttctaatgttgttggagtgcttatgttcccctctgttctgatcttgtgtgttttttgactaatctttatgctctcttgtagaactttggctgcacgaggattcacgggtgttctgtcaccaagaattggagaactccaatatttgagtgtcctgtgagtatgatgtcttattctttagattatatatacctttgacataatcacttctataaacatcaaaaggtatggtgtacatttgttacactatagcaatagttattcattttcccagagaatcgcatcatgttattcaaagtaagaaatttatagaatgagtaaatgcaataatattataataaatccagtacagaaaccttggcatgtctgagaaattaggaatcattttctgtattgaatcttactgttctatgattctgttgcttctgtggatagacatgtctgcttctcttcatgttttggggcaaactgatatgttactgaaacaagaacatagtgggctagccatctatgcaagtaaactaggatgatatggattgtaccagtgtcacatatgctaacatattctgttccagaggaattggtactagttctggttattacctttagatatgtgtcatacatgaactattgttcaagcttggtgcaatttaatttcatgatacttctcggactactatgaaactgtatagcatatgatcttgcaggtcattggctggtaacaggattaccggtactgtaccagaggagtttggtaatctatctagcttgacaagcttagatttagaggacaatcttttagttggagaagtaccagcttctcttggcaacctttctaagctaacgctgttgtaagtattttaaaatcagagttcccttctcataaatagagttatatgtcctacgtattcaagaaaagaaatatagttatatgtgaccttttcatgtaatctttctgtctctcataaccaggatactgagtaaaaataatttcaatgggtcaattcctgatagcatagcgaacatttcaagcttgacagacatgtaagactgagtatgatacccttttcagtttcttataactcaagttcatttaaatgtgcttgccatgtgttgacaaaataatactttgattacagccgcctggcatataataatttgtccggtcagatacctggttcgctgtttcaagtagcacgttacaagtatatgaagcttgctcttaattttttttcttttattctatgatttttttcctaatcctgagtgaatgatgaaattctcttttttcacgaccagcttttctggtaatcacttaaactgtggacccaacttcccgcattcttgtgcatccagcatgtcctatcagagtaagttgcattctgactactgtatttattattttaccaatgcatattactccctccatctcaaattaactgtcgttattggttttcgtacatgtttgactcgatttgtagaaaatacgtgcaatatttgtacctccaaataaatttgttaaaaaactagattcaagacctttccaacgatactaattatgtaccatcctacagtgggggtctcccctgctgtaattttgggtcaaaaaaactaattatgtaccataaacattaatattttctaatatatatttagtcaaagttgtttatcgggaagcacaaacaacagttattttgggacggagggagtagtttgttagtatagatggtttccttgtattttatgagattgctaatttcataattatcatcttacaggtggatcccatagctcaaaaattggcttaatacttggaacagttggtggaattttagggcttcttatcgtgggagctctgtttctaatctgtaatgcaaggaggaaaagccacctgcgggaagtttttgtggatgtagcaggttccatgcccatgtagtcgatgccttgcttttggtctttcatagtagtgaagtaatagtcttaataatggcttaagaaaactgttatatctcttaaaattcataaagtttagagctcccaaagaccaagacagtaaacacaccgttcatacttgattattaatatacatcaggctcgtgtttcagtcattgaaaataataatttcctaatcagaatacatgaccctacaccttcatcaatcaggcactgtgttaatcataagaatttcaagtttgcatagtttatgcaatcacctaaggtataataatttatgttctacaggcgaggacgatcgacgaattgcgtttggccagatcaaaagatttgcatggcgagaactgcagattgcgactgataatttcaatgaaagaaatgttcttggacagggaggttttggtaaagtatacaagggagttcttcctgatgcaactaagatcgctgtaaaacgattgactgactatgacagtcctggtggggaggctgccttcttgcgggaggttgagcttattagtgttgcagttcatcgcaatctcttaagattaattggcttctgcacgacacaaacagagcgcttgctggtctatccatttatgcagaatttgagtgttgcctgccgcttaagaggtatttttttaaattgttcatgcacctctctatgtacaggattgtgtttgtttgtaatctttgtcataggtgtgcatacttactaaataattgtgtgtgtgtgagtgcgtatccagggatgtaccctttcttctgtaagtaatataatgaacagctctcctgtgtgttcgagagaaaaaaaaatgcacccctctatgtattttgctaagatgtttcactattactacctataaaaggaatttctctattatttctcttccttttatgtacagacagaactttaccactgataatttgcatatggtagaccttggacctcccacataacattttctcaaccttttgctaacaggcttgatttgttacgtctatatacaataagctttcccactggtcaaaaaatttattaacttatttggcatctttcttttatcgtaattgatgctggtctcgtatcatgtgtcctgtgttctaacttctaaatgctatccagattttaagcctggagaacccatcctagactggccttcaaggaaacgggtggctataggtacagctcgtggactggagtatctgcatgaacactgcaaccccaagatcatacaccgtgatgttaaagctgcaaatgtattacttgacgaggatttcgagcctgttgttggtgattttggcctagcaaagctcgtagatgtgcagaagacatctgtgacaacacaagtccgtggaaccatgggtcacatagcacctgagtacctgtccacagggaagtcgtccgagaggactgatgtttttggctatgggatcatgcttcttgaacttgtgacgggtcagcgggctattgacttctcacggttggaagaggaagaagatgtgctattgcttgatcatgcaagtcttttttcacttccaaatattggatagttttgctctttgcctctttggttacaaaattttttatgctggctccatccttaatacaacctaattcctgtgtatgttatgatgtacctgtaactgaatacaggtaaagaagctacagagagaaggggagctagactccattgtggacaagaaccttaatcagaattatgatagtgaggatcttgagatgataatacagatagcactgctctgcacgcaggcatcacctgaggaccgaccatcaatgtctgaagtggttaggatgctggaaggtgagggtttggcggagcggtgggaggagtggcagcatgtggaggtgacaaggaggcaggagtatgagcggatgcagcggaggttcgactggggagaggattctgtctacaatcaggaagcgatggagttgtctgcaggtagatgacaatcagtggaaacggatgggtgtaaatgcaatgatgcggtgcctgctgtgctgtatgtaactgttatttgtagagtagcctattagatacttgttgagcaattgcatgaacgtggatggaattatgtaacaccctaaagtttgcaagtatttaaaaataggagaaattaatttaatttgtatttttgtgctcatgaaatataggaaaataatattttttattaaaataaatttatcatagagcttagcaacttgtttgtgcattcatgcaggagaattaattttattgtgctgcgtgatttgactaaagttcaaaagtattttaaagtgattttaaaatggatttgaaaatggtttggaaataaaaggaaagaattaaaaaaaaaacccctccctctctctgtttggcgccacccttctcccctctcttttcggcccactcagcttggcccagcgcgcgcgcaaccaacccagcagccggcccacatctttcccttcccctcttctctcactgccaccctgggcccgcacgtcagcgtc

SEQ ID NO: 4463 - DNA, 6098 bp, Sorghum bicolor
ttaaacgacaaaatagaactactgaaacatatgagaaacagtatatcaaacgacgtgactgaaccactagtgaaacatagagacagcagcatatgaaacgttttaacttaaccagcgaaacaagcagacatgacatagatcttataccagaaatatatataagaaaaaatagaaaagacatggtagaacatatgaaacataacaaggatagtatgcgcaacaaaacaaacacactactgcaacatgtacgaataggaagacgaaacacaataggaagatgaacggatcataccctcccgtgtgctccgatgatcccgatccttgaccaatttccatgatgtagaggatgaagacgatctttccaccaggaagaagaaatccgcccgaaccagcttaaggaagacgaacagcgacggtggattgggcagtcgcgtagtcgctccccaaaaacctaattgtcgatccctcgtgcaaggtctcgaacgacaagggcttcggaggcacctgccctctcgctcctccgtgcgcgcggagttacgagatgaggattccttctttgcaacaggattgtgttctgagttgtgtgttgtgtgtgtccaagaccaaaggcttatgtcctctttatagccttgcggcaggagagggaggagaggaagggatggcagccgcagagacagcaattagtgagttaaacacggagttgaaactcttgtaattagtgagtgcttaacacaccacatcactacagcaaatggtgagttaaacacggagttgaaactcctgtaattaagtgcttaacacaccacatcactacaccgcatgcctgtctgcttggctcccctcgcctcgttatgtctggtacaactcgtattattcacaattacatactatagagtttatttgatttattatatctaattgaggctagcctaaaataaatccaacatgatttgctcgaggatgggatcaacggtgacaagggagggtgcacggggggcaccatggtgttcgaccacatctgtagccggcaccaatgctgggcggatagctgaggttgtagcaagctccagccacaggggttgctgcctttgacggagaggggccacggcctggcatggcacccgcgggggagcatggacaacgcggaggtgagcgtgagatgtgcctgccattggtgcccgtggaggtggaagaaagaaggaagagatgagggaacacgagggcaaaataatattctttttgtgtactcaatataaacataaattttctcttttttatgattaccctttctgtctcaaaataaatatacttttaggattctcacagaagatcaatgttacttgaaaactacatatttgtctctatcaaaagctatctcagcctatagtgattgtagtttcaaagtagaaaaagtgaaataaaaaaactgctttaggtggactatattagaagtgcatttattttaatttttaaaaaataaatactattagctaatattttgttgtgtgtgtactctctccgtatagaatttagatgccgtttaggacagcgacgtggtctccaaaacacaactttgacattttatttttataaaactatttaggaaaaaatgatatatgtatacttttataaaagtaagtatttttttaagataaatttattcatataatttttacatttgcaaactcaacaatttaaaagttatcgatgatttatattcttaatgttcgacccataaatcgtatgtagagagagtactatgttccctaaccatgttttaacgtttgacttaaaatttgtccaaaataatatttaaaattctacatagagggagtgctatgtagtaccagtagtgctgtggccaggtttaaaaaaaaaagtgccctggccactggggtacacacgtcgatttccccccaactgtccttgtactactacccaccgagccagatccataaaaaggccgctcgcgcggctgtcccttcgttttccccaaactgtgccgaccgaacaaccaccgtccaccggtcttccccgccgggcacacgcctaacgcctccatttctagatccggggggcggccatcctctcttgtctccgtggcaactggcaaccgtgcctctcctccttcctggcagcgtttccccgcggggacggcgcgtggagctgatcccgtcatttgtcggtaaggctgcctttgctttgcttccacggattgttccttctgctgcacagtcgcctcgttctcgctctctccaaatctctgttcctgggacggggcatattcttgtgcatctactcttgttggcgtatttttgttcgaagctgtaccaatcgactaatttcagtcggttatttcagcaaattcgaatcctccgccactgcctctgctaatgaatcatcttttcaacctaaaatgctcggacaccatccacgtttgcttgttttaccttttttgtgctctgcccaagaaatgcctgatacagacttaagttgacctccatttatttcgtcggactaagttcatcattatagtatggttaccacaagtatcatcttacatatgccgaaattttccatgcctattgcagtgttatgttttttgtccagcggcacacttgttcaactaaagagtgaagaacagaatttgtagcgccatggctgtggaaagagatgtatttggaatttcagggccaacatatctgaaaccaatcgattggtatgtttttaatagctcctaccgccttcaacaattctagatgacatttctcaggatgttcgtaggtcatggaagggttgattctacatttacttgttctgaaaaaagatgttcttcatgccctctagcaacagagctgcaaaactgtagccaatccagtctttctgggaattagagagttatgtcatactccgtctatactcgtaaagaaagtcgttttggacaagatttgggtcaaatattggaaatataaatcatgaataactttaaaatgaataactttaaagttgttgagtttggaaatgcgaaaaccatatgaatagatttgtcttgcaatatacttccataaaaatattacatataccacttttgtgataatacttttacaaaaacaaggagtcaaagttaggctttgaagaccgtgtcgttgtcgactttctctacgagtatggagggagtactaatgaacagcagatagtcaagaacactgaagaaagagaagcactagaaatactaggtttaattgtcaattttgtgtacctggaattagtcttcttctatcttacaacattggacttgggatggcatggcatcactttcatgtacctagctgctagatcccatgtcttccattattggtcactgtcatgtcgaacttggaaaaattatgacccttaactcttgctgaccattcccacctactccacctcactcccattatgagcattattgtttaactgtaagtgatttacggctcaatgaacctcttcttgtctactgagatccagtctctctaatgagatcaagagatttacattgtcaccacaaacagttagcagaatacagggaagtaatacttactgcaacttgtgctgacaaatcgatggactatagaacataccatacttctaagaacaatgggaatttgtgaaatatagcttcttgtgtttcaggctttgcccgatctatgtgcttggttaaccactgggtcctctagctactgtttaattctttatggtgtgactgttatgaatctagttgagtctctttgaatgtttaagcatcaacaataagtcattatcttctccaatatagacttcaggctggagctaatgtgttctttaacatcagttttatataaggaaatactaatagtagtttatataacagagatggtttataagagagaaaacaagtgatgtgaatgcatcactatatatcgcttttttttcgaacaacacaggagagctctgtgtcatttcactaagaagaagaagatatcgcatttgtattgtgtagtgctaaaacactgaatagagatgctttataattccgaagcggtctggctcatttgttgtcttatcgacattgttcagaaaccattgctagcttagatggcattaggcagtttccatcttattcattttttcaggatgcacagtggacatattctagtccctgttagacccatgcttggctatatttctgcattctcaatttgaccactatcaacacagtctaggaaaaatccttgatagtcagaactcagaagtttgttttatgtgatcattagtataggtacaggcttatgattcttttgctagtacacttttttacaattcattgacttggggaagtaactatctctcattatcaattgtcaaaaggaactgtgagcataatcggagatctgtggctgcaagcttagttcaggctgtatatgtgttggagagagaccgacaactgagtcgtctatctgttgaagccttggcacctgcttggtgggaattcttccattttgagctgattcgcaagctgattgatgatgctgatatgtccatatttggtgcaatatttgaattcaatcctccttcaagtgaagaagcttctgttgcaaatgctccaagatttgtcatcgctttcagaggcaccataacagagaaggatactatctccagggatatttccctggacctgcaccttgttcaaaatggtctccataggacctcgagatttaatatcgcaatgcaagctgttcaaaacgtagcctcagttttccctggatccacgatttggctagctgggcattcactaggtgcaggcatggccatccttacgggaagaaacatggttaagaagggtgtgtttttagaaagctttctcttcaacccaccatttgttgctgctccaattgaaaggatcagggatgaaagggtaaagcacggttttcgtattgcaagaagtgtaattactgctggattaactattgccatgaaagctaaaactgagggtaacagtcagagatctgttggtgaagaatctttcagcattttgtcatcatggacaccatatctattcgttaatccaggagaccacatctgttcagagtacattgggtacttccagcaccggaagaacatggaagatcttggtgctggatttattgagaagcttgcgacccagaattcaattggagacctgttcttcaaggcattaggatgggaatcagaaccactgcaccttcttccatctgctgatttaatcgtcaacgtgagcccttcatctgatttcaaatacgctcatggcatcagccagtggtggcaacctgagctgaatttgcagagcagtaaatatcggtactcatagttatatcttaaaaacttagttatcctttctatatccctttagtttattcatgtggttcattctatttgggtagtattggtttcccagatgtggtagactatttcagacatattgactgcattttcctgacctgcaaaatctgttgattatgtggagtaaagttctgacatccatcatgtatctgccctgtacaatatatttatacattgattaattaatgatgatcacatcatgtggatcgctgtatgtacttgttgcttttcttttgctctgttgtagaaaatgcaaaataatgtgttcttgtattcaaaatgagaaatgccttgataagttatagccccttgcctgattcttgttcaggacaacatagcaagtcatatgcaatggtaagttttcttgtttatgagtttaaataagtgctggggcatcatccgctgatgcaaagagcttgtgctctcgatgagaaggaatcgattaggatcatccatctcgagagcctttggtcccttgagttcttttttatggaaaaaatgtccaactaattaggcttgttgacgtaaacagagtactgcgatggtttggcaaatttgtagcaagagcacagatgcctatactttccttgatgcctggtttttccaactgagcaccagtagttgcaatgggaaaatcgatgctttaagtaaaagagagaagaactaatcgattggttttgcaccacaccatggcggctcga

SEQ ID NO: 4464 - DNA, 3325 bp, Sorghum bicolor
tagcgcgcgggtcatttagggtttcgggctttgtcgagggcgtagatccatgaccctcggcaaagattttttattttttattctttgtcgagggtcgcagccgagaccctcggcaaagatttttttggttttttagcccttttttgtgggcacaaaatacattgttttaaactcaatttcaaaaattgggcgtgaccatttttatatatttcgttaatgtatttcgttttgttgctttttcaacggtttcaaatttgcactgtacgtgcatggaataatgcaatgtagtgtttctaaaaatgttattcatgttatttggtgtatgttgagtccctatgcacaaactcgctttaaatttcgcgcatcttcttctcgtaacatgataagccacttgttggaaaaatgatttaaaattatataaaatccatacaaagtgtgaaagtcacaaaacttggtctggtgtcatgttaacttatttgtaggctgtggtaaaaaattcatatggtttcgagcaaaacgcgacgtccaatgtctaaaaccgaggcatctccacatgcatgtgaattctttaccacagcctacacatgttaacatgacaccaggccaagttttatgatttttggacttctaatggattttatataatttgaaatcacttttccgacaggtgcctcatcatgttacgcaaagaaaatgcgtgaaatttgaagggagttcgtgcatagggactcaacatataccaaataacatgaataatattttttgaaatactacattgcattattccatgcatctgtagttcaaatttgaaccaatgaaaaaaacaacgaaacgaaataagttaacaaaatatatagaaaaaagtcaaatttgacccaattttcaaaattgtgttgaaaacaatgtattttatgcccataaaaaatgggctccaaaatctaaaaaacaaaaaaattctttgccgagaacctaggctacggccctcggcaaaaaataaaaaaaacctttgccgaaaagctggatcaaaaaaaatttgccgagggcctaaaggttggcttagaagccatgtagcccgaggcacgacggcccagcccacggcacgacatgttggcccggtccgagaacggcctggcccgataactctcgggccctggccgtcctgggctggtggtgcaggccgtgcttgggccgacctctgagtccacgggctaccacggcctggcccgagttttaggcgtcggcccggcaacggcccggtgccacctacgcgggcattgcacaaatagctcatttttatttttatgttacatgtcttttgatgtcatttttatgatctaagtctgagattgtgaatttgagaagttgagagtcgtaataaattggttgtggcattacgctgatgaagtgattattgtcattatgtggttattttgattttttttaaagattgtgggcctcggccgtcgtaatctaacgagccaaatttgtcgaggatctttctttgccgagggcctagccctcggtaaaggtctctttgtcgagggcctctaaaagggacgctcggcaaaggatatctttgccgagtgctcgagatttgattctctacaaagtctcaggccctcgacaaagtacgcattttcaatagtggtgtcgcccaagacctaacggcaaggcctcagatcggtgcctcacccgagccccaacgtcaaggcctcgaacgaggccaagcaatctccatctcgcccgaccctaatgctcgaacgtccttcctctattggtgctctccagaccgcccatgatgtcatccaccacgggcagcaatagttgtggtttaatggctagccctggacaacggggtgcatccgtgcatgctgtgccgcctgccagtaatatccatgcccaaattaagcaatggctattcatagcgctagcccatcatcatgtctccttccatatattacaccaccacggagctccgcctgctgcaccaaaattcagagctgacaccgtggttcagtttttgggtagataataaattaaaaaaaggagagagatggcactgtgtcgccgcatggccgcaccattcttcctcgtccttctcatcatcgtcgcggcaggtgatcttcgtcatcagctcttggccggtgtgtcaagctttgcaagtattatggaatgaatatgtatccgccctgtgtgtgtgtgtggtgtgtgcagagacagcgacggccagggtggtcgtggaggagaagcactgcctgtcgcaaagccactcgttcagtggcatgtgcttcagccacaccaactgcgacaacgtatgcaagacggagaagttcacaggcggcaagtgcaagatggacggcacctcgcgcaagtgcttctgcttaaaattctgctagggaatgacctgcggtacgtcaacaaataaagatttgtgaagcccagccgtcgatcatggcatcacgtcaacctgttgatttgttcctcgccgtctctgtgaggccatggtggtcgccggccggctggttcctccgtgctgatctggtggcagctaccgtacgtttggtttactgaatgtgcgcgcgatcatgcatatttgctagtgtattctatttgcgaaacacgttgtagttaccgtacgttcgttttgctgcatgtgtgcgcggtcatgcatatttgctcttaagttttattagtatgggctgttcgttattttctagtgtattctatttttgaaacacgttctagttaccgtaaatatgtatttgcgttgcttggtggccaacgatttgccttgattgtacaaaaaaaaattatatatgtttgagatgatcatccgatgaaatgaaattaacgcattgtaacctttcatgcttggagccatgctcccttcactactggaatcacaggctttgctgagggcctctgaccctcggcaaagcccgagaaaccctcggcaaaggctttgccgagggctgccctcggcaaagacctctcggagaatttttagacagcaaagggatctttgccgaagaccctttatcgggcactcgacaaagcctttaccgaaggccaggacggccctcgacaaaaaaagcagtcgtcacgatgccgttggcagtttctttgtcgaggacaggccctcagcaaataaatgatttttttattttttttttaaaacctttgtcgaggtctcatccctacctcttagtaaagtaatgttcaggatttttcaaacaaaaaatctttgccgagggccttggctattggcctcggcaaagataataatacagcaaaaaaaaattacaataatcaaatgaagcacaaa

SEQ ID NO: 4465 - DNA, 7466 bp, Sorghum bicolor
tatatatatatatatatatatatatatatatatatatcgtacagtggtgtttatgacaagatgggggaacaacctatgtgcatattacatgtgcaaattcataatggcacaagtcagtcaaacacccacagagacgcttagagtatgttacatgtctcttttcattatctcctaaattatattgaataacttagataactaataccttttttatttatttcaaattaaagacggagtggttgagggaaaaggtcatgcaaaaagaccgaatcaaagctatccgtgagacgataggaggatttctccgcgagcaagtgatcaatccaaacggcgagtttcacttcaacggcaacgaaactcttattccaaacaacgatgatcttttgtatcggttttagacattgagagaaaaaactctatgtatatatgtgttacgaattttgtacttataaaactatatataaatctttttagatatctatttaatttttgatgtggcctattcattttattataggcaaagcttaattataaagctaagcctataattttcatttatatatgcttaatatgcgtgtaatatatatattattgtatcaacataaaatatgtattgaaaaaactattattattattatataaaaacaataaacggaaccgaagaaatgaaaaaaaaagaacccctttaacatcgattggtaataccaaccggtgttaaagggtcctgcaacatggcaacggcagaacgctttaacaccggtgggtattaccaaccagtgttaaaggggccgggggctttagccccggttccccgaaccgggactaaagggtgggcctttagtctcggaagggcagcactggctcgggaaccagggcaacaagcccttctcgactgatgctaatacccgaacatgcagcagtgctactttcgttttactatatacgcacgtcaatataatatatttatagtattactactgcagacgcgtatatgttatggcgtccctagaggggttgtggatataaagctttttcatatagtacaattctggatgcgcgtgtatatgttcggtccgcaaacagctaccgaaagattttttttttttttgaaaaaaagaatgtgcctagaaaagatagccaaaaagtcaactaaggaacgaaggtttatctcgtggcatgcagtctggcccacgcatacggaaaccatgggtacgttgcagctacatactacgtatatatattacttaaacaggttgaagtaatgatgatgatgtgtaactggctaactgctggtacatatatatcattcctcttgccttttgcattcccccatctatactatcgcatcaacgtcgtggattcgccatgtgaaggcctcgatcagttaccacggatcctactcgagtgccacaaagattgtacgtatatcatccaccagatgtacacgacacacgtacatatatacgcgaagaggcttcgccgagacaacatgatcaaggaagtcggaagcaattaaatacagtagcatactacaaggaaataaataaaatggcaccgagagaggagaggaaaatcacaagaggattgctataaaaaggtccacgacatttcgtccctgagccggcgcggggtccagcacgttagcgatagagatcagttacaagcatgatatcgcggaggaggaggagacgccaccagctagagtacgtctgagtgagagatatgccgtggtatcatgtgttttgtgcagcgagagcgagagcgagagaggagtcagatagagatagagacggagctgtagaaatcggccgcgtgataggtccaccaaagggtgcttcctacctctatttaaggggccccctcggtgcctagcttgttcctgtgtcactcggcaggagcactacatttctctacctagctttgccagtcgacgacgaccggccggctatctctccgatcagtcggccaaatcaaagcaaagctcgctagcgccaccgaccatggtctccaaggataccatccgtacggctatcggcgtcatcggtgagtccacgcatccctcgcgtatgttccatggtcgctgcatgccggccggtccctttctttcattattgtgacaactttgatgaatgaacatataccatacgaacatactcactgcggcaacggtagctgcagcacggtctcgctcctccgggccatcatggcctgcccttgttttttcaattccagcgaacttccttttcgttgcattatccttctcgatttaagcttattcgcttgagcttatcagccgaatctatcagttattcaatagtatttttctctaacagcaaatcaatcaatagaactatctatcataccttaacagccgaatgtatcagtcattttctacgggtttcttttgctttgtctttggtgcgcccaatcccaaagacgttatagatggttagttcatccttgtcacgagcgagctttcatgtccaactcgatctattattttgaatttggatctactacgtaccagtgcaagtagtagtttgaaccaaaactggaagaatccactagctaatttcttttttgtgggtgttacgctgttgcaggcaatgggaccgcccttgtgctcttcctctccccggtgtaagagaatccattaattccgctcctcattcttttgtattatatctacatatatacatactaaagagaaaattaatctcacaattgactttgcgcaaacaaacacactagtaataaataaattatcaaatacgtgcaggcccaccttcgtcggcatctggaagaagcgtgcagtggagcagtactcgccgatcccgtacgtggcgacgctgcttaactgcatgatgtgggtggtgtacggcttgccggtggtgcacccgcacagcatgctggtggtcaccatcaacggcaccggcatgctcatccagctctcctacgtcgtcctcttcatcctctgctccacgggggcggtgcgccgcaaggtcgtcctcctgttcgccgccgaggtcgcctttgtcgtcgccctggccgcgttagtgctcagcctggcgcatacgcacgagcgtaggtccatggtcgtcggcatcgtctccgtcttctttggcaccggcatgtacgccgcgccgctctctgtcatggtacgtacgtaatgaatgctatactagctactagttaatatttagtcatgttttagttaaattatctttatcgaaattaaagaatattaatatttgtgatcgacaccaaagagatacactataaaatacattgtatacttaatctagctattagcatttatattgcattgtaagagaattttattcttctcaaggagcaaggtattatattgtagctgtgggtgtgttcctaataggcaataacgatttgttttttctgaactgcctgattaaatcactggtgttgattattggaatgtagcataggaaacgaacatgccattggtcattttttatttcatttgactgctcacggagattttatttattggagattagaataaacaaaccagacacagacgcatgcctttcacagctgttatcaagtatacagtatactatgcagaaccaatagacttccttcgattaatttcgaaaaatactagtgctttggttttttttttcttttggtgcattcatgcaattaattcatgccttgtcatcattgctgaaggtattggttcagttttctttcacatgcatgtcgtgattttgtccatgatttactcatgacgatatgatactaaagatttttccttcgtgctgtgtgtgtgtctttttgcatgattggccagaaaatggtgatcgagacaaagagcgtggaatacatgccgctgttcctgtccctggcctccctcgcgaatagcatttgctggactgcctacgcgctcatccgctttgatgtctatatcaccgtaagcaactactgctagtaacctgttggataaattttacattcagttttgtttatctagcattataggactagctcagcatctctagctagtacatcagtgggaatctggacagttttttgaccgtggacaagtcagcatgcttaacttaggtggaaattgacaagggggtttttggatgcaagcaggtttgttgggcaatccataaataaatggtttctcatttttcaagaagtcaattgatcttaattttgactaattatatataaaaaatattaatacttatgatacataataagtatgactaaataaataataaaaaaattatgataaatctatttgagatataatattgatatcaattctacatgataacattctaagataagatttaataatgtttatccttgcggtcttagataaaaactaataaagttaaatttaatctaaatctaggacaacattcttttgagaccgacaaagtgtatctctgaggccacgacatccacaatgttgtatggtaccaatattgtataaccaccggattcatcatgcagaatatgagcatggacaaaaaattgtcatcaaaggtcatagttgtgcgtaagagtaactccaatagatatggtatctatcttatataggctatttttagattattgaagtaaagtttaaagtccaacagttgtgctatctagtttgttaaaatagcaagtttgctaaccctagactttcgcttcgctagccatagataacatgtcatcatcactgcttatccatacaaaggctattgtggaatgctacgttttttatgagttttttattttacaaaatagttaaatcttgtattttagaatataattttacctagtatgttggagatgctcggtcccactactacgagaccatagttgtgctgtaaggtcaaagttcctcgccataggcctttggtcgaaaacgttggaatgacatcaagcttaattagcggcagccgaggctccaacctaacccaacttatcagtccgttcagacgcacacgcacaagtcgtcgctgtcgcgtgcggcacccatacaatctattatggtaataagcgagagatgacagtcttttaatagtgagctaggttaacctatgtgtgacacctaaaattggcgttaaggctacgagactagatcgaagaccaagctgggatcgacccatgtatcccccatccctaccgtcctaggcctttgcttcaaatacatgcagcaacagccggctcctgccaattctcgcggcgcctgtagcgcgcgcacgcggcgtcgctgtcgcgcgcggcacccaccaaatcatggcgcacgcgcgcgttcccacatccacacagcaggcggccgcggccgcccccaccgagcccttcgcgggttgagatcaacgcgacggacacaaccgacgtggcatgctggctagcttctttagctttctccactcctgctgtagcgagcgagcgcttgtccgcgtgcttgcggtcgtcggttgagacgatggcaacgtcgccatcggagaacaactgaacagtgccaatcagtcttaccctagaattttcgttttatttgataattactgtttgattatagactaattggacttaaaatattcgtcttgctaattattctttagctgtttctttagttctgcaaataatatttatttagtacttcatgtatgtgtctaaggcctgtttagatgcaaaaattttttgaagtttcacactgtagcactttcgtttgtaattgacaaacgttgtccaaccatagattaaataggctcaaaaaattcgtctcgcgatttacaggtaaactgtgtaattagttattttttaactatattttaatgctcaatgcatatgttcaaagattcgctgacgagaaatcttgtaaatttttaaaattttggatatatgtgggtctggacattcgatttgatgtatgataaaaaatatcacttgaaaccaaataggggccttgtttagttcactctgaaaaccaaaaagctttcaagattccccatcacatcaaatcttgtcgcatatgcatgaaacattaaatatagacgaaaacaaaaactaattacacagtttaactgtaaatcacgagacgaatcttttgatcctagttagtccatgattggataatatttgtaacaaacaaacgaaaatgctatagtaccgaaaacttttcacttttcaaagcacagcaggggccacctagctagtccaaactacacctacgacacaagccctggtctgcatgccgtgttggacgcatgcacatgactccaccgtcctccattcagccgatagagtagcgtctctgcctcgtctcgacgtacgtaccggctccggcatcttgttggcgtccgtccacagctacctgctggtcgatactcccaatgcagcgccttctagtagcttggattcatgcttttgcatcgtcatattggccggtgcgcaggtcgtggatgtggtggatccatggacctacgcgcctgtacatatgtccgttctatcttctgcatctaacgagtgacgactgaatgtgaaggcgtgggcacggtactcgacaacagtagtacacgataccgtcttatctgtatcctgtaggactcctccgcttgatgccccttggatcaggcaaccagtacacttgtactctgcatccaactggttcttgcatcctgaccgaactcgccgcctacctacagtcaatctccgctatttttatttctcgttatgtatgtgtactgctgattgatgatgatgaatgactaataatgcaatattcttgcatgcatgcagatccccaacgggctgggcgtgttgttcgcgctgggtcagctggtcctgtacgccatgttctacaagaacacccagcagatcatcgaggcacgcaagcgcaaggctgaccaccagcagggaaccgtgatggaggtggtcaccgacgccacgccccccaacaacaacggcaacacctactgatcagtgatcaaaacaggaaggcgacgacaagaccaagcaatgcatcttccccaagggatgatgatccatgcatatgcatcttatatgctgctgtcgtagtctttctaatgctattacattctgcatcctactagtataaccaaacatatacagcacaagaagggctgcgctgctgcgttcacatttatgatatataatcgtctgctgcagtcttattgctggtcttactactgctgttactggacggaggtccttgcgtcttcttattccgcacgccatagctgatcgatttttccgtcgtttaatgctccgccttttttaatttcttgtttctatatcctcctttcattttcaggatggtgctcgcgttggaaatttctttaataaaatattattttgaagcaaagcaatctgctttgttgttctgaatgcatacttttagtatacctagtcagtttgaattaatctaaacctaggatgacattcttttaattttaggt

SEQ ID NO: 4466 - DNA, 3556 bp, Sorghum bicolor
cctcatcaccttcagcctcaaccgcctgtgcaaaagatttcttgatgtattgaatatattcttcttcccagtatcaacctgtacatccgccggtaccgtcccactaaaattagaatagagaatcaaaagtttaattaatatcattaaaaaaataggttataagcaaatgtctggaaataacccacattatgatccggacacttatagaatatacgactcttgtttactccctcttttgacactttatactccatcacaatcttctacccacacttgccgcaagtaatgagagggagtttcggctgatatcgcttttgaacctgttgagagaccgaagacccggtacggttgccatctactaagcatactcaatttttaaacaattacaaattccacattttctagtaaacatatatgattaaagaagaacctaataatatcttttatttgtctagttacttcaacaaatttgctaagttatacaatggatattatgtagttataaaaacttatcaagtgatattaacaaaccaattaatttgaactatccgactttctaagatcagtattgtaaactatatacattaactaaattccaatcctctcatgttctaatatatatatatatatatatatatatatataaagataaaaagatttaaaagatactataattcattcttgtaaactacattactaggtcaaccatgaaatataatatatatatatatatggatactaattcaagtgaatgattcaaaataattaatttgaactatccgactttctaagatcagtattgtaaactatatacattaactaaattccaatcctctcatgttctaatatatatatataaagataaaaagatttaaaagatactataattcattcttgtaaactacattaatattaggtcaaccatgaaatatgatatatatatatatatatatggattgtaattcaagtgaatgatttaaaataataaagtggatttgagctaaaaatgatcggaaaatcacaaaccaaaaacaatgtgaaaaagacaaggaaggatgaagttagtcacctccaagcacgaagagacgatgacagagtcgaagaagatgaacgatgagcgtcagagatgaagaacaaaggaagaacaagcaagaagaacaaaatacaggctctaagaacaacaatggtgctttctggtttcaaatgatcccctaggcagaggggaggaggtagccgaggcctataaaccgaacctttagcaccggttcaaggctcaaaccattgctaaaggatcacctttaacactggtttgtgccctgaaccggtgctaaagggtttggctctgcccatggcaccggtgctaaaggggaccctttagcatctgttggtaataataaccagtgctaaatggtccttgcctcaacagcatctgtcagtagccgttgggcaggcccctttagcaccggcccgtgttacaaattggtgttaaaggggtctttagctccgggccgtaaaaaaaccgaggcttttggtgattttgggcatcgaccaatgcctcagttaaccgcgaaaaaagatctatttcctcaagcccctagtatatattatgggttttaagaaacgtaaatgactttggaaccgtccatgcagagctttattgtatcatatatagtcctagtgtgatgattggtctgtagtttcgagaaatgactaatttgttatctattttttcaatctataaactattctctatagctggtgttgctcgatttcagagacccaagaacatacgccacgataatttaagcaatttatgttttttcttagcaccaccaaatgcgcatgcccagcccaaaaatgggtagcagcccaacggcgtccatggcgcttatacaggaggagaaagagaatgcttggaggagatgaccccttgcccaaatatagcaaccctcccggcttttattgccaagctcagtcatgcattgatcgatttcataagtctccggtcatccctgcaatccacgatggctcccaagatcctagtgatccttctcctcctggccgcagcctcgccggcagctttggctgcattcgacgtgatcgagatgctggccgacaagcccaggtacgccacgttctcgaagctcctgcagcaaacaaaggtcgcgggagaggcgaaccagctccgggcagcgacgctgctggtggtccccgacaaattggtcaagtccctggcgtcgctgcccaatgataagcttcagccggcggtcgcgaaccacgttcttctcagttacttcgaccccatcaagctggacgagatgaagacacgcacagccatcctccccacgctgctttccaacaccgacaagaaactcggcgtccttaactacaccagggccgacgacgggcagatgtactttggcgcgcccggcgcctcctgcgtggccaagctcgtcaaggtcgtcgcagcgcgcccttactccgtgtctattatggaggtcagcgagcccattttgccggctgggttcgtgacctctacagccgcggcgccggggcgccgcggaaagggtggtaggggcaagatcaagccatcagcggcggggcttgaggattccaagatggtcgcccgcatgcccggcgaaggagtgtcgggtaaagtgtcgtctaaggataccgtgaccaagtcatctgctccaagccccgcaccttaattattagtcgcgtgtcgtctcgtgctggtcggcctgctgtcaggctgcacgcacgcgttgttgaacgggtgacagatttttgcatcgtcaatttgtgattgccatgcgaccatgctccagagttctacctggtagtaccgtggcatgatggcccgttcatattttctggcttgcttgaactttccacttccatgtggaagagattttacacctatttacttacagcaaaaggtgtgagtattatcagttcatttccatgattaatatagtcagttataatgttttgcagtggtaattaacatgtactcctctttttctttcttcgtataatataaggaaagtttgacatgtctacctgccgttcacaaatccatcacaattattaggactgaggattaatttatgttttttatatgcttccatgacgttggccataggcctatctgataaggcatgggaagcctgcagaattcatgctacaaatcattgcttgttagtatcaataatttcaaagatctcagcattcatatgttatattactaaaaatatcatggtctagtttacatcgcaacaaacaatgaatcatttcaacttctgagctaggaaatatggtcatttttggagactgaacaaactgttggtggctgcatgagaatctcatcgaagaagactcatcacatactccaccaagatgacttttgacggcgtgtctcgaattgctctagatattttagccaacgggtccagctccacgctctctactcgagaaaaacaaagtgaagctgtgaatgtactaaaagagatgctccacaaactctaggtttttgtgaagttgctccatggtg

SEQ ID NO: 4467 - DNA, 9501 bp, Sorghum bicolor
gccttcagcccattttgtttttgtttttcttatttttcaaagctggagcacttgaataatatatcatttggtcacctccatcaccatgaccatcatctagctctattactaggtgtgtaataatgtatctttgtatttcactcatgtcaaaggttagtacatttaggtttaatcaattatccaaaaccaaactaaggttttcaaagatcctaaaagatagtgcgatgtctaaggcctagtttggtagtgattgttcctagcttctcataaagctaaaaaaacttcttccaccaaatgttccttcgctcatctactttcatgggtgatgttgcggatttcccactaagagaagataagagagagagagagtaaaagctaaaaagtagccatgggtggatttcttctaagttttaacacatgtggttcccaatggggacgcgagaagatttgcccttgatgatgctagagtcaacctagggtggagtcactgggctgcgggggcaagcgctggcacggggtggaagcgtgcactagagtggaggtcgtgcattggggcaggcctgttgtggacggggggcgagggcagggtgtggggacatcgtcatagcgaggccgtggcgagttgctatactgcggaggccaaggtggggggatggggtgtgagagggttgccgagtataggtcaggagcaagtcaccattgtagaggttgctgtgggtgtggttcacgtgggggcgccaggggccgcacgagtggataagggaaggaatgaggaaaaaagggtgaaaaaggaaaatttgaaaaagataagggcactacgagtattatactctttttaataattcagaaaagctattttagtgaatggttcaccaaaataaattcaatttcaactttagagctatttttaatccaaatccaataaaaactgattcactggtgaagctaacctaccaaacaagtcccaaaaaagttttattttatggcttcctaatctagttctatttgtcgacccgaagttatgaagactcatgcaattgtgttttccaaatactaagcatgataagatgatattatttttgataaagatgttaagatgatatgatgcgaattatgaagttatgaagagtattctttttgcttgtatcaaagtatatttttcatactttttatgatgttaatgttatcacactagaccaagcgaacattaatctcggccatgacttttgagtcaagcgaacaggaccataaatattatgtaactcacataacaactcacgagcataaatcacaaatcaatcatgatatattttattctttttaaccagatctgtttactcttttgagtgtctttgtagaaaaaaacatgaaagtgagtgaaaaagaaataagaaaattcagagctactctaacggttttgcattttttgtttggcaaaacgttgagtttgccaacttaaaaataaatatgacaaagctaaaaaagtctatcttcaaccgtttcccataatatttttctaaaaaatagaattatggacctactcgttgccctcgcttttttcttcgcacgcagccaccagtttgtacggtttttcttttcctccgttgccaggccaaggctattcccccgtcgccgccatccgcgcgatgttgctggtcgccaagacatcaacaagagtccctgttcgctgatgattgcatccaccgcccactggatggtgggcgacggtgacaccatggagcaatcgtgcgggaactctgacggtggcgctcgggagaaggagtaggcgcgtgggaggagtcacttcgtcacacaaaaacaccaataccaagtcttgtgaacttttacgtatatgcacagtttgatcctctatttaacaagttgctaattttgtcaaagtcaattaccaaatcattagagataacttttaagcttttttttaaaaaaaaacaagaatgcttaactcaaagtacaaaagctctaaacgcaggggcgcatgtgttggattaatagaccggtgtcttgggctcatgggagacggaacaatttgaaaagcttttggcaattcggcggcgccatgatcttcttttcccgctcgctctaccaaaattgcgcatccaacatcttcttttaattggagacccaccggaaacggaagaaatccccgcataagcctctcgcaccacgacaatccagcattccttcatttcgaatctgagagcctccacgacctagctgcatccttccttcctccgagctcgtcgccggtcactttggatggccgcaccaccggaggggaacgcccgcttcggcgaggggacggccgacgtgctggagccgcagccgctggaggtcatagcgccggaggtcaaggccaagaaacgcaacccggcgcccggagtccgggttgttggtcgccggatctacgatccagagaatggcaagacctgccaccaggtgagctaatctgcccgtccttcctgttcccctgcttctgatttacgaggtacttagatttgactcgttttgctactctgttctctgcagtgccgccagaagacaacggacttcgcagcggcgtgcaagcaagtcaagaagaagggtccgtgcccaatcaagtactgccgcaagtgcctccttaacaggtaataaatggccatcctcaatttcttcccagcgggtgcaatttctttctcagtggtctggtttccttaggtacggcgagagtgccgaggaggcggccagcaaggaggactggatctgccctaagtgcaggggcatctgtaactgcagcttctgtaggtgagccgtgcatagatgattcgggggtgctggtgctcagttcagttgccatggtggggaatctagatcttcttatttgtcttgtgggtgtttgaccagaaagaagaaaggcgagatgccaactgggataatggcccacatcgccaaggcttctgggtgcacctctgtccatgatctccttgagaaggggtcagatgtggtggctgctgcgcaagcgatactcaaggttaatgctagtgacaaggtattgctgttttactctctaattctatgttgtgccttgcaataatactcttgttgatatgctttactgacacactgttacaaacatgcagcagggcacaaagagatcccaagggacagatgctgctgatgaggtggccactgaaaaggatgtaaatataggcattgatctcaatacagttccagcagatgaaggggatgaaaatataggtgttgatctcaactcacttccttctgttcatatcaagaaaagacagaagcttaagcacagggcaaagaaggatcctgctgatgaaacgtcacatggtggagtcaatagtgaaccattgcagatggatgagaaccctgattcgctcaatagtaacactgtgctacccaggggtaccccagtcacaaacattgcaggtgcacaacttgacgatgaggatgttggggctgcaattcagtttctagaattctgccgtgcatttacagaggtagtcaaaggcaagaaagaatgagcttaattttataaatataatggtgcatgccttgttttgttaacacttggttctgtgttcggatatctgagaatttgacttttgccatgattttgcatcttatgaactctagctgcttaagtaagtttgggttttgatgccaagcggaatcttaattaaaattagagtttgctaaaagtttggaatcctagccaggcaaggagaggtatttgtgggtgttggactgaggcatctagaacctgtttgtggggatgcaaaccatcaatggaaagggatgttcgggctggcgtgtgattatggagcctgtggctggtgaggcaagatgtgagagaaatatgagcttttcttgaacttactgctggttgatcttgaggaaataggggcagacgcacagatagcgcagtggttgagcacctgagttgtggagctccccaccagggttcaatccctggtgctgtatggttgtgtgcccacctccgtggttgaaacagtgcagatggttccttggccgccaaagaagcatgcacgtgtgagtttcctgcctgttctgggtttggtggtccccttcttaaagactaaagttaacagggtgtctctcccctgaatcaagtctttttaagaaaatagggaggtcctgcagctggtctagcaactggccatcatgttttgttgcttggaaaccttgattacatgactctgaatttaggccttgtttagatgcacccaaaaacccaaaactttacaagattccccatcacatcgaatcttgcggcacatgcatgaaacattaaatatagataaaaaagataactaattgcacaatttacctgtaaatcacgagacgaatcttttaagcctagttactcgattggataatgtttgtcaaataaaaacgaaagtgctacagtgtcaaactccaaaaaaaatttggatctaaacaaggccttagttttgagtagctcacgcatagcttgtttttttttgaaggcagtcacacatagcttgttgaagcgtagttgttacttaaggtgaccgtgcttattaggcttaagttgtgtccagaagtaagcagctctattgatagtttacatggccatcattgttaagtctatattagaagcttagcccatgaaacatcaaagagagtgcagatgggtatttctaggtttaaaattagtgggcactctccccaagagagtcctcctccaggcacttgcccaacctggatggaacttgcgcatatcttgtaagttcttgaaagtgccaatactttactgtgtatgttgtctgaacttttttcgtctgatgcagatctttttggtgtttaagtttgctaattaaggaacataattaccatcagagtatcaccattgtttgagtcaattcatggccatattaatttgcattggcttaccatcagataagtaggaccacaaaaaggaaataaaaaaaatgtaaaaatacccagtatcacaaaaaggattttcaaaaagggaaagacaaacaacatcttgattccttccttggaccgtgcctttcgtttcttacacctcatgaatcgtgcagaggagttgacccttctctctcctgtgttttatttgactactccagtggtcatgatttagttcaaaggttctagactggcctatgcacatttgagatggcataatctataattgtgtcttgtttgtattgtgtgctcatttggagattgaggttgcacttaatttaaagattctgatacttaactctcctgcgtgttctagaaattactgcaaatttagtattttagtttgaaaacaggcatatgttggtgttttgaagtctaccatacatgtgtctgtagttctgcatgttgtgtctttgttcaagtttcaagtcactatagatatagttatttacaaagatggattttttttaaagaaatgccatatcttttaattttcttattaaagacatgccatatcttttaatttatttgaaaattgataaatcatttatagaaacgatgaaagtgcactaggacaaggcatatatagtgcacaataaatgtagaaagtgccatgcgatgtcaagtgcataataatagaatctgtttttgatgctgtgctaccgtattattttatttattttaatctttgacacataattattcaccttatggataacacagagccggggaatgaattttttaagagaaaaaggtacagtggcaaatttgtggcttcaacatacttgcctatatgtttaatatgtctgcagcataaatggttaatgaaaaaaaggatatgattcttttttttaagacattcatcattagtcgatgaagctggtggacggaagttatgcttgttcatttttatttttgtttatgttgatagttcgatggcacatttttattaatgttctttgttgacaaaattcattgtgttataacttgttcatccagatgaaagaatctgagctaaaagaaggctagaatttgtcatactaggcttaatatatcttgcactgatgagttgttacatatcactgtcgatttagctggctactctacctctccaattgtgtccaaacactataacaaccattttatggcgagctagtgactatgaacccttgtctgttatagcagtagtatactgcaatctctataacaagaatagcagtgaaagtattttgttagctgtgacctgttacagcatgaaaagttgttcactaacaactagaagaacagtgacttctttctttcgttctttcattcattcttttttctttgaaagttgatattatgaaagtgctcattgcaggagtaatgcaagcataatacattattagtcgcctagttggtataacaaggcattttcacaaatgtgttaattattttcggcataatatgcagaaatcagacatttattatcatggtagaatggaatcatcgctaaatgaacatatacaacatacttaaagtgttataaggttcaaaatgttttgttttcgagcctgggtccctagtatacaagttgtatgtgaactctactcaacgcacacacacgcactgataggattgcagatcctactgggtttgctgtggagattgtagggatgagtgatcggaggttgaggacgaaggcggtgctggggcgccgtgatctagagctcgtgagagaaagagagagacggctagggcaggggttaggtctcccggctccctaaaggaagccgagcaaatatgattgctcttgcttaattatatcaatagagttacagatatttatgtcccttctactccctattttgctaaataacttatctgggactaatataaattgtaaatacaaagataacagaacttataaatataactgggctgggctatcagcccattaatcatacgttgtccataacacgcacacccgtagaactacaacctatacacatctcatgtccttctggaaatcaccgaagccgcatggacctcatagatgatgggcacgtcgtagtcccattgtggcgccatgcgaatatccaggacctgtaggaaacaaacccgggaaaaatcccaaggtgcgacacccgagtcgtcccagctgggaatcgaactcgggtgggggtggcgctaccactgagcggcttcaccacggagccactggctcgtccgcaggttcaatatgaattaggattctttaatgtagtcttcataaattgtttattctttccacttaacattttaatttccctagcatgaacacttactttcatgacacattaaatttttaataacatcgaacatgttctttcacacagatttttcaaataaagaaagggcaaccagaaagaattcttcaagatttagttggaggccgtgaacttcggttggtgtcctcagttgttgctgggtttcacataaatttgttatctgtcattcgagaaggaagggggaaaaagtaagtacaatcgaagttgatagctccttgcaaatttgttttaatgtagttattaaaaataaaaatgttgttttttctccaggcctctggcttatacaagagatagggatgcatgggtaattgatgttggcaaatatataagtgaatccgcatttatatcaaaaggatttcctctcaactatatcaatcaggggatatcaggatataaaaacttgagcccttcttgtaagctgcgtgttctgaattttctttgtgatgagaccctctctactgagtgagtagtgtctattacatttagtaaaaatttatatacttctgcaactctctttgtttgtatttttttgttttaaccctctattgagtaagtagtgcttactacatttactaaaattaattcacttcactgccactttctttgtttttttttattttagaagggaaaaaatgttttttattattcttttttagaacataaaaagtttatatgactgtctgttatacgttcgcaggaaataaattaaattaatgtggtagcacaagtctataacatcacatttaaaataatggtggaaatatattattattctatattaatgatttatttactctgtttagcaagctgaggaactggattgacatgcaaaatgacatagctgctgaaccaatgaatgctgctagagaaaaagctcgtgctgcaaaagaaatggtattcagcttagcgtgccatctctttctagggtcatgaccataaagcattctacaatacctttgttttgtttcttaggaaaaggagctaaaggaaaggctaaaggacaacgtggataaaacaatgctttcaccaaatgaagcagcagcctttagcagtgaagaaaataagtatcttctttcccaaataaaggaggcacaggaagccaagcgtgcagccataaatggtctcaacaatatgattggatatatctagaactttccactttacatttgttagctttatgcaaatttctcagttctctatctgtttgattagttgcaacttctatttatgtgttttcacaccacacttccttttttcttcttgaacacgatggaaagttgtgtatcattgcattaaaagatggaagttgcaacacaaccaaacaccctgaaaaaagatatttacatccgagctagttgtttagtatgaatgttcatcttttgcttcccaggtatggcaactatggagaagcaaggaggtctttggaccaagcctctgatggtagagaaaggagtagcatattggaagctagatggttactgtgaaaactcagcaatattgcttcaaggtttgtttgaagtccttatgcaataaggtttaatttactcttctagcctctagaatgctacactactgatttttatatcatgtttatgccagagtatggtgatgatgaattaatggcaaataaagacaagtggtttatgtttactgaagacgaagagaaagtaattgaagaacatgtagccacagggtaaggagtttatcttgccacatttggatgcatttctatctttccaatgatggtgaacttctcttttgttgcttgtatatcatgaaagttatttgatggaaactctatctgtattttcttctgctgtcgatcctccaattactgctatcaaagctcattttatgtggtgttttcatgattagacagtctgaaagtagcttagtagcatcctaacaaatgtggcacacgattcattccagtatacctgaactattgtgatcaataaagttgaatatgtaacgagtgattagagtattctggcaatcattccttctacaaataccttgcttctagggaaaagaagttcttggagctctattgaaaagagttttatttttttctggactttaggttgacagaataatcactcctttttgcaatacattgaacttgatatcttgacctgtttggttaacttctgggttaagagctagtgctttaggctgggcttgattgtcattgttg

SEQ ID NO: 4468 - DNA, 5007 bp, Sorghum bicolor
aaagaacctccatctaataatcaactcttagaaagagtctctggaggagcatcccagcccctccacaggctcgggggctattgttgggtaccataaaataggatatccaaattaagaggacaaaaagcggcaagaaagagtaagaggaacgcccgacccctttggcctcgggcacagactccgtctcgcccgacctctctggcctcggacgcagactccgtctcgcccgagccctgagtctcgggcgcaatctccgccccaaccaagctctagcctcgagcgtaaccaatgcctcgcccgagcctccgcctcggagccaggcttctagtacacagtggtcgtacccctgatgcgacgtatgccataccccccatgctgcaacagggcgcgtcaaccactattctaacaactcttgtcactgtggcaccttatctctttcactttaaggcattgcctaacagtaaaagaggtatggggaagattaacccctgcccctgtgaccatactctggccgtcactgttttactattacaggacaagttgcagtactcctgacccgacttccacgatccaaacagggctcggcgacactccaccggaataaccacgccgtcaaccatgccccaaggacgaggaagccgatctccacaggatcggcactgtcactccaccttctgctaagagtaatttacaggcttacatatgtaaaagctctgccaccccttgcggctataaaaggggaggcagggcacccttcaagggacacgacactcatcgtcgcacctgagacgcaagcgtagtccacaagtagcacacaccactttacacacatagagacaagggactcaggataccaagtctccctccacttattttccaaagccgagacttgagacttagccctctcttgcaactagcttgtacaccccaactacaatcactcttaggtgtaaggcaatacagactccgaccatctcactggacgtagggcattcaaggcccgaaccagtataaatttcctgtgttctcttgcattaccattcagatttagaaaggcacacagactcagcactcgttagtgtctggatcctgagtttaggccctgtttagttactcacccaaaaaattttcatccatcccatcgaatctttggacacatgcatgaaacattaaatgtaaacaaaaaaataaactaattacacagtttggttgaaaatcgcgagacgaattttttaagtctagttactctatgattagccttaagtgctatagtaacccaaatgtgctaatgatagattaattatacttaataaatttgtcttgcagtttcctataagctatataatttgtttttttattagtttctaaacttttttcaacatccttccaacatattcgatgtaacacataaaaaattttcattctcaaattaaacagggccttagacgccgtcgctacttatacttggctttgaccggctcgacgcgtgacagtcgtggccggcctcaacctccgatgaacacgcagtctgacccctcgttcattgaacttgagcctctccatgactttctggccccctagcacccagacccgtccagatccattgcacctgcactgcaggtcgtttgaatccagcggcgcgccagtatgtaaacccttgctctccgagcctcccaggtccgtacagctcccatgccccttctcacgtgcgtgccccgccacgagaaaaggaaaaaaaaaaagacaagggcctcgttttcctgcgagatcccgtagaaaacggccgggcgcggcaggagaggccgccacgcacgccggggcccggggtgcatcacgtgccggtgaccaccagtccaccagccacagcccacaccgtcctgatcctcatccgggtcatcgcctcgctcgctgcgccgggaccgggacgggccgtgtccgtgtgtgtacgctggcgcctggcgggatataaaggcggccccgcgcccaccgcttcttcctccctctttcacttctccgaatccccaggcaggcaggtcggcgaagagggcaggtgaggcagcaaggccgagccgcgcgggggctcgggacgggacaggcagaggagacctacagaatcccagatccttcctgcccgcccgtgcccgtcggcgcgtcgttcttgccggccgcgcccgacctccggctcctcctccaggtgattgctgcaaccgaccgtcttcgacggatggggattctttggtggggttggacaggatgccgccactgcgtagtgcggtgtgacggtcggatttggaggatgctctgcataccggcgcaagcattgggttttggtgtttgtgattcattttcggaggtttcccgtcttgcggtagcaccatggttcggattgggaccgtggatttgactccgtctctgctcctgtttttgcaggggaatcggatacacaacaagctgcaggatggtgctgtgggtcttcggctacgggtccctgatctggaaccccggcttcgacttcgacgacagaatcctcggctttatcaagggctacaagcgcacgtttaatctcggtacggtatggatgtttgtttgcaggcgcttgcttgggtacaccctcgttgacccgaacctcaacctcaacctcctccttttttttcccctgcagcttgcattgaccacagaggcacaccggagcatccggcgaggacctgcactcttgaaacggatgacgaggccatatgcgtaagaaaccacttcatgtctatccttatttcccctgttttcagtgttcttgttgcaaagatgaattattgtagcttactgtgggtgattctgtacatttaaaatggtattgtacaacattcttcccttctttaggaggcgaatttagtatgacaaatagttacattgtgtcatctccatgaccatctgagtgatacaaacggcctagggaagttctcacctattccacaggtagtagatatatggacatgtatatctgactttaacacaacatgtagagtactgtacatctcctgaaactcatgcaaaatcaatggctgacatctggaatctacccgcagtttctcatctttcaaaagctctaacctatttagagagcatgcatggcctgtttgtattcattactctctgtgtcaaacgcttgctgggcacttttagttctcactttttgtttctgatgaatgttgatatgtccattccaagttccttgcatcagatgctactcacatttaacactcccatactagtttcctgattgatcctatttacagttcaaaccttttttttcttttgcagtggggaattgcatattgtgtcaagggtggcccagaaaaagagcgaaaagcaatgcaggtgcactgcttttctcccctgtgttttgcagttcaaaagaataataacaactgtatttgtgacactgaccttagcatttcagtacttggagagaagagagtgtgagtatgacctgaagatatccattgatttctacaaggtattaataattgtgtgaacaattagctttgaactagtttttcgtttttctttcagaactctcatgttcccttgatgtattgttcaggaaggagatcccctgaaaccagctgtgacgggtgtcttagtgtaaggatctgaagttccgaagccaaacataccaattccatgctatccgttgttctttttctgtggaactcataacttggtattcatgcagttttgtgtctactccagatccaattggcaacaagtactatcttggccctgctcctttgcaggatatggcaaagtgagacattgcactcctttactgttctttggacattttaattgatcaagcatctaattctgactttttctacaatcttgtctgcaatggcaggcaaattgctacagccaatggccctactggctataatagggattacctgttctcaatggagaaggcattagccagcataagtaagagaacctcttttaatatttttgaagtgttcacactcgaatatctgtctgtttatatacccatgtgttacataaaatacggtattacctaggagtagttcatgtatgcgctttctgctaagtcaagatttacatcctaagactcaaacatcaaattgtgcttatgctgtcctcttcaggccacgaagatgagtcaatcatagagcttgcaaacgaggtgaggaaggtgctcaacaaaacaaaggagaccaagatcactggtgccaatgcttccctcaaatctcatgcccctcttgtgcacctgtctgcgcttccagaaggcaccgttgtggactcgagatagcaagagccttggacgctcgacctctactacccggaatttactttcagctcttgcatgtttgtgcccatcctgtactgaatttcccttctcaatggttgatgtgaggctgtatcttccagagtgaaaaacgctaaagccggcactaataatgatattaattttaacatggaggccatgttgtcacttaaagcgctctgcatttgaatcgcctaattgttatggttatcctagcgccggacgtttggcgcgagctgagcacggaagctgctccccttctcaaaacggtccacaccgtgtacaatcggatcgaaaatagaatggaatagaatagagaactgcctgtccctccgcaccattatttgtcgttcctcattgcatttgtgtttccgttcccacggcgctccgttctctaccgctcctatgttctaaaagcagaaattacttcaagcgcaacctcataaaaaattatgtgaactacgtagtccaacatagggatataaaaactggaactcgccaaactacatagtgcaacatctaaattacgtatcgcaacataaaaacttgaactcgccaaactatgtaatataaaaactggaactcgccaaactacatagtgcaacatcgaaaattacgtatcgcaacatcaaaaaactgtatattacaacatttggcaattatatactgca

SEQ ID NO: 4469 - DNA, 10110 bp, Sorghum bicolor
ccgtaggtacaagctagagagaagacatcgatagatcgggcttcctcgaacttctacctccactctaactatcttaatttagaagaataactctaatctcacatagagactacaaaactaaactctcttgtatgtgccctagagaaagatccattcaaggaacccctctcagacgaattttctctagaaaatatgaattagggtttctgaactctcttgatctagggtccaggggccttgcttatatagccctctaggaatcaccacaaccctctgatcaaaccaaccttgatcaacgattattattcatcctcaaaggcggtggaggcacgatccgtgagacgcagcctgattggctctgtaggtggagcagccgcctaggagggtggcgccccgtccctgtcatgctggcaggtgggtcccaccttctagggagtggttctcgagtcttctagattatacttttttggtgtatggtcctttctctctataagtctgacatgtgaaccatctttgattgtttctagctggcaccctgcagaaataaatattcaccaaaactcatagaattttgttagttaaacccctagtctagggtgataactttatttataggattcttttgtttaagttgacggttaaaaattgatacttaattaccgtcaacagtgggctaccaataggaacatgatggttgggcatgatcgttgttgatgttgccatcacgtggaaggatgaagatgaagaagaggaaacgttaaaagagggtggttttattcgtattcattctctggtatggagtgtttccatatccattggtgtattttaacaaataggaaacgctaaaatgatcaaggagaagagcacgaagatcttcaaagagactcccaccaagcactaaatccctagcaggtgttgtcaaagcttccttcgaccagttggcacgaatgtctctagcttgatctgagaaatgccaatgtattcaactacctccagacatgcttacaggtcatcatttctaccataagcttgtcattggtcgtgtctaggcgtctcggcaccggctaggatcggttgaccacaaggtatggtggaaaatctaactttcactcacaataaatctacttattaattgaaataataatgataggccctggacatccggctccatcccgaaacgcgttttcaactagctccatgcagcgttgccttctgcacgctgccgacgagctccacatcgctgaaatccgtgcccaaacgctctatcctaaaacgcatgtgctcctgtactctaatgtcgccgctatcatcctcacccatctttttttttgtgaatacatccttacccatcttttgcatcaccgccagccccaagggcatcatacagaagctaatatctggacgtgtgggtgctagactccctctggttgaaaccacttgagatgttttctatgggatttctacacttgtacacataatttttttgttaccacacatttcatgtactctcagtaggccgattgaggtgttttctacacctattttttttttggtaccgtaggtactctcagtaggccgattggcaacctgtgcagttttcacgagaggacacccccagtttaatatttacgtagagacccctattaatatcagcgtgttccttgaccttgaaaagtccacgggagtaccgaacgagtcctcccttggcgcaggggcaaatccgtccatccatcctcaccaccagcagccaacgcgaggcgaggccgcccccgctacggcgagacgtcaccgatgcccttcacaaaaaataataaataaacaaacaaataaataaaaaagaaaaggaaacggatggaaagaaatctccaagtaattaacgggaggagatgcagcagggagagaaaccaccaccagacccgagcaaggtgtgtgtgggggagggaggcgggcgtagataagagtcgtctcgctcgcctcgtcgtcgcaggagaggagagagagagagggagggagagagaggaggctagagagagaaacaaaggtggtggtacggtagtagatgtgagccaccctctttgtatccctcgccaacttcttctcctaccaacttcttttcgtcccctcccaccccttccttaccgtctcgcgcccgctcccgcagcctcgctccacccgccgccgccggccggccggcaccgccggtacgtaccctcacgcccgtctcgttacgcctctgcgtgcctcttggacgtcgcgccgcattcattgacggccgattcgccgccggccagcgcgcgcgtgttgtcgtcgtcgtggtcgttcctcgttactgaattccgcccgcccggccggcgctgtggttgaccgccgccgccgtcgccggagcttccgccgttcctgaattccgcgtcgctctttgccgccgcgccggcgggtgctttgcgctgcgtcctgtgtcttgtgttgttgtcgtggcggccggccgattgattggaaggaaggtggcggtggttggggacgggcttgcgccggaattctcgcgttccggagggtttctttggattgctcggttggtttgcgggggttgcctgccagggttgggtggctgatgaggtggtggttgggccagacgtctcgccacccaccctgtttctgttcgtgattgatttttcatgttttttttttctcgttattaggtcgatgatggtaggcgtaataatcgtatagcacatagcggttgttgtggtgaggattacgcctaaaaatgagtctttgagggggcaagccttgattcttgtacttcttggtttcaatgcccgatgattgtagatcgtgcaattctctgtagccgtatgagcgtttggagactcattgcacgacgaggtgataagcgctgacctgtttttttttttttcctttttgttacaatctgcggttcagtgacagagaagctcctgtccgcaggacttaactgtctgatgtatagcaagattctgtaggccctggagtgtgcctgctcatttgtgctaactggcagtggtgacaagtacactgacataattcttgcttctatttttagggtgttatttattcattggactttactgcatttaggttttgcttagtcggactagtaccccccatgtggtaggaacgggactctttcagaaatgaggtgcagtaggatggtgttttgaaaaattggtctgttgtcaccaatactgtttaaacgccgtgtaaacgctacgcaatggtacactgtttccgtttaatcatccgtttagtccgtttaattcaccgtttagcccgtttaatagactgtttagcccgaataatggctaaacggcaggtgactgactgtttacagtttagcgtttagtaaaacattgatatcagcagtcctttttgtgcactctgcactgatgtggcaagacatcattgtgtcgcatctttgaacaatgtgggtgatataaaacacgagtgctattagtgcgtgctctagcccacatgatggttatgccattgtaaacatggatttttttttcttattcttattttagtctcaaatttaccagtttcttattatctctccatatttctgactctgctgcaggtggcatttcaagtatggttagcttgaggcgacgtcgactattgggtctttgttctggtaagaggaaacttatttagtaccttgaaatatcttgccaagatgtaaaaattgctcagaggatttatgttatgaaaaaaacacttttttttctgtatatgaagtagcatatcacatctgtcatttatacttatcattttgattatggtctgctgtttgaaatagaaactttatatacctttccatttcagtcatcattttgtatgaaaaatgaatcttgttgcatgtgttccagtttttaagagttgtttttcatgcttagtctaatttttgttaaaagattcaatactccccattcccacatacatgttagtgcttagctgaattaggtagttttttaatgttatattagaaccccaggtcttgggtacgaatcattgtgggagctaatttcaggctgggtaaaaaaggtcagtggctagttcccctggtcggcatgggcttagggatcaaggatgtggagcctgatcgccctccttggcaggctctgatcataacaactcacttcttgtttgatccctaagcccatgcgggttacaagtaaacagccatcgaggctaatctactccctacaatcactccccatctttcctattattcctcctagccgactgaactgcatgcaacaaactatccaaattagcagcactcaagcggcctgctaaccactttaagttgtggacttggtcttcttgcggcctgtgtaaagatttcccaacaaaagcgtccacagcatgggttaaggcctgaaccgtagggtgcagcatctccatgtatgaggggacccagcttttgccacctttctcagccgagctccggttgagctcttcttagtgaaatgccatggggggcggtttttccccaccgcctgagttttcttaatgttatatgaggaacgagggccattggaaattaggagggcaggttttccaagtgtgaagtttggttgtaaattaattgctgcctgtaccagaatttgtactttagtcacgcttttgagaattcttcttaggcactgtttggatccttggaatcaaattcattttaataatcataatttaggcacatattaattaagctaactaatatggttgtatatggattatatttgtatattattgttggctatacgagagtgatacttatgtgttgcatatctaccttaggggagcgagttgaagagcatgttataagttgcaaagtagaaacatagaatggtgatccatagaaccaatttccatctcccaccctatggtttgagataggcttatatgtgaactttggaatttggtggaacgtcaaattcgaagtcaaatagtctaatttattaagtagatttcaattcctccaaataaaaagatccaaatggccccttagggttatgtcatatatctgttcttttaagtttcacaactgttttctaccaaataagaaataaataacttttcttcacagttatgtgaacattgttccttttaagaatggccatattaattgtcctgatattccagctatactttttatatggtcaagcagcaattaactctaattggagtttttttttccaaaagatatgtttgaactttcatatgtgtggatacaacaaatgttcttggaatagcctgctatgtgaatgaatccctaatgtataaaaaaagacaagcccagtgcaaatccttaatgtacatggaaataaatacatgtgtgttaataagttactgcagagaattaggggaacacctcacacccaattggggggggggggggggggctttcatatatatagtcaagtacaacttggagtacaagtaacaatgtaacatgatatacgcacgcgagtccgtccgctcaagtggaggtggtgggagggaaagaagatgtggggccggcagcgcagaggagaatgcgcggtggggtggtcgcgcagctgtggagtcggcggcgcgaattagggcggagaagccggaagggaacccggactcttgataccatgtagagaattaggggaacacctcacacccaattaggggggggggtgactttcatatatatagtcaagtacaacttggagtacaagtaacatgatatacatgtgttagactatacatatctctaatagttactgatggaagctacatggtttttaatattttattggttcgatcactaaccaactagcagccaagaagtatgttgaaaaatcataaatttcaggtgcttggctgtgtcagtattccttttctctacaatttagaaccaagagaatatagaatatttgaaatgaacaaaagtataaagccttatctgggatcatctgtgtatctataccaacaaagaggttggctttatattttgagtaatcacatgagtttagcttttgtttcagggaaagactcattgccagttgatcttcctaagcccattgaaaatgaaaaaactgtggaagttgtgcactccaatgtgaagccattcagtgtgcatcctctgcccttggtatgcataattactttttgtatgttgaggaagtatcttgcacaggagtatattggtgcacatgtgcacacactcaatttttttctagataacggaataaaaaaatcccagtttgtgtcgatgttacctgcttgtgttgtatccttttctccttacggcctgatgagtttcgtagtgacatttgtgtagtacctcagtacctgcattctgcttcaagctttgctgaaaatttgttggctacaatggcaagtatgatttttcttaataaaatttgccttttcgtcgcaggcaaagacttctgatgtgctcacaaaatcctcaaatggttctgatgattcaaaggaagagaaaacccagtactatccaggtctatacttcattcttattctgtattattagcatttgttcttcacttaaagtccagattacttgtggttattgtacttacaaagaagttgatattctataatttgtattggaaatctcaggaacttgtgctttcttcactctcacattctaaagtgtccttaaaagaatatagtttgcaataagaaatttttgtgtgacaattcttatatagctgtgctgggaatgtttcattagggcctgtagcttttccctaaaggactccctgtaccttttcttttgtgtgtcttaccttaaccctatcgagttgaactttacagtttactccacagctgataagaaaattgcattttttttcccttatcacttcaggcaaggaaatcaagcgcagaaaacgacatagaagaaagcagtacgtggatcaagagccctgcattatgaggggggtttatttcaaaaatatgaaatggcaggctgccataaaagttgacaagaaacagattcacttgggtactgttgggacacaggacgaagcagcccggctttatgataggtattagctagactattactgcacacctctgtttgaccacaaattttccaccattcttacctaactttttaccttttcccaacacaagctaatgctcatagcatctttatgcattctgatataccaagatggtgttcatagtatgttttgactagctttaaatgagatcatataatgttgttttgtgttaattctcattaatatccaaatgtatatccttctggtgttcaatctgaactccagttagttcatttttgtatgagttctgacatgcagatattacctatatgcatgcattcactatagttcaaatctgaaatctgcacatcaccaagcttatttccgtagtgtttcctataaacacaagtgtttgcacatgaccaagccatctaaatagcgaccacttctaaatgcgctacccttagcgtcagcaagagaccagagataagcctcctcaaggaaggttctaatcacaagctggatgttgggattagctccattgaagacacagtcattacgatgcttccacaacacccaagcccctaaagtaatcaatgaattgaaaccttacttcacttccttggggaacaaagcgttaactctcatccaccagtcaaaggaacccttgtccttaaggaatggagagacatttggtagtctgtagtggcgaaagagtagtggccacactgttcttgagaattcacaactagacaatatatgattaatggtctcatcctcctgatggacacaagggacattgcactggatgaggtaaacctctacgagccaatctgtccattgtccaacatctgttatgagcaaccaaccatagggaaaaaaaaggcacttctttggtgcccaggtcttcaaaattaattcccaatgttcaaatgtcactgacccaaaaaaaaacagtgatctatacacagatttagattagtaatgaccagattcagtgaagcaccacctatgaacatccaaaacatcagttgtacttccacctcagtaacacagaagcacattttaggaaactgttttcagataaagatcttcagatcaccaaggctgctacatgatctctacatgatcttgcagcctgaggctcatattccattaatttttttgtcatgtttttgtcaactgaaggaaagagtgatgaaccttcctgaatagtcatcgggcatgtgatctagtcttctagagtgctgttggtgtgagttgtgtgtgtgttgttggggggatctcttgctcttcccctgtgtttcaaaccttaatgaaatgatatgcaattctcctgtgtggctgcgtgtttgagaaaaaaagaaagaaaggaacacttgtatggataaaatctatctatttcatctgtaaagttagctctccgtattccccaggtaaaacatatatgatccaacatgtcacagtttactcttcagtggtttggcttctcaccaagactaccaattctgactggcatacagatttgtttagttatcattctttcttaggctctctcattgcctgatttctaaagtaaatgttgcctctattattgtttattgtcttgattcttaatttggtttaagggatatgaccaatatgccgatatgcaacattgattgtatctctgtcaagatcaaatgatgtttgctttgatacgatgtggatgcataatttgttgcatagctaatgattcaccatgaatcatcaaatttgacaaagtccaattttgcgcagggctgcttttatgtgtggaagggagccaaactttgagctttctgaggaagagaagcaggaactacggaagtacacctgggagggcttcttagcagtgactcgcaacacgataaccagcaaaagtaaggcccaaaatttgcaatcattttactgtttgccagcttaaacgttgctcatagcatgctcatttcttttgcctctagaacaaaggaaagttgggttgccaaggcgtagcaaggcagacctgttcatgggacagagtgatggcgatactgagatggccaatggaggcggttcatcgaattctgataatggagacgcagagacgtcggcatcttaggttgctcccaggggtttttgccgttgtggcaactcaagtggagtcctccagcatattcattccgagcatgatatgagctccgtttaggattttgttctctcatcaataattaattttcatgtgcataaggcccccgttggtctaatcaaaggttagggaaatcatgccatctcaaacaagaattggaggtggtccattgtagaaacaattcatgtataccggttccgaaattgtgtatatctaccgataggttcaccttaccttttacccaatgtagttagtttaccttatcatttacccaaaagaaatatttttccctttccggtaataccatccatacgtcatttatgtaccagtggaaatcatcctgtatatgtcttgatgagtttactgccgacatgcttgaaactttgacattcttctaagtttataagtttggaattgatgctgtatctttggacccaacttgaggtatacttgaagttggaacgaagaaacgcataatagaaacttagaaagtcatgcagtgtgggagcggggcgcagactttttcttgcatacttcagctggctacaccatccgcacttagcagccggaaacatggaatacggccccttaggccttgtttagatacgaaaatattccagatttcgctactgtagcacttttgtttatttgtggcaaatattattcaattatagactaactaggatcaaaagatttgtctcacgatttatagacaaattgtgtaattaatttttgtttttgtctatatttaatgtttcatgcatgtgccgtaagatttgatgtgacgaggaattttgaaaactttttgattttcaaggtgaactaaacaaggccttattctagaaacgctgtttcaggaacccacgtccctgattttaacatttacccatattataaaatactcccaagttcttgttcctgttc

SEQ ID NO: 4470 - DNA, 6514 bp, Sorghum bicolor
  misc_feature (922)..(1021): n is a, c, g, or t
tctcgagttcaagaaagagaagatacatttctcgttataacaagccattagatctgttttaagtaggtttagttgaaataaatctacagacaaaattacggccctgtttagcacagctcacaacagcaaacacagctcacaacaacttcataagctattgtaagctgttttttttttccaaacactttttttttaaaacagcttcatgtgtgaagctatttttcttcttctcttacaaagacatgagttgtgacgaagttgaaaaaagtagcttatcctaactctctctatatattttttcatccatgtatgaagctgttagtgaagctgttttgccaaataatttttttaaaacagctcagcttcacttagaaaattgctcataaaactattttttgaaaaaataactttactagtaaagctgagctgtgccaaacggagcctacataatttgtagttagaatttttacctatgatgactttgttgatcaccaccaccagatcaccattgcatagattaattaatttcaccagcagaatttttgatttatcatcaatggtcgtgaagagaaaatcaaatgatcaacatgacgcaagggttgaagcggcttatgttgtagccaacgatacaactgctgtcgttctttcgttactgtcgacacggtttttcatcggttttaaaacgttagattccgtccgttttgaagttgatagttgaatttacactattcaacaagactctatccggctagagccattggctacgtcggggggtgaaaacaagccattagagaagaatcgatggaagaaaaaatattatattttctatattttccaccccctttaaaaaagtatgttacgtcgtatacaatttctatatatctctacatataaaaaaaaagcaaatttaaggtgccgaatnnnnnnnnnnnnnnnnnnnnnnnnnnnnnnnnnnnnnnnnnnnnnnnnnnnnnnnnnnnnnnnnnnnnnnnnnnnnnnnnnnnnnnnnnnnnnnnnnnnnggggggggaaaaaagggggaatacccggaaattgtgggggccccccagaaatttttttggggtcggaaaaaattttttttttttccacccccccctttgtccctttgaacgcccccgttttccctcccaaccggggttttcaaaaacggggatagatccccccccgggggggggaaaagaaactttttttcttttttcgaatttggaaccccccccccccgaagaaaaagggagttccccccccccccccggggggggccacaaaaaggatttcccggggcccaaaaaattttgggggggggccccccttcgggaacccgcccctttttttttaaaaggggggggggaaaaaaaaaaaaaagggaaagggggggaaacccccccccccccccccccccccccccccccccccccccttcttgattcgcgaccgcctccaccgccaccttctgctcataggacccgtcgtttctcccctgtttgctcttccttccccacccttcattcatctgctttgctccttccgttgccctgctctgcctctttggtatctgtccccctccttcgctcttcctgcaccctccttcctcttccaggctgctctgttctgcagttctgcttattcttgcgtgaacgcgtgtctggtgatctgatctgcatttcagaactagtacttagttgcactacttaaatatggtatagcggtattatatatgctaagaattgacaatattaaggtataatttgcttctaattctagttgcattatatattattaagatgtttgtatgggcgtgcctgtttggaatggggtggctcgcgcaccttgccttactcccttaagaaccttagacattacagttcacaactttcaatgacgctgacaccataacgaaattaccgattattgttattgtattttgcctgaaatcatgaattccttgtttagttactcaactttgtaaccatctttgttgcagactgccaagatggataagctcagtggttctgcacgtcttatgattgtttcagatcttgaccatacaatggtgagtgtgtcttccaactcaaatcttggtctgccctaagctatctgtatgtaattcttttgggatggctaaaacttgcaggttgatcatcatgacgaggagaacttgtccttgcttaggtttggtgccctgtgggaatctgtttactgccaggattctctacttgtcttctcgactggaagatcaccaactctttacaaggaattgaggaaagagaagcctatgctgacgccagacatcactatcatgtctgttggcaccgagataacatatggggaggcaatggttcctgatgatggctgggaagaatatctgaacaataagtgggacagaaatattgtcgtagaagaaactgtgggcttttctgagctgaagcttcaggtatgttctgctgcatgcatggctgctgtcttcatctctattcattttggttggaattaatactgctttgctttttacatttgcatggatacagccagagacagaacagcgcccgcacaaggtcagctttttggttgataagaagagtgcccaggaagtgataaaatctgttgccgagaggttggagaaacgtggggtgaggcagcatgcatcttatattattgtgatttgtttttggataattttctctatgtatgttgggacacattatggttgactgctttatttcttgtgaacagctagatgccaaaataatatatagtggtggccaggaccttgatatattacctcaaggagctggaaagggccaagcacttgcatatttgcttaaaaagctaagctcatgtggaaaaccgcccaacaatactcttgtttgtggtgactctggtaatgatgcagaattattcagcatccctggtgtacatggtgtcatggtcagtgaataatacattgcatcaagtatctaacaaagttaatgcctgaatagttactgcaactccaaaattttgaattgctcaggttagcaatgcccaagaggaactacttcagtggtacacagaaaatgcgaaggataacccgaagataattcatgcaaatgagagatgcgcagctggtattatacaagctattggacacttcaagctaggacctaacatttctcctagagacatggagttcccttatgcaaaggaagcctctttcaaacctacagatgctgtagtaaagttctacgttctctatgagaagtggcgcagggctgaggttccaaagtctgattcagttataaaatacttcaaagacatcactgtaagtacatagctttccagtttgattttcctttgttaagtaccttgtctcataatcctttctgtatcatatatttagtttacctaatgtatgttatgttatagtgtagtgtttcatcttgcatttgtattattcttaaaatttgtcagaactttgtatatcaacaaattgtcaggagagcatgagttactgttccattgatctctaaaattgaattctttcttatttatttgtctatgttagcatgcaaatggagttatcatccatcctgctgggcttgaactctcactccatgcatccattgatgcattgggatcatgttatggtgacaaacaagggaaaaagtaccgagcatgggtggacagactttttatcacacagactggttcagatagttgggtggtgagatttgacttgtgggaatcagaaggtaagtcttgactcttgaatatacacagaacaaccagtttagcttcttgtgccattttatacagttcgttccaaacttccagtttcatgtcatctttctgaacttttctgtttggttatattttttggttgtgactattttgcgttgtttatattttgtagatatagattatgccatatgctgcaggctacaatttgtagaatatcatcatgaccatttcccaagagaaactcttaatacgtgaagctgtgaatcttgagtttatgaaaatggtcaaattttcatacaaaactttgcaaccaagctttcacttgtgattaactagtcatgtgcttaagggttctgcaaatactagttcatccagttggggaagcacagattaaacggttgtatacttagcttctattatatgcagccagaaagtgtagttaactgtatattctggatgtagtgtagatttatccagggtgttttttgaatctcagaatcaaagatgaaatttgatattgaatttgtgctggtttatttaactttatgcatactacatgatgctgttgaaacattgcaacattttgggtaaactatgttttggcgaaagggaacatgacaccaattgatttctaattcttggtagttggtaatgtaattcacaagagaatgccccaacatactgctaaagaaaaatattagtggaaaaaatgtttgtagatttaggaaataagactaagagattcattctggtggggaaaatacaatgagaaactgtggtaaatgtctacataatctgtgtgtggaataggatggaaagtatgttagatgtgataaggttagaatacagaaaagcatattgaattttactgtagcatatgtgatgttcttctttggatggtctgtaggtgtttctagttacaaaacgcatttggcagataaatgagctgtttggattgcgctctcattattttaaagagaacactgctctataatttgagtgcttatgcgttattagggattaaatcatatatatatgccacttaaactaaaactattaaaacaatcctgtgtcatcaataaggtgggttgtatatatgacatgaggcaaacattcaatgtcacaaggatattgaagcaggtttaaatgcctttattcattgagtcagaagtatcatgtgttgctccacactagaaggtagcatgaataaatagacaagttcatagagaagggatgttcttgttttcccttgggatgaggcgagggtttgcatgcaactgttctattgattgcttggtcagttgagatcattaatttaaaagactgatttaattattctgagagctcttgattttcctcagtgtccttcatgtacccttactaaacatgttctataattttatggctttggttcatatgcacgtaaccatgtgatgtactccctccgttccaaattataagccgctttgacttttttggttcatctattttgctatctagcttgactgatatctagatgcataataaaatggatgtaccaaaaaagtcaaagcgacttataatttggaacggagggagtatcggttacattattatgccttgttctctggttctgttcaatgtaggacataactaatgtccctttcaactatttgcttatattttgcttccatctgttattcagagctttccgcaaatacccatttcattctctttattggcaattaattttgacttgaatatgttattcccctctactttcaggtgatgtccgtgtgtgctctctgtcaagtcttgctttggttctaaaggtatatcatcctcttcgttttgacacatctgtagttctatacatgttgcgttttgggaaagatatggagctcatagaacagcggtttgcctatgctaactctatttcttatgccaggctgaatcccccgagggctttgtgctaacccacatccaaaagacatggctgaatggatactcttcaggggttgagcaggcgtctaagctgtagagcaatatacagtctccgctcgcgattggagttttcttgaggatagaatagaataatgtatctacttcatctgagaaaaacttttttctcttgtttataatgttaacttcccaaaacctcactgggaggatctccagggagaggatttggtgcgtaaagataaatgttctgtctcatggctttcatgagaagatgaaataattgattcatcttggtatatatttacgaatcttgttgaataatgcagtgttacctatatccagggatggcaacggccccaacctaatatccaggaaatgtgcttttacctcattagggtacgagtgcggtttaatttgcttacccataggtatgttaatggagaaaattcttacccattaccgggaacgaatatgattctgcactatcggaaccctttaaaatctgtctatggggatgtatatgcccggtatgcaaatataattgataaatgatcattgtcctttaaaatctgtttttggatttttgacgttgtatatttaatgctttatatatgtgttgcaagattcgataagatgagaaattttaaaaagattttagattttcgggtgtatgatgtgatggaacagagacaagcatcgtcataaccccttctctgtctattagtttaagaaaagaaaatttttgggtgttacattgaatatgttgtaagaatattttggattttgacgttgtatatttaatgctttatgcatgtgctgcaagattcgatgatata

SEQ ID NO: 4471 - DNA, 7688 bp, Sorghum bicolor
agggtcaccctttagcaccggtttgtgtgccaaaccgatgctaaaggctttgcctcggcccatggcactggccggtgctaaagaggaccctttagcaccggttggtaacacgaaccggtgctaaagggtccttgccctgacagcacctgtcagtagccgttgggcaggaccctttagcaccggttcgtgttacgaaccggtgttaaaggggcctttagccccgggccgtaaaaaggccgaagttttttgctattttgggcatcgaccaatgcctcattctgcagtagtgaaagatttcatgccaattagaagtctacgaaagatttcaggtctattattctatgtaatgtcatataaaatcacctcaatttcattgttaatgaaagggtcctctagggttggtctttttaaccctgtaaatgttgatgctattgaatggaggagaaacgcatgaaaaatgtagcattctgattcctaaggacttagttcctgcagcagcatttgttttataggaataggtcacaataaaactaagggtcctttggaacacaagaatttcgtagaaatcaatttatttttcatataaaaacacaagagccaaaactttttgcattgaactaaaggaaaaattcttctcttgattctatgtaggaaaatcacaggaaaaaagaatccacttatacctcatgcaaaattttctatgcacaaggaacaaggacaagcaagagattaataagacaggatacctaggtgaataaataagtaacatgaatttgttcatgagactcctttagaattccttaccttttcttgtacctagctaaacgcataatcctacataattcctatgtattcaatttcttagcatatgcattcctacattactattatatttcttatttttgtgttttctcattcctgcattctaaaaggttctttaaagcttcttacaagatcctcgaatgactatttggcatgacattcagagaagacatgggttttctgtgaggagtgcctacaatctagtcctacaactgcaggaaatgtgttatgaacgacgtataggagtatgaagtaaacgaaatcaatcgcagttaagacacacgatttacgtggaaacccctttcaatgcgaaggggaaaaaccacgggcaccaaccgacaacaatcttactatctcaagagttttgggttacacgcttatggcggcttacaagagaatcaagtctccacaaaaccctaacaagagcatatataacagaacatatgacaatttatattagtataaacaattaatctcgtgtaattatgcctaaaattaaaaaacatttttccatctttcaccctcaatatgtcatctctcactcttgaccttattgtttgagtttaaatctaaattttttttgttactgtcacaccactcatatcatcatggccggaccgttcgagcccatgtgcatggctttccacctttattgaactctcataaaagcacacacaaaagtcattaagttgagtctatcttctgtcaatctctcatttgagattaatcgtttattgcattggcatttatcatgagccttgaattatttgatttattaaggttagaccaaacctaattagattcaacaaaaaatagctaggtcgttaagtttggtacaacttaggccttgtttagattgagaaaaattttggatttcgctactgtagcactttcgtttgtttgtggcaaatattatccaatcatagactaactatgatcaaaagattcgtctcgcgatttacagataaactgtagaattagtttttattttcgtctatatttaatgcttcatgcatgtgttgtaagattcgatgtgacagagaatcttgaaaaattttgggaggccttacaagcatcgcataacaaattatacgttctgttaggacacgcaaatatattttgctaatccatgtttccctgatctcccatccatcatcgacatcgtggccttccgccagaagccatccggttcgtttcaaaaaagaagccatccggtcgccatcggagcagccaattagccaaaagcgagcaaaccgcaggcaggcacacccaaacgtgccaaaccccccctcctctacaaacggctctctcgctggctccccgactcctccccaccgccgccctccgatccctcatggccgctgccactgccactgccaccgccgccgccgtcgcgctcgcctccccggcggccatccgcgcatcgccggtgcgccgcggcctcgtcagcttcgcccctgcgctccgctccggccccgaccgcatctcccgcgccgtcgccctccctggtacggcgtgccgaccccacctctagagtgatagaagtgcggagtggtttgggaagctgctgtcgattagtattgaaaggattcctcgatatttctctttaagttccacctaaggcagtattggaatttggaccagcttgggtgaacaatgggttcctgctcttgcgaatgcgttcttcttcctcggcgttcctaacttcctatatcattactttgtaacaaatttgagtgtagatttggtctacttgtgtgaccaaggcatatatgatgatgccctcgcctggtcattcatagggaaacactgaagtttgatcatgacgtcatttcaattcctttttgtcaacatataatataattcatattttcttttttttactaagtaataaactgtatttacaggtgtaagaactcatgttacggctgttgatcaagttattgtacaaggggagacaaagttggaaggtcctgtggttgttgttactggtgcttccagggggattggaaaagccactgcattggctcttggaaaagcaggctgcaaggttagcagtttaagtaatctgtttataaatatatagaagtttatcgaatgtgtatggtgcttctcttaaactctgcagaagcctcaagcccataatggccattgctagagcaagctgttagattgtaaatttaaatggaccactatgcataatggataaatggttttatcttcagaattttatgaaagctgtgattaaactgcaggtcttggtgaattatgcccgatcttcaaaggaggccgaagaagtctcaaaggaggtaagtttgaattgtggcaagtggcgtcttaaataaactttggtttcctcttctttattcttcttgttgttttctttttgagctccccaagcaatgcttgaaagataagagtaagtccttgtttagttccgaaaaagtttttttggatttggctactgtagcatttcgttttatttggcaattagtgtccaatcatggactaattaggcttaaaagatttttcttgcgatttacaggcaaactgtgcaattagttttgttttcgtctacatttaatgctccatgcatgtgtccaaagattcgatgtcatgggtgaaaagtttttggatgggaaactaaacaaggcctaagcagagaaaacagacttaaaatgcaatggcaggatgctatgtttaaattaaattttgccaggctgccatctatattgaatgtatattgtggctgataaattaatttctcgttaagtttctttccaatccactcaaaatttgtggacttctattgaaatatttactgcttcttccggaattatcccttatgtttctcttagagcaaatcattcaaacatttccattaggaaataagtatatatgatataggattgttgactatactagtgctttaatatggaaaaataaccaatagagacctcactgctcattttcttttctcttctgcatggtaggttatccgtaaatacatgtgtagatgagtttgcttgatgatcaattattacccacgaggccacgactcagaaaaagaccccactaatatagcggttgcattccactaaacatcgttgatcctactgtcattctaaaagttatccttagtttctcttccatctccaacacatttaagatgacaatgtcatgtcagtaatgtattttattagggcaactgttatccaatccgtatgtctcagcattctctcaattataaataacattccacctctaatgtcaagatacacacatattgatgcatgtaatttatgagtttttgtcaattaccaaaatggaatatttcattggtatgggtcatgtttcaatatttacttatataatcaatatctactccaatcaatttcttgtagctgatctggcattaggacaagtgccaggtcctaggggaataataaggagtatgaatgagactttttttattcagatgtcacagttcaaatatagcccgatatcctttggtcgttgacaagataaatatatttaataaactatttttcttgaacacacaggagatctgcgtaccatcatatattggtaaactatagattgacatctgttggtgtttcaagggattgtcaatgaatgtactatttgaacggagaactcatttcttgtttttttgggagcagattttttttcactctaattttacaccaaactatatcaaacttaaacacatactaatatttctatattttacagattgaagcatccggaggccaggccattacctttggaggagatgtttccaaagaggctgatgttgaatctatgataaaaatggtaggtaagttgggagtgaatttttgagttacccatttgttatttcttacatcaattcttctccttttcgattctgacaaatatacatgtgcaaatcttgcactttcaggctgttgatacatggggaaccattgatgtgctagtaaacaacgcaggtactgccaaatctattttttgttttgcaactactcccatttgtttcacttccaacaattggaacaaaaaactgataataggaatcacacgggacacattgttgatgagaatgaagaaatcgcaatggcaagatgtgattgatttgaatcttacaggcgttttcctttgcacgcaggtaccccccccccccctctctccccccattttgctgcaacagttatcctttctatctcacatcaacatacactttgcaggctgcaacaaaagtaatgatgaagaagaaaaaggtgggcaatgtttttcattgtcagactgatagtttctggtttttgttattatgcatatatctcactttgtataccagactcttatttttatactgcaatgcagggaagaattatcaacatagcatcggttgttggtttaaccggcaatgctggacaggctaattacgctgctgccaaggctggggttattgggttcacgaaaacagttgctagggagtatgccagcagaaatattaatgtgagcacaccttttgattcatcatctcaaagctttcatcctgttttgcagttagtgaactatttctgaacttctctatttaggcaaacgttatcgctcctggctttattgcatcagatatgactgctgaacttggagaagagctagagaagaaaattctgtcagctattcccttaggtataatattacttacatgttcacatcctcagctgtaaccaaatattccttagtgcctattcaatgtggttagtttcttcattcattaatctgttcattccttactgctttcactccttttgggcaatgtggtctgtatttttttaattgtttcttgttattactagtcagtgcatgtgtgaagttcatgttaactgcctttgatttgttttatgaaaatgtagggacataggctgtgtcagccaaatttgtgtttttatattatttcatagtacagatgatgacaatataattaattaattagttattgctaaatactttcagtgtggttattagttattgactgcgtgcattcttcatacattgtgccatattcaagcattaaggataggaaacacatacaaacaaaaaaaaaactctttctaaatattgaaccttgatctcaaagaatccattgttgttactgctaggtggaaggtccaagtgtcatgtcagtcatactggagtttttaaaactttttaataggttcaaggtccaagtgtacatgtcagtgatactggactttctaaaacattttgaataggtaggcccttttgggatcaaagtgaatcctgactggcttgttttagcccttagataagctaggtttcaagctgcaacttcagttgaagttggagaggggaacaggcttgtccaagtgtatctatgaattttatttaccagcgagttacaaaatttgcacgttgaaagtcattttgatgatttatttactatgtagttcatcagcaacagcagataagtgagatgtatatagagaaagcagcaacaaggcccaaaagaacatgtatcgacattgcttactagctgtagtttgttctctttttgaaaaaaaaaatagtttgttctcttgaaaagtaattgaaacacaccattattaaagtcagctacagattcaaatattgtgtcatgaacccatggtggaactgaggatttctgtggctggattcactatgtccaccttccagttattttacagtacatgctgattgtgaaaacaaggtgactgattggatcgactcaccatatagcaagttcctgtgtagtgctcacctttgacaagcttagttagtagggctctgatctatgaataaacatgattacatgagtgttggataatgcagttttgtgaatttatgaaacaaatagagatattatctcattgcatcactctccggaactaattggtgtatacaaattcctagggcgatatggtcggccagaggatgtagcaggtctggtggaattcttagccctcagcccagctgcaagctacatcactggacaggtctggttacagatggtgtgcgttatcttttcttggtccttgaaacttctgaagcgttctcaccgagctcctttgccttgtgttgtaacatgcaggtcctcaccatcgatggagggatggtaatgtaaaggctttggtaaactcttcaggcttcaaatttgtgcctctgcgggcctctattatgtgtcgtcaaaaaaaatgtgattcagttttgcgggtcatcttttgtgtgcaacgatctgtattatctagttcgaagggacagttgtaagagataatactagaaatttatagacgtatatttagctttctttctgagcgattggcagattgcttccagctccagccatgttttctggtatatcggcatgccttttcttcttctggaaaaagtccttgatatatcgcatccgccggtaatggacctacttgccttcgccttgctcaaagattgaagtttgaactaggaagtgctcttttggaaaacactttggaacgaggtacatagtctcacagatcagtgtaggctttgcacacatcccttctcgttttcataactcatcccctactctcttgggttcgtttcattttggttctacattttcaattcgctccgtgtttatagtttcatgaagacagcctgacgagattcatacctgaacctgtgcaagagttaggttggatctgaacaaaatacgctcgaagataaccattgtccggcaaccagattgctgcggcagactagttcccccacccccccatttggtgccgcggcagcagcacgaggattgcatcgaacacgcgaaaatttttagatttagcgta

SEQ ID NO: 4472 - DNA, 5287 bp, Sorghum bicolor
agagagagagagagagagagagagagatcaccacttgtgccaagagcgagatgaagctggtgactcagatagtagcaagcacttatccagttatccctccacgtacgcacacaagggtcaaaagaaagttagatatatgacatttgtggttcttggaagtatcaaaactggcctcaagaatatcgtgtttacaacatttatttataatatgatatgatgaaaaagtttactatattgttctatatgcaataatgctggcaatgagagatgggtactatttttcttccaacgaacggccacgaccacgaggcgatgcatatacatttccatgtcaaaagagaggtgctgcactatactatgcaaatttaccggcaattgtcctatccatctcattttcaggccttttcagccatcacgtatggagagacaagacaatgtggcgatcacatattcacatatagtggacttgtagatcgaatatggctttcaacatcggtgttcaaatccccacaactagtcgtatctgtattgtagatttgcagtcattttcatttagagaaaaaaacccaaaaattatatatagtgaaacgtattatcgcaccttgggtccacgcaaataaggacatcccaataaagtgcttgtttattttttttacgaatcacatagtgcaaacgcaaacatacttatactaattctaacattaaatgccaagctagatcaatgactttcatcattttggatggtaaaaaatatctccagcagactacttagagcatctccaaccatttaacaaaattcgtttatcaaatcttgttgttttctaactcccaaaataatatggggagaaaaaaatagatatcatcttcaacaatttgacaaatttgtttccaaaaacccgctaacggaacgagagctccgctacgaacgaagagccccgctaagcatgaggagaaagaccgatggcaagcacagatcgcccgcacatatatttgcgtgctagacagagagatatgtcaagttagaaaagatgagaaattaagatgtcaaaatgttggagaaagtttttctttattttactaaaaaattatagatggaaaagtcatttgacaaactgttagagatgctcttgggtcttgattctttttgtcccatattattcctctccaactatccacttctatggggccaataggtgtctacctatttttttcccttccatctctttcttgttcgcatggtgcttgatctgccgtcttccgtcgcaagggagatgtcgtcggatctgaccatccctggctaactgctccttctcctcaggcagctgcttcttttcctgcggcggtgtccgatgacacctcttcgtcctaataatggcactcttcctgatgcaaccctgacgacgacgttcttcgcctgtcgagctcatcaatggcaacaaggagaggaggatgaaatgtaagtcccatatgtcattaatggctagaatgattttgtgagctatgatttagataacattgcttgcgggagttagaagaaaaaaaagataatatcaaaacgaatgtctactcagacaagcaatagagatttgttaggagtagtattcctcgagacgctctaaacaatgagtttggagaatcacctaaagcacctacttaaattagaaagaatgtatgaaggccccaggcagaaaaccaagcgcggtctaaattggccgagcacacataaatgacaaatttagagatgcgtcacttcacaaaatataagtttatgttcacatcaaataacttttcctccaataataataataataataagcaataataataataataggcaaacaagccttttttttttccttgcacacacacgccaatttggaagaacacatgatttcctttataatgacatgcccaaactgccctgcataaaaccaccgctcctatataaatttatcttttattatattatatatatagatacgacagctagctgttattatatcagacaagtctctacagcctccatccagcacggaccccgcggcctgcctccctctccttcttctcccacccccagcccagcgtgcgcattctctctctctctctctccctcaatctcggcggcgactgggcgaccgaccaaccgtcgctgccctacgccaggtgccaccaaggtcttcttcgggcccttcgccggcgacgagcaccaccaggtacgcccgcccctttggcttcccttcctgctgtgcggaaccgagcttccaattcttagctttttggtatctgtggtcggatctgatctagttacaagtgtagatgcctgtattatgcctactaccttcgattgttttgcaaaaatcatcaggcgtacatgtgtacacccatatccttttgcttgcgccacctacttcatggtgaaatattgttcagaagctgaagtcaatctgttgttaactcggtcaagtttcttttgatgattgcaggcaattagacttgcgtgagaaatggatgctactgctggttaattgtgatacggatttatatggacataggtattcatctcctcctttttctctctggaaagaaatggtacagttttcttttcagctaacatatagccgcacgtttcatttgtgtctgtagatattggggccatgtgtaagggcggaaactgtttctaccgcgtcaataaggagagctctgctgattctacaaggaagatccattccgcagtctctcacgatcggatggcatttgatacagcaagggcaacgaaaacagaggcatcaaagttgaagaacctaatctcggcatcattcaaacccttgtctctgaccattcccatcggcgacgggttccacgaatccttccctttcagccattgtcatttatagtagagaagggtctataagtaagccaaggttttttgttcttgttggcttgcgagaggaggccaaggttgaggtgctttctgctgcatctcataatgcttgctgtgtcacaagaacatcttgctcattcacagacgtgcttccgagcaaggatgcaactcaagcctcctacaagacccaaactctattcagggctcatgccccaggaggaattcgattcatactgtgatctaataccaggcttgcctgaagacttggcaaagatatgtcttgcccttgttcctcgtactcattttcctgtcatgggtgcagtttccaagaggtggatgtcatttcttgagagcaaggaactcatagctgtgaggaaggaggttgggaaacttgaggagtgggtgtatgtcttgactccagatgctggcgcaaaggggtcgcactgggagatcctagagtgttcagggcaaaagcagagccctcttccgcgtatgcctggactaaccaaagctgggttcggtgtggttgttattggtgggaagctctttattattgctggctattccgctgaccatgggaaagattgtgtttcagatgaggtttatcaatatgattcttgccttaacaggtatgcttgggttctcataattatactatggaagattctgttcatttctaagtgatcttgctaatgtcacagaattcagatgaccagcatactgaaagaatctaaatgcattcaagaaaaactcatcaactctgatactaatgtattattcagatgcatattaaggactgaatattttgacttatttggctgattcatttatgctcttgttgcccaggtggactgttcttgctaagatgaatgtagctcggtgtgactttgcctgtgcagaggtcaatggggtgatatatgttgctggcggatttggtccaaatggcgagagtttatctagcgtcgaagtttatgatctagaacagaataaatggacactgattgagggcctacggagaccacggtggggctgcttcgggtgcagctttgaagggaagctctatgtcatgggtggccgttcaagcttcacaattggcaactcccgttttgttgacgtgtacaatcctaataaccatgcctgggaccaggtcaagaacggctgtgtgatggtcacggctcatgcagtcctcggcgagaagctcttctgcatcgagtggaagaaccagaggtctctagcaatcttcaacccggctgacaactcctggcagaaggtccccgtgccgcttactggtagctcaagcactcgtttttcctttggggtacatgaggacaagctgctgctcttccctctggaggaagagcctgggtatcagacgctgatgtatgatcctgcagctccgatggggtctgagtggtgcacatcgaagctgaagccatcaggttcttgcctgtgcagcgtgaccatcaaagcctgatgatgcccttgaatgcgtgggatgcggcagttttagagttcttcatataggatggaatcccgcttgccttcatattttagagttcagatgaggctggctttgtttggtctcaagtgcaatcttgtttcttcaaattttagtttgtgtgtcgcatcgacaaataatgaataggacatttatgtttcagttcattgagttgctgaagcgtcatgatgtattctcatttcacctgtattgaactctggccgtttgggtcttgggttgatttgatcttttttgctggcactcacatgataacgacagcgtggtgttgtcaactgatgctcagtagaaaggtttatgttgttggacatgattaagtagttgccttttcttatttgcagctgaaagtatagcccgcgctcaaatttcattaatgagatgcaggattaagattctggagcagacagtttacaagaaaaccgtgccagcgcctacgtgtagagccttcatttgagaatagatgagctgctcaagtacattcctacctgtgacgaccccgttggatttaatcttgcaagtcttgattgattgtttcatgatgcagagaatacgttttacttgtatcaggcttgtaaatgatgccctatatctgggccgggaataacagtagatgtagtaatgccgtgtgtgtgtgtgtgtatatatatatatatatatatatatatatatatatatatatatatatatatatatatatatatatatatatatattcacagtttgcataggagatgagtttgtagcagatccattgccatatatcccagccttttgcagtgcagactgaatcaaatcaggtcgttttgtacagcaggattgtactgtacgtcgtgtcgtctcagcatagccaagccgtcagacgttattgtactgtgtatttatgtatttcg

SEQ ID NO: 4473 - DNA, 3678 bp, Sorghum bicolor
ttttgactaccgtattggttgtcgaaaacctgggatgtataaggtatgcatcagttgtgcattccctatgctgaaattgcatttcttttcttgctaaatgagtttgctatacgtagtatcatgctgcaatttaacaagtgtcattattgatctgaaaagtcttggctgaaagtactgttccctgatttgttgtggcaaaaaaaaacactgctggccggcttataagacaagttgctcctgattttttggtgtcagcaatttatttaatttgcttggacactagatttggatttttccaatttgttatgccatacgagcaggtaaaggtagcaaaatactagtgtcatatagaaaaaaacaaaaatatgaacaaggagtacctgttatggatggggatggccgcatgctcgttctcttggtgcctctgatattggagcacatccgttgttcgaaaactagctggattagtttctcaaaatccacttgctgagatgctgacagcagctgctatttgtaccaggtggtcttggactcggacgctggactatttggtggatttggcaggatccatcacgcagcagagcacttcactaccgtaagttttgtggcacacatgatatcgcctttggtacacagatgtcaatttgttcctgacagatttgagctaacttctgttacaatattggtcattacctgcaggactgttcacatgataacaggccccattcgttctctgtttatacaccaagcagaacctgcgtcgtctatgctccagcggaatgatagcaaggtactggttgctgggcggcatgtgtggggctgtcgatgtgagggaaaaaaaaaacattctgccaacaccggcagatgcatgcatggcacaataaggttctgaaaattcaatcgttgctggaaagcccagacatcccgctgcgttgtcatctctatatatttaagaccttcaggatgtcaattaaacatggccttttctttttcgttttccctaatgcttgatgactgattgttcacacttctttcattccgttgagcactgatgatcgagttagagaaacaatcgactggagcgcctaggtcttagtgtaggtctccaggctgtgttgcatatctgtctctgtccgactacagaacagtcagcaatgagcggtgttgccctcctctgcttattcttgactgctactccaaattaccgagtcattcagacacgctcgatcagcactagcgctccaatgtacctgatggaactgcacattcccagcttgccgttgcaggtatacctcgcctgccttccttagatgttaaccctacaactatagacatggatacggagttgcgaaaggaaaatggctgcaaggctaagtgacactgtttcactaacacttggacgcatgacgtatcgtatcctcagaggaaagcagaaggagacgatcacgcgtgcatttggtcacacaccaactggtgacagggaatgtacactagattgctcaagagttactcctactcgacttcttggatcgccgcagggccttcctcatcacctaacgcttttcatgatatgatactccagctcacatcacatgtacgtggaatgatgctgtctctcaggtcatggcatacagctttgttggttttatttcctccatccatgcccaggacaggaagcctgtgctatcatcatcgccataagcagctactagtatgagttatgagtgacaggtgacacctgcatgaagataaatataacatcaaacaatataacaattcttacaaatcaccggtgcttgcttaaaggttcagacttcgagtagctagtagtataggacactagctagtactcggctctcgatcggttgcagaacaataaaaaggagagagagaaagagagagagagagggagaagacgcccatcaggggggaagctggaggaataaatagacgaacggttgttagatgcaggctactccaatttcttacacggcttagggcgcaagagctgagctagcctagcagcgacgacgacacgatcacgatgcagcagggcgatcagcagatgatggagtgcagcggcggcaaggagcagcagatgcagatcgtgtgcgtgcggagctcgtccacgggcggcgaggaggtggtgggggagtgggccgcggcggaggagcagtcgtcgtcgcggtcgtcggcgctgtcgctgttcaaggagaaggaggaggagatcgagcgcaagaaggtggaggtgcgggacaaggtgttctccatgctgggccgggtggaggaggagaccaagcgcctggccttcatccgccaggagctggagctcatggccgaccccacgcgccgggaggtggacgccatccgcaagcggatcgacaaggtcaacaagcacctcaagccgctcgccaagacatgcctcaaaaaggtactgtactgcacgttaaatgcactgcaactgcaagtgtttttccattattcgatttcacttttgatcacaggcaatgatgaaaacggtatggatattttgcgattgttttcgagaccgaaatcatttagaagggtttaaatctgtctatttctaaattcgaataatcaacatccgatatcgtatttgaatactaaaattatatatttataatatcgatattcaattatatcttatccgatatggttgatattatccgcattcgaatctgaatctaactaaaaatatgaaataaatatgatatcagcgatccatgttcatccctcacaagtctagcaaatggcaacaccgatcgtaatatttgtctccgaacgtgcaggagaaggaatacaagatgtgcctcgaggcctacaacgagaagagcagcgagaaagccacgctggtcaacaggctaatggaggttgactcaactgctcgatttcaattccgagaaccgtcgtttcagtaggcataaatattttgttttgaggaaaagaacaaaagatttgctgtttccaatcagctcaatccgaatgaaggatagaattggatgggccatttccatactagggctaactagacaggccggagccaatatacttatctttttttctttgcttttttttttggcagctcgtaagcgagagcgagaggctgcggatgaagaagctcgaagaactcaacaagacgatagagtccctctactagatctgctctcatggaagaagagaatgatgatggtaaggtagtcacttgtattctgacccaccgggaaaactagcattgccaataactcaacgtgcaattttttttctgcgacgtgcttgatgattggatttgtgtaattttacacgtgatttgtaacggatggtttgtatccatcgcttttgtaattgctctgcgtggcagcgtcacatagtcgtgcaaacgaacgttcctacaaaaggtattttgtgagcaggggacacgatctttacctaccacgacacaagaggtgaaaataaatagaactgctccggtaccctccggttaggaatctcgttgctatcgacatttttgatcttccacttttttcgcgatgggatcttctacccatttttcaataagaggaagatgtcaaaagaaagaccggactatatttgaaagtcaattcgccatctaaaagacaagatttttcatttgtagggaagaacaaattaaatatttat

SEQ ID NO: 4474 - DNA, 2935 bp, Sorghum bicolor
aaacaagataaattatgcctgaaactaggattcgatattgtacttctcaaaccaaaaagaccctaacaaaaagaccctacctttggcaagggcaagagacgattgaggacctgtttggttcaattgactagttgttgggctgactaaagtttagatgaaagttcagatgactaaaaagttaatcccattgtgtttaaactgcataaactaatagacaactgaactaaaaattagtatagcgtctattagtttggatgggttatgactaaactaaaagctagtttagccaagtgatccacatgtctgactgtgcgcgatcatggggcatgcagtgtgggtcctctcgaatgacctaatgttggacgagctcgccgcctcgctcgtcgtaaaccggtccttgggagcgccaacgcatgggtgcccatcgacactgacggtgcctctaaggagtttgacgtattgttggtggccacctatgtgtgttgtcgcactcctcaggacaaacaacaggcgatggcacgcaacgccgagcctataggatttggtgcaagctctggagcttccctgatcacgcgatgcagtgaacgatgccttcgttgtcgactacgcgagggctaacatagttcgcgccgcctcaagtagggcaggctagctttgcatatgctaaatcgcctagggaggatggagacaacttcccacctaggtttggaccagccacgcaccaagtgaaccctgggaaactatccacgtcaacatgggacgtgcttctagccaacgacgacagtgactctgccgtacgccaccttcgagcgaatactttggaatgttgcctcttcgctctttgtctcggcctccacagcagtcgactgccgctacatttgtcctcccactatagagcaagtgcttggcggctcagactctcccttatgtgcctgcctccaagcgaagtgagatcctcatcatgcaatggttggggccgcccacaagacttttcacatcaatcgcgtccaaaataaggcttacggggagctcttcgaggaggacccgactagttcccatgtcgaagtgttggccgccctcgtcgcaggcaccggggtagcaacgggctagaagcagctacgatggaaggttgtttccatgtttaaactcttctatcttaattttcaaatatacaaatcttttgtgtatttgagaaaaatcagcattgcctcactggcagcatataacggtgtcctaatcatctccaggtgaaagagatgcccgttagctccatttgaggcacctgactgacttacctaagagatcttcgtttcttggcgacgactgcaacagcgacccctcccaacaagctaaggtggcgaccaacctacctgcgtctctctcaaggccgtggcggccgtccccttcttcaggtcgttttccaccaccacggcccgaaccgaaccaccctccttctcgtctgccaccggagctcgatcgacgattgctgattctccgatcacttcaactcgcctctgctctgctgccaggctggccgccgccagcacctctccattccataaaacagaaacatgaatgtgagcagagcaatgaagaagtgactgacagtgtgtttagggtggaagtataatatggtcaattaaaggtttgcaagtacccctccacagtgcagcatttaagaaaacccaattgacctccatctccatggctcccagcctccccactggccatttccatctcccctataaatacttgctgccatgccatctcttcttccacgccacagaggaagcatcctcatagtcagaggctcagagcagagcagagcagagcagagcactcctcgcagcagctgcagaccatcaagtacgagacagtaagctctcttttagtggaatataatactatcattactagcagtagtatcaatctatatatggtggatcatcagtgattaaccatgctcaagcttcatggatacgcagggcagacgcaacgtgatgagccggggcagcaaaggagggagaggcgcgggtggcctggacctgaagctgcacctgtctccgccggcgccgccggcgcgtggcacagaaggggcggcggcgccgtcgctgtcctccgacgaggagtggtcgtcgtcgtcgtcgccgccgagctcgtgcctgtcgtcggagggcgagcgggagccgcatcagcggagccagagccacgggctgcagtggtcggacagccccgaggcgacgtccatggtgctggcggcgtgcccgcgctgcctcatgtacgtgatgctctccgaggccgacccgcgctgcccgcgctgccgcagccccgtcctcctcgacttcctgcaccacgccgcccgcaacagcaacgtcagccgggaggacgacggcgatcacagccgcggctgcggcgggaggaacaggagggcctgatcatccacagttccacacggcagcctcaagaacccacaagattttctttttctttttctcgattattaccattagtactagtagctttaattccatcgttaagttgaaaagaactgctccagtgtaaccgtgatattttcatttcatttcatccgtctgccgagactgcgtgcgacggtgctactgtggtatatatcacggatacactggaaaaagttttgtttttcaatgttcacgtctgtgtcgtgattgatacgataaacgacaatcatttgagctccatgcaagctgatctgcaacataatattttcttcggagacggtggtgtatccttgtcgagtacaagtagaaaaagcgacgaacagtacagtagcgcggtgctgttagcatttctcagagcctgcaattgtaatgaggtttgacgtcagattattatcattaaaatggtactaataaataagcgatcagtagcggagcaggtgagacgtgagaggagcgga

SEQ ID NO: 4475 - DNA, 2599 bp, Sorghum bicolor
gacgatcggatgaagaggaaatatagtgtcgtatatgggaagtgggaggggatggaaaccaaacaagatttgttaataagtggaaaagattaggatgttaaaattccgttattcctatacttacacaattcgtgtgttttttactttaattttattgtgtatttactttcaaaaaaaaattttattgtgtattcaactatcatataattcgtacagtaattctactaaatcagcttaattttataggaaaaaaacatagtattcaggacaaaaatctcatgttcctaacaggatggcaagctggtgcagttggtactccgctttctaacttcaggtccgtccgtctgtccagtcaattttggatgtcaagctgaggctgttcgaacttcaaacacaagcatgttgaaggcaaaggtgaaggaagggtgctcttatacatggagaagcattcttacgggactgaagttgttgaaggaaggaataatttggaggataggaaacagacagcaggtgaacatctggtctgacccctggctgcccaggaatatcacacggcgaccaatcacaccaaaagggagaaatataattaggggacggagtggacgaactcatcgacccaatttctgaaaaatgggatgtaccactgctgaaacaagttttttgggaggaggatgttcagctaatcagatcagtacatgttcatttggacatggatgatatagtcgggtggcactatgataggaagggcttactttcagtgaagtatgagtacaaggttcaccgtgatgtgtgaagggagacgaacaaatggtgcagtagggggataggctggcagcagcgagagagagagcaactgatttttggaccaagctctggaacctggagtgtccacccagcattaaacacttcctctcgagactgactactgagctagaacacggtagcagtaagaaaagtgctacaaaggcgaggaatgaagattcataccaaatgttgtatctgcagcaggttattagatgaggatggtgggcaccttttactaaactgcaaggatgtgaaacatatctgaagggaactgagcatggagttggtgagaagcaaactagctgtagcaggctcaccgaaggaaatggtggagaaaattttcaccctggggaaaaaggaactactgacagaaatcatgttgctttgattatggtggggagacaacgaagatcggcttaagaaatagcatacatcacggcctttcaggctgatgcatttctgaaaacgagaccggagaagctgttgtcagaaaatggtcagagaaagacatgacaaaagccaccggtgggtttcctcaaactcaactctgatggatctttcttcaatgagatgagaatggaggggtgattaaggtttaaggcggcagcaggaaaggaagactgcgtccttgacgcttttcatgaggtgaggaagacgattaacctgggcatctcaaggctatatataggtagaaacagacgcgtctctggtgaaagaagcagtggaactgtggaaggcagcgagtacagtctggcggcaataggccaataggttggaattgttactgagattaagcatttgctctcatctgaattcttgtttagctcgattaatgtatgcccaagcgtttgtaacaaagcagcatataagtcctagtgaaactgttctcacttgggatgaggacccacaggaggttttagggggtgttcgtgtccactgtccagcgatttatgtgcgactcatgagtaatgaagagccctacaaattcgagagaaaaaaaaaaacctcctgtgggtaatggaagactaccgctcagctctacttttttatgtactctgaaaagtgccaaaactgttgatggtccaagtacccatatggcaatcgttgcgatcgtttgacaaatagaggattaacggtagtattgagagcaatagtcatattcaatacgaacattcgagtatttaacaatggggtgtactgggacattatgcatcacagaactagctgcaaagttgactgaaagcttaactggaccatacctaaaatacaattctacagcttgtacaaaatttgcctgtggtcactacaaacatcagtcacacacaaaaacccgtgtatgccaccccggatgaagcctcatcaatcagagtttgaggtgttgtagactaccattggtttacctgcagcacaaaatcataaattctttttggggaatgcaatcatcattggagtagtcataactgtagcatgtgcaatcatcacgagaatcaacattaacattcaacactggcaaatagtagtaaaaagttagtatcaataagaatgcccgtacaaaaatacaaaatacagaacaatagcacaaataaccactcacctggggcataggaaattacaggcttgcaactaaactaactcttgtcacttttcttcttctttcttttatgttttggtttgatagcatcttttagactctttggcgatccaacctcctgggactcatcagactctccagcagccacagcacttgaggtgttcacctcagcattcgatgattcagtcattggttgggcatcct

SEQ ID NO: 4476 - DNA, 7529 bp, Sorghum bicolor
agaactagagtgtattttagaaatcgctcaaaaataagtgtccatcagcaaagaaccatcacttagcatgtcaataacaaattgtgtctatcatttatgtacaatgtttgaagttaggactgacgtggtaaaagaaattgtatgaacatcgcaaaaggtatcttaaggttagtaattgtttgcttgaaccgatcctagcattcttcacttgagcttatcagtcgaatcagtcaactattcagcagtgtttttttctcacaataaatactaaaaagcggcctatagatcacatactatctccgatctaaaaatatatgggatctaattgtgtgactgataataatattgaattttattgacagcggtagtagtgatttattgaggggaaaaagagagaataaactagaattggaaccctcaaagtcgccgctcgccacacaatttgcttccttccagcacttaaccggattacgggtcagggtgggcattcgattcttggttcagtttcggttcggttaatttggttagttatgaaattcagttcctagaaaataagaactgatcgattccacaaaattttaggaaccaagcatttcggttctcggttacttcggtttggttccggttcttaccgaaataactttcagcaaagattaatataacaaaaaaatatgtaggttttgaaacaaatataggcaacaccacctctaattcagataataataattgataagagaacagtagcaatatagtaacataaatacatagtaatttagtataagacatcacacaaaaatcaaactttgtcttacaaaatactagtaagtaaagtaaaattcatgcatttcggttctttcggttaaataggttaaccgagagtagaaaccgaattgttttcggttatttcggttctcaaaacttgaaaccgaataaggaaccgatttttctgattttttcagattcggttctttcaatttcggttttagttctttcaattcggttgctcggttttggttaattgtgcccaccgtggattacgggtgcgccaagcctcttgaacgttttgctactccactttcccatttactaattgccttccgatactaccaatcccatgttctcattttttttttcttttctttctttctttgccaatggcttctctctctagattccaagtggaggaattttctgttttgttgatgctcttgcaccctgacacgtgaggaaagtatcttgtttgagaaaagctatagaacaaccaagtgtttggtgcaatcaaacactctaattttctcttctccatcttcagccactcccacatcttcttctctaaatccggtggcattagaagtggctcagggggactgggggagatagactgtccaggcggtggcgacgacaggaggacaatattagagttctagcaggtgtgaaggcaaaacacgtcaaatcagggtggggggaggagggtttgtctatgatcatggcaatgatagctgcaagtggtgaaggagaaagagactgccgcgggcacggtagggtctcactccagactccacggcagcacggtggcagcatggaaggaggaggctgtggtgacaaagctcggacgagagtctaccgtgccgtggcgatacgctgggcggcggctgagtgtcagtagaaggaagaaggcacggaggggaaaaaaaaaaagaatcgggtgctcggcgccggtaaaacacagagtgttgcatagatggctcctttttatttcaggatgaggactaaaacgcaaaaactggtaaacgggagcccgttgcagagagagagagagagagatgaagcaccgagagatctggggcaaggagcatcaatgcgccaccatcatcatcgtgcctccattcccctgttgccgcaccgcaccgcaccgcatgcacacagccacacacgcacggcgtgccacatcgtctaatcaccgcgtataaactagtgtgacccccgcgatcgcacgccttaaactagtcccttccttcatctccatctcctaaagcacacgcgcaaacccaagcgcggagacaaagcacacaagcaaaagcaacccccccgcagctggacgcgccccgcccgcgctactagtaaccgaacgaggaggaggagaagaagcctcctcgttaagcttcgaatccatccagccacgccaggcctcccaccgttccctcctccctcccctgtccccccacgcgcctcgcgacggcaaaaccccagcgaattccccacgcgccggcctccaatcccgccagcagcccggtggcggtggcggcggcccaggaaccaagcatggacaagtacgagctgctcaaggacatcggctccggcaacttcggggtggcgcgcctcatgcgcaacaaggacaccaaggagctcgtcgccatgaagtacatccccagggggctcaaggtgcgcgggcgcggccccccgattcctgtcctcgcgttcgattcccttcctttgtcccccggaattttcggcccttatttacgggttaattagtttattctctgcggaaccgcagattgacgagaatgtggcgagggagatcataaaccaccgctcgctgcggcaccccaacatcatccgattcaaggaggtgagccaaagtccaaacggagggcggatttcccgggcggacggggactgcttcctgcacacctccagctccccagctgctgctgcagttgcaggcggtggagaattttgttttctctcgcctttatttccctgttcgtttcatcatcatcatttagggccccctttttccccctatactaggtcgtgctcacgcccacgcacctcgccatcgtcatggagtacgccgccggcggcgagctcttcgaccggatctgcagcgccgggaggttcagcgaggacgaggtgatcgctcgtttgttccaattaggcggctccgactagggagccgttcctgctgttttcccccaaaaccatttgggttggccttgacgtgctattttattttctccccttcttttttctaatttctttgttaatcctactaggcaaggtatttcttccagcagctcatctgcggtgtcagttattgccacttcatggtgagaacaccaacccccaagtaaaagcgaagtgtttcctttattacgcaacaaaaaaagtaccccagaaaaaaaaaatccttgctgatgaggtgtgcgactgcaaattttgtttggattcattcattcacagcaaatttgtcaccgggacttgaagctggagaacacgctgttggatggcagcccggcgccgcgcctaaagatctgcgactttggctactctaaggtaccattttttttcttttgctaattattaattggctagtttcttgtgagatttccttttcaagggatactgaaagaggcctttcttgcttagcctgccatgctgggaagaccaaaattttgacacgaaactgtgctgccgttttctcacattctcactgcttattaattgaactcgtgcgttttattgccttgttaaacaaagatgagaaaaatggatcctttctctctgcaaaaagggctctcagaaaagagaatgagtcaatacctaagcaaatactgtagcagtgttatcagctgctaacacctttctttgccccagtcatcgctgctgcactcaaagcctaaatccacggttggaactcccgcttacattgctccggaggtgctctctcgccgggaatacgacggcaaggtcagtgctgtgatttattcatcctttttacttacgtacagtatagtataacactgcagctacgataccacctcctgcactctcttgaacccttttgtttgcatcgcctctgcttgtgtgttgttgccagtctgctctgtgatgctgaccgtactgtagtagtcctagtctgctcctttgctttcctggaccaagtgcatgacagcaccacttgcattgccgtgtggccccagtacggcatgcgtttctgccttgtggaccaggctcctggagcccttctgtgtgattttggatttttggactttcgtccttaggcctagtaggcagggtgtgggcctggctccacacgccaggattggcttgttatccctatccctgtagagagattccaaattccaacttccaagtacttcaattatttgtgttgacaattttgtcaaagaagcatgggggacagcttgtctaaagaaatcttcattctgtgtcacttggccatttttttccacgtaacttgtctgattgttgaactttgccccagtgggttatgcctgcatctctttcatgcatagattctaattgtgatcagattcatactctattacatgtcgtcttgtcttcgtggcatttgtgggtagtgatctatgatgacagtttgatatgtggagaaaagcacaagattctgttgatgcaaatcttattgccgtgcttaatttaaatgatctgcttaaagtgaggattaatgaaagagatcttgtgcactttgtattctggtgaacccttgacccagcacacttttctcttaaacccctgcagaaactccaaaatgtcattttcatctctttagatacatgaaaataaaagataaatcactaaaaagaaatgaatccttgctcatgataaactccttattgtggagatgtcccgtgggcatgtttataagtcctattttgttctcatatagtcatgtgtcatacttttatgtccttttcatgatcattttcccagcatttttcctgttctagttcatgtgtgcaatgatctctgccccctcaggccttatcttttcatgtgatgtaaccttgttagactggatatcccgttggttttcctgtggtccttcagtgttgtttgcctttatcctttgctctctttccatcctctttactttcctgcctgatgtagatactgtttaacctttgattattatactttgtttctcactttttggaatgtcataccaaacttctcgcaaaatttcctttacagaatttaaaattggttgcctttgcgtgtgaaagagaaaccttaggatatcaccaagattagtttaagcaatggacattgctcagtatttatgcatttttggtttctagaagatttgccaaatttcaaaggtgcctacttctgtgatttgcttttgggctacactggaattctagcttcactagtggaattcactttatcttcacctatccattttccattccatttgtatttttggagtgtcttagccttactatagcccatgcttactttggtgagaaattgttataaatgatttgtcatgattggtctataatgaagtgacagaaaaattgtgaagtagccacatactgtttaatagatccattgatataattgtatatatgtccaaggtttttagcccagtctatagtgatgcgtgattgtttcattgcttctcttatatttgaacaactgaagtatttgatggaagtttcatcaccagtggatatgcttttaactcatgttagcacatgcttaggaaaattgtctttaaaatgttgtgtttaagcacaatggctgcagtcaatagtatgttacagatcaaatttgtttatttatgttgtaacataaaatgaaagtgcttctgttcttgcctgtttggactatagcttgctttctttatatttgagctcaaatttttatttatagactattgtaagggcacctacttccttgaaagtgctgttcgtgttcttctactaaaaaaaaactcgatttgcagggggtaagacagcccccgggtattttgctaagagaagacctcatgcagatcgagaaatcccccgaacccctgcctcacccacacacaatggcgtcgttgtccatgtgagaatctgagctgggctgtgctttgacatggcacagaggggatttttttttcccgctcccataaggagtcacccatgacccaagtcaaatactgttcttctccttctcatgatggggttcattacattttgtaatgtgtgttgcagatggcagacgtttggtcttgtggagtgactctttacgtgatgctggttggtgcgtacccttttgaggaccccgatgatcccaagaatttcagaaaaacgattggggtaacagttcactcgttcagcagacactaaatcctgggctcttgcaccttgaaattattttctaaaattttatgcacccatatcccttttcagagaatagtgtcaattcagtaccagataccagagtatgtccacatatcccaagactgcagacagctcctcgctaggatctttgtcgcaaatcctgcaaaggtactgttgggcagtgaatcctgcaaaccctcgatcattttactatggtttacctccaccttaatgccataccatctcatttcttcagagaataacaattagggagattaggaatcacccctggttcctgaagaatttgcccagagagcttacagaagctgcacaagcgaagtactacaagaaggacaacagtgctcccaccttctctgatcaaaccgtcgaagagatcatgaagattgtagaggaggcccgcatgccgcccgaatcatctactccggtggctggttttggttgggctgaggaagaagagcaggaagatggcaagaaacctgaggatgacgagcaggatggggaggatgaggaatacgatggcgaggacgagtatgacaaacaggtgaagcaagtacatgccagcggggattttcaacacctgataaaatgaagctcctggcaaggccaagttcccaactgatgaaatactgtctggatttgttttagtttgtggtgctgagatgctgcaccctcggtgcttacttgtagtttcctcctgcttgcatccaccttttttcgcatattgtgttatattctgtaaattatcaaactggcttcctcaatgcctgtgtaattgcaacgaatcgttgagtgattaagctagaaggcgaaatataatttctgtggaatacacttgcaactttgagttatggaacactatagttttgtttgcttgagcttatcaattgaatctgtcagttatttaacagtgtttttctcccacagcaaattagcgaacagtactttcagtcatgattttaataagtaaacagactagggtcagataagtgaacaggctagggtaacggggtatgctatcctagatgcagggtaacggatatgctatcctagattaaaaaatttatcatgacatcatgcgagcagatgatcatagattgttgccatttacgtgcagcatagcagaagaagagttgaagtgtcccagtctaacgtcggctaacacgtctgtctgcctccgatcgtcgcctatcaagaccataacaacagcagcagcatcttcacacatgcagagatggaagccggtcgtcagtttgctagccgacagagggagactgggagagagagggcttagagatagacttggaaagaccaagttattatcttttgtaatgagtgttgtgttgatac

SEQ ID NO: 4477 - DNA, 17520 bp, Sorghum bicolor
agcatcgtactacagaaaaaagacctgcatcacttcctcttcctcttcagctgtccaatatcttttcttcgctgtcctatttgcctcattgttgtcaactagatcagtgtcgatgttcactggatcgtaagttgaagtaccttgtttagcagcttcaggtgttgctctcctataggcacttgatggtgattgagatatcgagttgaagctcatagtttgaccaaccaaatgaaaattttctccatgcacttgtggttgtggcggatagtgtggttgttgcataaaattcaaaaaaccacctgccggatagcctctgaaatttgcatagaatagtcagtcaatgacatattattataccatctcaaggtacatggtcttagcatcgcaaaaacacagatcaagttgataacaatgaggcaagaactcaatctatcataacctgtctggctgtattgaagaaaccactcaatcaattagaaggctttactctcttacatctataaacctgtctggctgcaggaactcaatctatcatactgtactgcatcttatactgaatgtaagaagcactccttcaggtactaacttacagacaattttcaatggcagttacgtttatgcttgaaatatatcaactcgatggaccttgtacaatgcacagatatgtgaataattaactatcacatgagaccaaactaaaattcagaatagtcttatacggagtttcgaaattatgtgcaaaatttcttagacctatgaaatgcattaatgcgcccagcctttgctagcaattggagttcaccaatctaaatgcatagcacagttcgaaatcaactgcttaccatgaatttaggccttctagatttccatgaagagatgtaaatttgggggtatggccccccatcctactcctttgcggtggctgtggcagcacaaaagaaggcggtgctggagaggcagtcgacacagcaggggaggataccggcggcggcgtcgaaatcggtggcggcgctggtgaggacgccggagacggtgatggcacagacgagggcacagtcttctttcccaggcggctggccgcgtgccctctccctcctctgtcggatgcgagccgcccggaagactcaggcggcggtggatccatggccgttggactctgccctagcggctccgatggggtgggttgcgagaagctaggaggcagaggcacgggaagatggagtggggcgcgggctcgatggcaaaggcgcgggaaggttggggcgaggcgtgggaagatggcgaagggggcgggcggatgcgcgtgcgcacgggatctccggcgatgaaactcttcccctcaacgcgcgtttcacgcgatttccaactcgttggaaacagcgctagctcgtttcaccgggatgaaacgtttcccttctctctcctcactgtttcatgcaaaaagatgatgtgacaatgtatttaatgtgcatgaaacatcatatgaaactctattgagactggccttaggcccattggtcaaggcccattgtcagaaggaatagggtatgcttctggcccacacccgaaggctgaggcctcaaccgcgccagccgccgcccttcgacacggagccacggccaccggacgccggaagggagaggggagaagccgaggagcagaaccggccgccactgcaccggccgccgtccgttgaggtcgccgcgtgccgccctccgcggctccgccaccacccaccgcaggcacacgcgccggggttggataggttgacgccgccggtgcccaacaggccgcagaaggaggcgccccgggaaggccgcggaaggaggcgccccgcgtcttctagtgctaactccagcctcgctgccgcaatcacctccgcctgatgtgtctcttccacctcgcactgccatagcagacaaaccctagcccaactctcccttccgtcgcccatcccactcctttcgtccgattcgaggaggcgaacgtggggctaaggcatggcgagcgatgggcagctcagggagtgggtctcggacaagctcatgagcctcttgggctactccaagaacgttgtcgtccagtacgtcatcaggcttggtacgctaagtttcttttcatgttgctcgattctgttcctcttctgttcgttgttcttaggacttgtttagtttccaaaaattttcaagatttcctgtcacattgaacctttagacatatgtataaagcattaaatatagataaaataaataactaattatacagtttgcctgtaattttcgagacgaatcttttgagcctatttagtctataattggacaataattgtcaaatacaaacggaagtgctacagtaaccaaaaccaaaactaaacaaggccttactatgggatcacgtgcgtgcattcccagcgaaggagtgctcttctaccggtgacctcgtgagcaagctcgtcgagttcgggttcacctcgtctgcggagacacgtacctttgcgtcggatgtctacgccaaggttccccgtagggccagcggcatcagtgtatgtttcaacttccttcttacattgttcttcccatcgcattttgtgatggttccttgttcgtggataaaatacttatttttgtttgctccagaattaccaaaagcaggagagggaggcggcaaagcttgtccagaaacagagcacttacaagctgttggccgacgaggatgacaatactgacaaccagacaccaacaagtcaaaagacctcaacaaatccatcatctaagagtcgaaagcatttcaggaggaaagcagatcaagacagtggtgatgatgtatgatccaagtgctaacagcccccatctcccctcctccgcttttacatacaatgactcaaattgagatgttatgtttaggaaatagtggcaaaagattctggaaggaatgtccgtcggcgaacagaagaggaggatgaagaaggtggcgacagcagctctgatgtatgtcttcttctaggactaatattttgttgtacattaaattgtagaattatggtttgtcagctactacctccacccgaaaatatagctacttctgggtttgttttaagtcaaaaaactatatgttaactttaaccaagtttgtagttttgtacaaaaataattaacatatatgataccaagtttgtacaaaaaactatacagagggagtagtatttattgttgaatctgatttatttgatgccttgtaggacgagaaagaaaggattagagatcagcaggaaaaggcccagctagaaaggaacatgagagaaagagatgcagctaacacaaggaaggtaattatccaattagctgacacttcttgttttgcgtctatttcttttggaaacaaatagattatagttgtagagttgaaaagtatattccaaatgaaaacgcagaagataataaaatcaaaatatgacaggatcttgattgccggaatatgtattttgatcaacattttgactgttgatatttttcgatgctccaattgtaggaataccatttagttagcaatatatcaaagttctggaaacatttctgcttctttgagctttgtctaatgaagttgtgcttttcccctcactctgccatctgcggtagcgatatatctcttgagttgaggttagttcacagtttgattgatggttctggccttctgggcgcccaaaaatagtaaggtcgcttgtgagctttgcaatttttacatgctgaggaacaacaatacctcacagagttcttccagcaatcatgttcctgatcttcttagtttgtacctttttcagttttcttagaaaatagctgtcttataaagaaggtgtgatgtttaactgattgttcctggacatcattatgaagggagaaggtgaactttttttccagctggatctttttctcgaaccagcagaagagctgtccgtcattatactatatattaagaagaagacacaaagtacaaaacaaccacagcagagcatttacaccacaacccacacaactaaactcaaaaagagaaagaagaaaaacccaagattatagaagtgcaaggtagaacaatttttaaaggatctaacagaactcagagccaaagggataccaactcaatgcctcctgcagaacacctttgactggagccctctcaaatcccctgatgcagggtttttttcctcgggaaacatattcgtctggatgtgccttttggtcatgattcatgcatcatttgcctactagatttgcacgacacattcttctgaatgtcgtgattttatttctttctaaacatattgttttacgtgaagttttaaactgatactttgttacttggtttgttttctttagttgatggagcgacaattatctaaggaagaacaaggtttgttacttggtttgttttcagcttaattattatcttcgcaaaatgttattgatacaaggtcattgacagaagagcttactagaagatctcaagcaatggacaagaatgacacatctgatctgaggttttcaccttgcaactccaattagttttcagttgacttattgtcataactttcttttgctgtcttaccaattgctttgataattaattagcttaatttacttgtttcattgcaatattgaaaaaacttgttactgaaaataaatgccacatagcaatggaactttcaagttaggaaaagagaacaaacaatgcaataagatttcaagagaaatcgtattgaattatgactggaagtaatttagcagaagtgttgaattgtgagtgcaattgttcaaattttctattttttatggcggtttcaactttgagagaactcgtttcatgtcgaaagaacttgaccaacctaggaggaactaggtgtgaccaatgcaatagtaggatggagaaaccacaatattgattatttacttctgatgcttatgatttgtgactagaaccaggtattgagtaacatttaagtttgaaacatatatgatatggtggtgtttcagtagaagtttggtgtgctgaaagaagtaggtgtaacagatcaaaagtatagatgaaacatggacccaatctttctcttggaaattgaacggtcgtttgtgcccactaacaaataattactgtgctgcttttgttatatagtattcttgaattatttatgtaccataatcgatgattgcattgcctttgctattgcatgtcttaggtacaaagaagattcaagttacaaaacaaaaagattttgagattactttgtactgaattcactttgtaatgtctttctctttaaatcaatgtgcagaaaattctcaaggcaagcatacctgcaaaagcgtcgggacaaaaaaattgaggaaattcggtgagtacaagaatacttcttatatgtgggttcattactgtagtttttggtgtctagatatctgattgtgcaggtactaacattatttttgtgatatatgcagtgatgaaattctggaccaccagtacatttttcaggatgtgaaactaacagaggcagaagaaaaggagttgaggtaacaactaaatgaagtcctactatggagataattctctgaagctaattatgttttccttttttattagctttgtgcatacatttctagactatgcatttgcatgtaaaccctgacatgaactggtttgtgtcattgtgtgtgtagttacaagatgaagttatatggtcttgtcaaagaacatgttgagactcctgatgatgttggtgaggtatgttttcttcttggatcgatttactcatttcataaatgttagtttggatgtctgatcatgtttgattatttgaagtgcattaaaatattccaaattcagtcgctctgttaaaaaaagactcaacctgtggggataagacagcccctgggcattttattatctcatgctggtcgagaaaaccctggccccacccatacacagcggcaccatagtccatgtgagaacgaccatgaccggtgccagaccttagacctgtgctttcgtgtgggacagaattgggaacaaacaagtatgtatgtgctgcactagtacctaaaattcttgcttacacaatgccttcatgcgcctaaaatgtgcatatggcgtcgcctaggtgtccgccataaacgcaggagggaccatacaacatgctgtacacatgtctgttagtatctttaatgctaacgagtttatgtacatgcatttcagtacaaaatgcctgaagcttatgacatgggtgaaaatgtcaatcaagagaagagattctccgtggccatgcagcggtacaagtaaggtttacattatgacctcttatgtgcatgattgcatgcaattttcttattcgggcgtcctgatagtttcatgaacaagcagagatcctgaggccaaagataaaatgaacccttttgctgaacaggaagcatgggaagaacaccaaataggtaatgccacatatctgaaacaaactcccacgtctcatgatctctttaagtgttacctatggtcttcatatatatttcggaagagactgacatggaagaaaactatgtacttgttccaggaaaatcgaaactgcgatttggatccaaagataagaagacgtcttcagatgagtatcagtaagttgctctttttgtgctaaatgaattaattgtgccactaaaggaaaccatttgtctttttacccatttattcaaaatcttgcctcctaaaggctgtctcaaattgctgttttttgttggcggaaggaggcaggggcggaggggggggggaaaaagaaattcctatgatgcttttggatcacactctgaagccggtgctggttataatatgcattttagagagttgtgttacaagctcagaggctaccctaggaacatgtattggagcctgggtgccctatacgtcggagccctacagtttattattgacaaacatcgaatctttggtcacatgcatggagcattaaataaagataaaaataaaaactaattacacagtttacttgaaatttgtgagatgaattttttgagcctagttactccgtgattggacaatgtttgtcaaataaaaacgaaagtgctacagtagccaaaaaaccaaaattttgccaactaaacaaggccatatattgagaagaaataaaggggaaagatcccttacaaacacacacttgcacagaccaagagcattagcacctatgtacaaacacaactcaaccttgaccaaagatcaatccaggctcggcaaaagggctaagaggtgggaaattcctcgaatactgtctagacccaaagttttagttcttcaccatggtgacaatcttgacaatctaccaaaatgggggaggagagggacggacgaaaggccacagaggagaaagggagaccaggactccaggagatcaggaggtgaacttgtgggtggggaggctctcactccactttctctcatcctcggttccgacgcagtgcccattaaacttgtgtcctgtgggcgctggaaccagcgtgttgggagtgtacatctacccctgttcaactgcaatggtctgagcaggggaaggggatgattcatcgccagcagaggtgctttggagtggtcactggatgactggatgagaatatgagacggttagccagaaacaatacgtgtgtgatcaggcagccatgtttgattggacgcaaagtacccacacaagctgttccgtgcaggatgccaatgaccacaaacaagaaccggtaggggcatgtccaagcctcaactaatgtctgagctgaaggcaaaaaacattagtcttgattgccctgttgccgctgtagacacaagcagccataggaccatccagaagcatgagaagatagtctgccggcgaggaggttgtgagcgagaatagtcagttggaggtctgcatctacaagaattgggtaactggcaatgttataaaagttatattggttcagggacttctgctacttggtgctatttgctacttacctgggaatctttgtgggtgcaaattttcttgagaacagacttttttaacctaattcagcagtaagctctatttcatatgtagtgcaaagagtttgtgcataaattttgtttgaactgaactatttctattgcatgacatcgatgaataatgttgactacttgactgcgcctttgtctgacacttgatttcttcttgtattacatttacaacttcttaggtatgtatttgaagatacgattgattttgttaaatcatcagtcatagaaggaacccaggtaatcagttaaatgcttttaatttccttgtttattgtgatgtctttaagaggtattgttatcttactgaaatttcctattctagcctgaagacgattcagataaagaggacgttgaagcaaaagatattttgaaaagggagctccaggttagtgtgattactggtcatagaacatgtagttgtggtccatatgtgatgtgtggccttttcttttgctgtgatggaagcatagaacatgtgtacttctattggcagctgcatacattcctgaaagatttatgttaatatcctctttattaacaattctccttttctgaactaggatgagcgaaagacacttccaattttcaaatttagggatgaactgcttaaagctgtagaagagtatcaggtttgtgttgcttttgaccttttgtaatgatgttgcttgatgatcattatttggatgacgcatggcatccttagattaaatcatagaatccagggaaaattagttacgtagcatcgaaagatctccacattcaaataatgccattaaaagttctgtaaaatagcatcaaagaataaacatcacgctaaactagcattctgtcacatttgctgataacgccgtccacctgtctgtctgatcgccacttcttcctccttgtgaacggtcacggcagtttccgctagccacaggttgcactggccacactctagggtacatgccaagttgtggggggcgctgctctgcagtgaccccgtgaggttggcgtccggcgcctctggacacgttgaggacacctccacgctgtggcttcagcatgactctgcgaaccctacatggctatcacagccacgagcgttgtggaaacagttgcaacctgtgagccactgccgccatcgattggtcggcgtaggagcggcaatgccaatcagcagcaatgcatcgccaagctctagctcctttgcaacccaatctctcctttgtctctcagcaccagcacatgcttccccaaatccaccaaccagatctacaacaataccatttttcaggcaaaagaatgcatctacaacagtgtcaatgcgtcaccaggttgcttgacggaatgctttgcttccaatttttttgggtaaagatagataatgcactgggatcctccaaatatagtccatatgtaatgtgttttcaatattcaaaagtagaatatgtaatggatcaaagatgacacttcacgtttaataaagtatacacaagtatatatgagtatgatatgttactgggataagtagattcaagtagaactttttgtcaattgagtttccggtctggccaagattcaccaagtatgtaatgtgcaacaaagctctattgcaatgcccatagggccaaatatgaagaggtacaaagtgcagatagcaccctacactaaagtctcaatacagtatacatatatctagtaccccctcaaactcatggtagttcaacagcactgagtttggggagaataactatttgtgtgccctagtctgtgctttcatgaaaatatcctctagctgaacgtcagaaggcacatggtggagagtcgtagcataatcatgcacttgcgatctcgtataagaagcatcgatgccaatgtgtttggtgagttcatgtttcactgggtccctggccatattgattgcactatcgtataagaagctatcagaggagaggggagtcggtgcagtaactggcacgacgaaatcctcaagcagccatcgtagccaagtcacctccatagtcacaattgccatagcccgcaacttaactcagcctcacactcgaacgggaaactgcagtctgctttttggtcttctaggcaatcaagcaggagccaagaaagacacgataagcggaaagagagcgacggtcagagtgatcactagcccaagtggcatcagaataagcccaaagctggaggaaagaaaaggcagcgagaaatggttccatgaaggtatcacataacacgaaggaggtgggcaaatgatggcaggtttgaagatcaattttaataagagtgaagtggtgatgattaatgatgacaatacttgggactcaacttatgctgatatctttaattgccaagtgggtaaattccctatcaattatttgggagcacctattagcgccagtaggctacatctaactgactggttacctttgattgataaaagtaataagaggctggacatagctggcagagcaactttaatatgttgcagtcttaataattcgcctatatatcatatgtctgtgtacttgcttcctaagataactattgataacattgataaaatcagaagaacctttttttggcaaggggtggcactaaaaggaaatatcacttgtcatatggactaagatctgtaagagcaaaaagaaagggggtttgggcattaaagatttaaagaaaatgaatatcagtttggtgatggaagtttgagcacgaggaagggttgtggcaagatattattaaggccaaatattttcataatcataaaagtactgactctcctatttggtatgatcttctcatcaggggagaagcattaagattgccagattggtaatggtagaaagactagattctggattgacccttggctatatgaaaaacctatttacacaattgcctcaaggctcccaactctgtttatctgtgaacaaaaagatgtgattatagctgatgtgaaaatggagtgatacagattacttttaggagatggttaacagaaaaactaaaactttgctgggagagaatatgggctgatgtggagagatttcaacttgagatattgagaaaaatcatttttttctctgttaaatctgtgtatagtgctttaactataaatgatgctagtccttttcacaaaagaatctggaaagggaaagtgcctcaaaagattaagttctttatgtgacttatgacaatgatgctatcttaactgaggataacctgatcaagaggagttgggtagggaacccaatgtgtcatttctgtgatcaggatgaatctattgatcatctcttatttacttgtccaactgcaaaagtaatttgggctgtgattgctaaatgtattggggcaactaatgttcctacatctttagctcaatgttggatatggtgtgacttgtggctgcctaagggcaagaactttcaaatgtgggggattggtgcaatatgctgggccatttggaaatctaggaacaaagtcggctttgatggaaacaagattaacaatcccgttgagattattggtcatgcgtgtgcttttatgcgttattgaataggtctgtatgctgaagtggacagtgaaatgctcatcaatggagtcaacactatgctcagagtggtgggagggggtatctgggcacaactggaacagagggagcaccaagaggaaaacgacctgaatgagtagctgaagaagtggaagttaaaggaacaggaaaacagttggattttcattagtctaaggttttctgtgacgacagtgcttgaccttgaaaggactgcaattgtcgtgttatgtttcgttctagactgtaatatggcgggtttatcgtagtttagctcctggaggctatatctgactctgaggcagagcttcagatatgctggagacagtcgcctgttatcttttttcttctttggttcttcagacacatgtattcccatttcactgaatggaaatggggctagcctcatgtgggaaaaacaagggacctaagtaggagaagaaacaaactgactgaagatgtggatagactgagaaatgtcaggacaagtgataccaagatagacaagactcccaacacgatgacaatactgagtgggttcgttgagaggtgcaccatcagtggggcacaagtgaataccaagctccataggtgtatcagctgtgcgaatattagtgagagcagcacaagaaaggatatcttgagtgtattttcttgggagaggtagatcctaaggggtcccaaatcagaccgcaatacgaaagtctaaatacaatatatgtatataacatatcaatgttcacaaactaccaaactcagattgtatctaggactaaactggtccactctaggttcatagctataggaatttcgactttagttgatgttctgacaaccttgtttctctttgtaggttattgtcatagtgggtgagactgggtccggtaaaacaacacaaatacctcagtatcttcatgaggctgggtatactgcgaaaggaaaggtaagatatccataagctccattactgtagtgagaatatgacgagcatcgtctgtgtatgttttaattggtcttatacacgaggtatgggcttttccctagtagctctctgagctccagtttcatgaaacgtgcaagtagcaagtaggttaggtttaggccatgatgtttttttgcctatatttacagcctctagtagccatgcactaaaggtatttaattttgtgcaggttgcatgtactcaacctcgtcgagtggctgccatgagtgttgcagcaagagtatctcaagaaatgggtgttaaacttggacatgaggttgatttttttgcttaattctaatgtcacattgttcacaataggaatttcattcaatggatattctatcatatcataatttgtaataactactgttcaggttggttactctataagatttgaggattgcacttcagataaaacaattattaagtacatgactgatggaatgcttctgagggagttccttggtgaaccagatttggctagctataggtatccatttatgaaagcagctgtgtttgttcctcccccaaagtatcacagacctttcttatgtttgtttctttatttttgctgcagtgttgtcatggttgatgaagctcacgagcgtaccctctccactgatatcttatttggtctggtgaaggttagctagcttgatgtattgcaactatatttgatacaaactcaaaatgttaccatgtacattaatatggtttccctgccttcaggatatttctcgttttcgaccagacctgaagttgctcatttctagtgccacccttgatgcagaaaaatttagtgactacttcgattcagctcctattttcaagatacctgggaggcgatacccggttgaaattcattatacaaaagccccagaggctgattacatagatgcagcaattgtcactgttttacagatacatgtgacacaaccccctggagatatcctggtgtttctcacaggtcaggaggaaattgaaacagttgatgaaatccttaaacacagaacaaggggcttaggcaccaaaatatcagaattaattatatgtcctatttatgcaaatctacctaccgagctgcaagctaagatatttgagccaactcccgagggtgcccgtaaggtggttctggccactaatatagcagagacttcattgaccattgatggtataaaatatgttattgatccaggcttttgtaagatcaaatcatacaatccccgcactggaatggaatctctacttattaatcctatctcaaaagcttcagcaaaccagagggcaggaagatctggtcgcactggacctggaaaatgcttccgtctttacacgagttataactacatgcacgacctagaagataatactgttccggagatccaacgaaccaatcttgcgaatgttgtgcttacactcaagagtcttggtattcatgacttggttaactttgacttcatggatccacctccatcagaagccctattaagagctctggaacaactttttgctctcagtgcactcaacagtcgtggagagttaaccaagactggaagaagaatggcagaatttccactggatcctatgttgtcaaagatgattgttgcttcagagaagtacaagtgttctgacgaggtcatctccattgcatccatgttgtcaattggcaattctatattttatcgtccgaaggacaaacaagttcacgcagataatgcaaggttgaacttccacactggcaatgttggggaccatatagcactactaaatgtatgattccctgcctgtttacttttgtaagcacacacatgcacacaccttttatatgttcaatgctaacttattcttgcaggtgtatagttcttggaaagaaacagactattcaactcaatggtgttatgaaaactatatacaggtatttacctgctcatacttattatcctcagggttaatttcttggcctgagttcttattatctgatcagccagtaaacgtcctcttttattatttatttttcatattttctcagaaggtatatttgtacataagaaatggaaaatggtggggatgacttagatattgtaaacaaagtattgatgaaataggatggagacctcacctgctgttagcgcattattgaaatttgattgttggtcccttgagaaaaacttgcttttaatatttgctgtacccaaaaaatcctgtgacctactggttagtaatggtttttgtttccctgattatacctcaacagtttgtgctgcttatattttctgattatgggcccaactttcactaggctgtcttgtaacattcttgcgaatttcaactatatttgtctgaataccctcttccaagtacacatcatgggccatgaacattgaattaccgttatatcccaaaaccctgattcccaaaaagccaatgtgaaattctttaaaagtgtgaggaatcaaaattctataatatctaattagatatgagtggaatcagcaagcagctgcatactatcttattgtgtcttaggttcataggctacgctaatgttcatcaaaaaactctgttagagtgctttagagtggggttacacatataaagtttccttagtgtttcaacgctgccgagaggttcaagatccatgacgggcactggatacgctgttcaattactactacatctactgttacactatagtatttctatgggcttctttgcaacagtaacacactaaaagtcatcagcattctgatttctatagcgctttagatgcttctgcctgtagttgtagctgtaaatgctctaatacctaagttatatatttaacttttataatcttggtgactctacatagcatccactggagtacatatcaaaggacagttattgtttttagctatcagccttgtaacagaattcatctttacatactagttgaaatttatctgttgatccttgattctgcaaatttatgtggtaaaattatcattggataattcaggtgcgcagcatgaagagggcaagagatattcgggatcaactagaggggcttatggaaagagttgagattgagatttgctcaaatgccagtgatttagatgctattaaaaaagctataacatcaggtatgagccttttgggtattcttcagtgctttctaacaatacaatgattcaattatttcatgtgtgctgtaggtttcttccatcattctgcacggttgcagagggatggtacatataagactgtcaagaaccctcagaccgtacatatccatcctagttcaggactagcggaggcaagttcatttgattgtacatcatgtcattttcatagcattcataattctaccttttcttctgcgagttttagttatgatttcttgtgttatgttcttatatatgctgtatgcagatacgtccgcggtgggtagtataccacgaattagttctcacaacaaaagagtttatgcgccaggtatgccctgttattcagaatctcattaagacctgcaggagaatttgttgtatattgatgtgacgattgatactgtggcactacaggtgacggaactgaagcctgaatggctggtagagatagcaccacattattaccaactaaaggacgtggaagactgtgagtcttgattgtgacgccattaatcgctcaacctagtttttgttgtatgagctatgacttaaatgcctcttcctttttcctgcacagctggaacaaagaagctaccaaagggccaaggacgagctgcattgtagctaggacccatggatgttgcgtttgactcagcctaggagcatcaggctttcagtgaagatgtatataactcctttactgcgaacaggatagatgatgtcactattcattgtcctgcttaggttttagagtagctggttgttcatgtaaattgtgacatgaagacatgctataattgtcacactaggggagcgctggcatacgacgtttggtgttgtccaagcaggacaatgaatagtcagcatcctgccgccaagctggaagatggtcagcatcctgacgccatgctggaagatggtcagcatcctgccgccgttgggaccattgtccaagaaaatgcaaatcttggggtttaaattcgggatgaatatgggatttttcccatagtacgggattctgcaaaaacatatgttctgaatctctgtaaaatagggatggtcatactgggaaaaatggatggttgggatggaatcgtcagtttttgtatctgaataattcagtcacggtccattaacttgggccttgtttagttgacaatttttttggattttgggtactgtagtactttcgtttgtttgtggcaaatattgtataatcatagactaattagggttaaaagatttgtctcgtgatttacaaataaactgtgtaattggtttttgctttcgtctaaattttatacttcatgtatgtgccataagatttgatgtgacggagaatcttgaaattttttgggagctaaacaaggcctggcaccgtatttatacagatagatgataatagttttataaaagtagagagactcttttatactgtttctaaataaaatatagatgttttgacatgactacatgacttgcctaagaatatcatcacctggcttaggcagcgttccttcgcgttggatccttgaatgtctagccagcagtccccaggccaaggcggcaaccttaaaagccattttagtgcttgctggagctgtctagtttaggtatcatggccggctgcttagcagccatgttcctggaaacttaagtattattttataacgtgagaatagaaacattcgtatttttagaatataaatattcctagaacgtggaatataggaatgtgaatgtaggacatgttttcg

SEQ ID NO: 4478 - DNA, 4456 bp, Sorghum bicolor
ctatgattggacaatatttgtcacaaacaaacgaaagtgctacagtgcccaaaatccaaaaattttgccaactaaacaaggcccagaagtaacaggtttattgtaaaccaaccacccaaaaaaacaaaagagttgttaagaggggaaatagtttgcgagcccatgctccacgaaacttggctgcctcgatttcgtagaagcccagctcggcgagatctcgggcttcggccagggcgaaccccgacctgtaccccgccggcgattgccggcctccccgggccaaatgccagcccctaagctctctttgatgcggtctgaacaactgcacctctgtaagggcccaacaagagccctctctttctttctatgctttgtgcgccggcgctgcacttttctgtgccgtgcaagggtaaacccaactagggccacaccttgcacagggtgggctggctttgacatgggctcaaagcaaactctccccttctaacaactctttagccctcctaaccaaagctggagtaacaggcacatgctacggtgcccggctggtgcgcgcgctcagggccgccctctttgagctggttgcctccgtgttcggtaagcagtacggtgctaatgcggggagcaaacgcaaggtgtttgttgctttgctctgcttcgctgcttgcgtgctcttttccctgcgcacgtgcagggtccgtagtggcgcaccctccactcctccgcatctcaggccttgtttagttcgcaaaaaattttaagatttttcgtcacatcaaatgtttggtcgtatgcatagagcattaaatataaataaaaataaaaactaattacacagtttatctgtaatttgtgagatgaatcttttaagcctagttacaccttgtttggacaatgtttgtcaaataaaaacgaaagtgctacactagccaaaaccgaaaatttttacaaacaaggcctcattctcatgccagccgcaggagctcatggcgatcaggcttgcgcgcggccccgtcgaatggcctcacgtcgtcggcgcccgccgaagacgacgacgacgacgaaggccgcgcgagagtagtctgacctcctcggcgtcttctctatggctcggtggccggcgtgcctggcggcgatctcttgttgtccctctaagcctcaggcgtggtgagtcttgcagagggcgcaaacaccaccgcgggtagagctaacgccggccagtgcggccgattgagggggcacgtcggcgatgggcaatggcgcccccgtgcggtcgtgcctagcgatcgcggcaacagcgccaagcccaatcaggtacctaatccacccctcctgagtcttaatttgaagattagggtttctaatttgagtgatatttggggatttcgtgaactggggtttctgattttttttttgaagaaaaaaaaagtgctttctcgaactagggcgtcagcaattagggggaaaacgtgaattcgatcgtgacttgctaattctcctacttgtatttgctgctgatctgaagcattagcccttagtgtgcatgatcatgttgtccatgtttgacaggccgaacctaaattggtcttaacagaggttgtattgggtttagactaattatcctgaagcaattctgagccaaatttgacagcacaattattgtagcattaatataaaacgtgactataaccaggcccagtaaacagtttttgggtgaatttggggattcaccagcctgtagggtgaatttggacaatcgaaatgcagcaagatgcagtggaggtccacgcccagcagacacagagccggcccggtgtttattatactctctcgtcacgtgaaccctgtcatcctctctgcagtagaccatgtgcacaccagtcccggcgtggtgcgtgctgctcctgcgcccaacgccaaaacggatacggccgagcccacggaaaatgctactacactagttgtagagtcctccggtcactttgcactttgcagtcgatctcatcctcctccattcctcctgcagtcctgcctgccatcgtcaccctgcaggctctttcttgattccaaggtcagcaacaacttttcttgattccatcatgtctcttctccaatcgctttcagtgaaaaggatttgacagttccagttatagcttcaatgggagagtagttatagcttcatactgatttttgtgccattaagctatgtatgtgtgcgagaaaagtggggaatggtgagaaggggattcgtatttttgtttggctcgaatacaaagttactgtggtttataatgtcctgctttctgcaagtttttctcagatcatgaaattcagaaaactatgaagcagctcgatctggtcaagtagctttcaggtctgggaaaatcttggatctggggcccaaaacctgttcttatgaactcaggtaacaatagtacttaaatctgcaatgggcaatcttgtgcttatgaactcatcacctgacgattgatgctacttaaatctgcaatgctgccgttagactacaccaccaccagctggccgccgcaccgcaagaaccaagccttgtctcggcccaaggcgatgccgtccaagtgggacgacgcgcagaaatggctggtgggcatgtcgaacggcggcggccgcgcggacggaggaacccacggcggcggcggcgccagggtgaagcccaggaactcgaacgccgacgatcggcgcctcctcggctcgtcctcgcagaacggccgtgtgtcctgcagcagcgtggacggcgccttggagtacaacagcatggtggtggccgcgcccgcgccctcgacgccgccgcggcagaccggcggcgagggcgacgacgacgacgtggaggagaccaagaagatcgactgcatggtgcagcagcagcatgggcatgggcatgggcatggctcgccgcacaaggcggtggtgatgaggtccgtgtgcctgcgggacatggggacagagatgacccccatcgccagcaaggagccgtccaggacggccacgccgctgcgtgcctccacgcctgttgcccggagcccaatatcatcgaggtcgtccaccccagcgagaagacgccaggaagggcccgtgggcgtgaccaccgccgccattgtagggacgacgaccgagcaggtagcggcagcaggcgaggtcggctgtgtcggcgaggagcgcaccgtggttggtcatggtcatgcccccagcgtgaactcgctggagtcccgcgcggcagcctgggatgaggctgaacgggccaagttcatggcgaggtgaaagaattgttactcttaattactatgctttgtttataagttttttgtttgctttgtatcggtagctctgattttattgttttctccacatctgccacttactaattgcgattcttgccttgggcttgtttcatcaggtataaacgtgaagaggtaaagatacaggcatgggagaaccatgagaagagaaaagctgagacgaagatgaagaaaatgcaggtaataataagcttgtaagatgcaacagttcacctttattcatggttttcaagactcttttagccggttgcttacatctagtctagtttctcctgacatgtcgagcgtaaaaactctgtctgcagatgaaggccgatcagatgaaatcacgggctcaagagaagctgtccagccggctggcgacgacgcatcggatggccgaggagaagcgggcgagcgccgaggcgaagctcaatgagcgtgcggcgaggacatcggagaaggccaactacatcaggaggacagggcacctgccgtcgtccttcaagatctcttgcttgtgcggctcaagctttgagtgaagccagcatcagttgtgacactccgcctcttggtagtagcctcgtcatttgttcctctcactgttaaagaacatcgagctgacggccggccatagcccaacgtctaattcgatccattaccatacatattaagggggaaaaaagtctccgttaccatggttgtccgcgcaattgtgcaacagtgttaattgacctgatcagaattgttgctagaagcattccattattagcattagcaatctgtggactatgtttaattatattagatcagatataatgtcctgtgcatggtacgggcacacaaaatataaccaaagtactaacaattagtccaaataatattatgttgaagatggtcactacttcagcttaatttcttcctattgaaagaaataaacatggtgcttctcatttcttccacctgaaagatgacaagtatggtggtccttgtgataatttttattgaatttgatgcagttgagaatgaacaaaatacatgttaggccttgtttagttctaaattttttttgtaaagtggacactgtaacacttttgtttgtatttgataaatgttgtctaatcatggtctaattagacttaaaa

SEQ ID NO: 4479 - DNA, 5639 bp, Sorghum bicolor
agatggctgtgtctgtgtcaccgagggaggagccggcgaaccgcggagcggcgagcggcgcgcgcggttgtggcggtccgaagtacaacttctgaacagcggtgagcggcgatctgatcggagctgatggcgtcggcgtcggtgtcgatgtcgccggccgcggcggcgtccatgctcctaggcgcgtcggtggcgctcatgctatgcggatccgtcaccttcgccatcggcttcttcctcatgccatgggtcgccggcctcgcgctcctcttcggcttcgccgacgccctcaacaccctctcctcggggctcttcctctgcaccaacaccaagcagcccccggccgctgccgccgcggcggtcccttgcaagcacccgcggggacggatcatcgggcccccgaccaaaaccctagtgatgcgctccgaagctgggttttccagcggcgacgtcggcttcccagggaacgcgcgaaggaaaacagaatcaccgcgtgggtgatttggcgaaggaatccgccgcgcggagaactgcacgcgcggaggaaggttttggcaagtgaaggattttggcaagtgcgaatagcaaattgttggagaacgtttttttcaacttttgccaaattttgtagtataccaaatggaatagcaaactcttggagatgctctgtctaaaaacaacactccagcatggcccctactagagccctcaatttagggtaggcacccaaatctttcgtgcagactctattcctgttggccaaacagctcagcctcatccttcgtggtgtgaccattacctccccacaacgtacaaacgcagcctcgcccaccttcctccagcgctgatctccactaccgtactccctccctccacccccgacctccaccgttggatagattcgccggtgcgcaacttcggtgcggcctctttcctgccacgcgagcgctgccctgatgtgctgatagctctcatctcatttgcgtcctagcctttgcgtagagaatgtgagaaaaaaaggtttgatccagtgacatgtgggtcccatatgttattgtctgtcaatttggatttgggggccttcatttgtgggtggtgttggagtggaagtaaaaattttggatactcaaaagtaagaggagcacccaaatgaaaagtaggaccctgcttttgggctactgctggagttgctctaataagatcaaaataaaaaaactaaaatcttggttcatgaagccacatatgggatgtaacaagtgctaacaaaaaaatctaagttagaattccaacgaaatagattaagacaaatagaggtgcaagatgtgtctgttcaccggctgctattagtgctggcgacgtgcggcgatctgaagaaaggggatctgtaagatgtgttcgaatacacacgggttgagcttgaacgggccaggcccatgcggatcctaggaaaaacaattgagaaaaaaattatttagattctctgctttgagagcagtgctgttttttttttaaaaaaaagagtattagagcagttatgtcttcttagtgctatcttcttctattttccttaacgaaatggatggcatgtgtcgggttcggaagtatcggaggtgtatcgagatgtatcgacaaagtatcaagattaattttatttatttatttagcttggttttcatatacttccttgatacgatatcagcgacgtatcagaatatcagatacgtatcgcgatactgctagatacggcacttcggtgaagtagctagtggggtatccaatctcaaaagtcaaatgaaatgtacacatgtgcacaagctcaaccttgcatcgtgctaaagacttgtcatttatttgattgccgctttaatttgccggacataaagaattcgaccatgtatgaacacatgcgatcattaatcgctcgataattctgatggggaggtcgtctcccggccgggtgcgcgtatatatggccacagagggaggaggcagcggcacaggcaggccaggagagtaagcaaagctaataaggaaggagagagacatggaggaggaagcccatggcatcgttattgtcggcagtggtatctgcggccttgccactgctcttgcccttcacaggtgcgtgcactcttgctctagctatagcacggtttttccttcaaatccttccccctgcagcatcgcacagatagttgtatacttccattttctatgccctgctgcgcgcgccgcctcccttgtggtgctacgtacaggaagaatgggcgtacctggtgagaaagatgaagaaaaggaaagaaaaaataaataaaggcagtatagtcatttgattctttctatggtgtgaagctgttttgtcaattagggtgacgaaaatagctcaatttcatcggaaaaagctgctcgtgaagccaaaacccaaaactaattttattagtgaagttgagctatgtcaaacaagcctattagtatttggttacctaaaatatacaagcttcaagtttgaaggacaagtcttgggaacataaaagggaaactgtgtatgaatgtcttatttctatgtcgaaccttcacctttgccgaagtttccatttcttgagtagctctaaacaacaaaacaatttgcttactgacttgcatatatatatatatatatatatataggaaagggattgctagtctggtgctggagaaatctgagaccttacgatcagatggagctgcaattggtatccatgccaacggatggagagttctggagcaacttggagtggctgcagagcttaggaaaactgccaatctcgtcaccgcgtaagcttgtacccttacaaatactagcttctactcgtactcctaattcaaataagctagtataaccactacgcacaagggtttctctcaactactcttgttgatcctgataacttctcctaaagttacattttgattgcttcggatggcatgaaaattgaaaagcgacaatattcagtatcaaaatgatccttcgggagaacaatctgcaggtcgaagtcctaactttgcatctaacagaggaaagaagtagtagaatcaatatgtttgtctttttttagtactcaacaatgcttgctctttaacactgacatttcaggtatcataacgtgtggcagcaaaagaacaagaagactagccggttattaccaatcaggttagtacaacgtttgcgatatacgtaccgttcccaaataataaatcaattccaatcggtgcaaatcaactatcttaagtttgattaactctatagaaagaataacaatatccatgatataaaatgaacatattatgaaaataaattatatggtatatctaatgatattagtttgatgccattaatctcgtggtctttctagagattccatcaaaatttaaaaagttcataaaacaactttaggaatctatttattctggaaggaaatgattttttaatacattttcataagtaaataacaaaaaattaccacaaagcggctaaatctcaaaaataatatcatgtcgtcataaatcagataaatccccaaaactgaaaaaaattggcataaagaaaccctaatctaaagagtcaacctactgtaaaaacctattaaaacgataaattaccactccctccagccttcgacggtgtgctggaggggaaggagggggaccagcgatagagacagagggcggtggtgctttgagtcgcagtcgtgaggggggctggggctaagtccctcgtagttgtcttcttcctatgacacaaatagaggcactaattaagttagcctattttgatttggctaggaacgaactccgatgcttgaaaaggaaggatctcatcgagacaatggccaagaatttaccttcaggagcaatccgctacggctgccacgtggttgcaatccaccaagatactggtacccatggagctattcttactacggtcgatggttgcattatcaaggctaaggtgttctccacatccatgcatctgatcgaattcaaaagtgcaatggacacagattcttctctttttgcttatttctctgtctgaaactttttattgatctcgacgtgcaggtcctgattggatgtgatggtgcaaattcggtggtagccaaatacctaggactgtctgcgcccataacaaaccatcacacggtttttcgtggtttcactagatatccgcatggacatccatttagtactgagtttctgcgaataagaggagaggagttctttgtcggcagaattccagtaaccgacaatctagttcatttcttgatagtcacgcctattcctccaacaggtatgtataaatgtttactatttgtggaactattacaagacaaactgctagctaaatagagtaattaaccagtgcttacaatggatgtcatctaggaaggatcacctatgatgtgatcgccgcgaaggattccgtgatagagaagctacaagctcaagattgcccttctgatatcattgagatgttgcggaactctgatccggagaccctgaatgtcgtgaacaatatctggtaccgccctccctggcaggtcgcgtttggcaccttccataagggtatcgtgacagtcgcaggtgatgcaatgcacgtcgtgggcccgttcatcggccagggcggcgcatcggggctcgaggatgccattgtgcttgcacgatcgctgtcacgagccgccgccggtgactatagtgtcgcgattaaggagtatgtccgagagaggaggctaagggtgtcattagtgtctctggagtcctttgtctttggtatgctagggagtgccaagtcgcgggtgacaatgcttgtctgcattgttgtcttagcactcctaggcaatcggtcgcttaggcatgccgactttgattgcggtcgcctctagaactcatgaatgcatttcctactacataatcatgggattcatgagttgccatgtgtcaaacaagaaagtatgccacaataagcttcatccagatgagatgaaacaatgcttgtacttttttctttttgcttttattttactgtgcattttcaccactacattgaaaacaaaagatttatgtatgattgtaatcaagaagaagaatgtctttatggtcaatttgtttctgaaatgaagcagttgctcattacactcacacacacacatagagagagagagagtgatgagggtcaggcccgatcttccgagaggtaattagtaaattcgatttgtggagaactcgacgttggcgatccggcttgaaatcaacacgattcgaaccctgcaatcgttacaccactgctccgttggttatcaaccaagcacaacttgactgacctcgccaagaaggcttttcctgcaagcgaatcgaagaacacaagcaaaaaagtataaacacgcaatctgaaattgcagatataaatgacgtgaatattcaatgacggttcaagaactcggttctaaaggactaatcgacacagtggaggagatcaagaacgggagccctggatcactgtaaaaggatttgtcaccacaattacaatgaacgattcagtttctcgatggaaaactaaactctaaacaaaactcaagtctaaacagcggcggctgcgtggaata

SEQ ID NO: 4480 - DNA, 4836 bp, Sorghum bicolor
tgacccttagagcttgattagtacctcaactaaatgcaagtaattctttcttcacccgagctaggtttttcggtcgtcaagccgtcgcttgcccttcacccttgcttagtacctcgaagcctttccttgctatcttcaccatctcaagtcttcaagtcatatgttgctttgaatcatccaatcaattttatacttttcatttttgctttcatatgagtgatagctatcttctcaataaataagcctctttcaataattccatttgcattgttgtttcgtgcttgaactagattgcttcatacaacaatacataattttggcttttgtaaacttgaatcaaatacctgtgagatagcttttccctgtttcacacttagcaagatcattagttcctttaatcatggttgccattcaatcatccaaaacacattaagtggcttaatgcacttacagttaggttagggtttcaatgcatatatatacaattggcgggccgatatgggctgctgctaggccttcatttatcgagatgggtttttaatgtgtaaccacctccgaaaatagatttatggaggtgtttgttataagaagacccacgctctgaatataaactattttagagacggttgccttaagatgatcgtctcgataaatcgattttgcgaggcaattttttttaccatctcagttaataaaaactaaccgtctcggttaatcctaggtatatactgaggcggtcggaagtgctacccgcctccgaaaataatttcaaaatatcttacaaaagattttttttttttttttgtagtagtgatgagctccacatttgcttatgcttgttttgattatagattggagtatatttgttgttgtataaaaaaaggttttgcaaaacacaaaagcacatgttcacaaacacgcttccgtacctcgttatcagttcacttgagcttatcagccgaatctaccagtcatagtaatatttttctcttacaataaatcagctaacggtactttgtgttatggcttattagccaaactaatagggcgaacagtggaatgtcatctaccaaaaaaagagataattttagccaaaaattttggatagctgtactcagtcgaagcctggaatgtaaatggacaggttgccacaacaaacttgtattatgttgtttgttttctaaacctgcttcgctgtcagcctgttcactcgagtttatcaaccgaatctgccagccattcaacagtgtagtgtctgtctctcataataaatcagtcaatattactttctacataacgatgtttattagttgttttatgaatatgaacttgtttaattttatcaaggcccgttttttatcaaggttttgtagatagccagtgacaaacacaacgcagctggacgacggcgcccaagctttgacctgtcaaaattcgactagtacgtagggtcccctccgactccgaccgagtcacctcgtcgtggggtcgtcctcgtccgctgccttctctatcatcggcgtggccgcgtcgtggtcgcgcgactggtcgcggcagctgactaatcgtcctacactagtattcccgcatcgggccggggtgaatggtttgtgtgttttgaattgttgaagtctggttattgcttctccccggccggcccgttccgtgctgcccaagcatgcatgcatctatctgtgtcgcccgggctactagctagctagtggacttggatcggacgcgtcgacgacggacggatcacgtgggacaacaagcaagacgtcggcgcggcgggctcgccgcgcgcgcgcatgtggcggtggcatgcatgcgcagcttctgatccgtttcgttcccattcattcaattcaacgatgatggcgacgtgagggatgagaaggctagcttgtactagtgcagtgcagtgcagtgcgcgcggtggattattgcttcgtccatataagtagatgcctgcctgcccacggaagaggaggaagcaaataatccacagacgcacaaggacgacggaccacaaagtaggcaatataataggcatggcggaggcggcggaggcccatagcatcgtcatcgccggcggcggcatctgcggccttgccaccgctcttgctcttcaccggtgagctcatttgctcctgatccagctcgttagttttcattaaattaattactaccaagtagcgtcgttgccgataattaaacagcagtgcatatatatattatttcctagttatactagtgagtgactgtctttattattattatttatggttgacgcttttggatgtcagtattgtatgtttcgttgaaaatactattatttcagagtcagtatttcatataagtggtcaaatttcccgttaaccatgtactacttgatcgaggcagtattttttttcttctaaatctcagttcccgtatgcccaattcaaaccatgacgtcgttgtatttcgagttctgaacatgcgacgtctgctgatgacacatttgcacccatgcatgcaggaaagggattgctagtctcgtgttggagaagtctaggagcctgcgagcagatggcgcgggcatcggcgtccacgccaacggatggcgtgtcctggagcagcttggcgtcgctgcagacctcagggacactgcccatcttatcaccgtgtatgtatgctttccttcatttcctatataccagccttaattaggaatctgtatcacttgattcgacaacatctctaacacttcagtgtaaaataaacgggaaaaaaattcaggtatcatgacgtgtggaagcagggagacaaaattagccgagaaaaggttccagtaaggtttgtttcctgatgatactcttattgatggctggcttggagaaagttttatatatgtataatatatcccgataaccaagcaacaatgcgacgataatcttattgaatgatttgtttgttgatataaggacggagctccgatgcttaaacagaaaggatctgatcgaggcactggccaaggacatacctgcagggacgatccgcttcggctgccgcatcgctgccgtcgacgcggatcctgccggcggccatggcgccgtcctgacaatggcggatggtactaccattaaggccaaggtaaactttgcagttgcagacagacgtcccagtccgtatcagttgatgatgatcatcatctcctgtatttattctctgcctgaaattaagctctgcggccaaatcaaaattttcaggtcctgatcgggtgcgagggcacctactccgtggtggcaaagtacctcgggctgtctccggtgagaaccatcccacgcccagtgctccggggtttcacatggtatccgcatggccattctttcgacaacgagttcctgcgcctgagagttggagatttcttcatcggccggttaacaatcacggacaatctggtccatttcttcataacaatgcccaaacctcccacaggtactatatattcacccactgggattaatttagagaagatatatgcatgcatgataagcgcatcttgctagaaaattgtatatatgcatcttaattctaataatttcaagcaactacaccacctgcctgatgatgatgtcatgaacgacgaccagcagatgtcagcaccaaggacctgaagcaagtgagggatcacgcgctgaaggagatgagagacgtccaatgccccgccgagatcatcgacatcgtccgcgactcggacccggagtcgctcaacttcgtcacggagttctggtaccgtccgccgtgggaggtcgtcctcggcagcttccagaagggcaccgtgacggtcgccggcgacgccatgcacgccatgggcccgttcatcggccagggcggctcggcggggctggaggacgccgtcgtgcttgcgcggtcgctggctcgggccgtgggcgacgctgacggtgttgggaaaggcgccgccccggcgcggcgcgagaagatggtcggcgaggcgatcggggagtacatcagggagaggaggccgcgggtggcgctgctgtccctcgagtcctttatcatggggacgctgctggtgcgctcgccgtctccggtcaccaagctggcctgcgtcgccgtgctcgttctcttaggcagcaagtcgcttcggcatgcttactatgactgcggtcgcctctagctagctaccacctctcagtttgtttacccaaaatatttatagcatataacatttatatattactactaattatgtaagtttgagtattaccaagcgtgtgcatgtacgtgctaccaagcccaaatacaaaaaaaaaacaacaatttacagcgtagcaaaagaagccaaaaagcaagatcatagctatactatactgtcgctcagtgtagcggcagctttgctgcctgctactaccccgcattggaaacctaaaagcacagcatgaataagaatgcttgatccgagcaaaggcaagcacaagcattagcagacgggaaaaaaatttattgctagcaaagctcttaaagagctctgccaaatgatagtgaccagtagctcgaatcatcagtctttaccgacgcaacatgcttttagcgaacatgcatgaatccatctttcttttgtccacaacaggattgagatttacattctacagtatatgccacaactgtcaagaaatgagcaggagttgcagatgagagaaaggcagtcatacaacacagatacagctcagtcaaggactcgaggaccagatgagataaggtcactgcctaccatggattgaggagcagtgctgcaaaaatatattggaagggatggacatttcaaaactt

SEQ ID NO: 4481 - DNA, 2821 bp, Sorghum bicolor
aggcatcaatcctcatttttggatttttcccttcaaaattattacttcatgtgataaaaaaaagataaatgaagtaatatatacatttaaccttcatttgttgcagaacatggcaaattactatatacatttgttagatatatatatttccattatattcaaacatactcctaccattttcaaatatctgaatcaacttgtgtagaaagtaacacacatgtaagtatgtaactaaaacttaaaatatatagctagctgtttttttttgaaatttagaaggggggagagcttccccacctttgcattccaaaagatcacgcatccaggtgactagagcgtggaacagggttcggattacagaggcgtaggtgcgagagcacttatatagctagctgatgacaacacaaaatgggacttagggcttgtttagttgctggtgtggtggtgcagctgcttaggccaggaaagcaaggtcaggcgtctgattttcggatgcctgtggccaggatggctttgcctaaccaggcagcttctgctagggcaccatctagtctagcgtccagagagcgtgggtgcaccaaattttaatttatgtttaggccttgtttagttcgtaaaattttttgtttttttggctactgtagcagtttcgtttttatttgacaaacattatccaatgacggagtaactaggctcaaaagatttattttacaaaaattgcaggtaaactgtgcaattagtttttattttcgtttatatttaatgctccatgcatgcgaccaaagattcgatgtgatgaggaatcttaaattttttttgaactaaaccaggccttagagtgagtgctatcctatcgatggttaaaatggcatatgaagtatggagaaggaaagcagtgccagcctgccaggcagcagggcacccatataggcacctgcgttatgacgtagcaaaggtagcagagaggctgattggtgggcacgcacaattacgatggaattgctcattcaagtttaactccttgatttggtatctttatatttttttagatttattctagaagaaatggtgatacatactcttttagtgtagatgatatatatgttcgcttaacaagatgtatatggtgactagctttatcaatcttaagacttatcagtttattgattactcttttagagatgtcagactaggctatgtctgcatgatatagggttaaagtttgtgcatatggcgcgctacatttatattttatagggataagtgcgcgtacttatatacaagcatatgtgtttagaaataaaaattgagttgagatgatgtgagctgttggattggcaacataagaggtaggtgtttcacaaagtgtatctccttttctttacactgatccttaacccttttgctttaccaaatttactgcatcacactacatgcatgcatcagcgtgactgacattttcgctgactttgccttataaattagtctccatattgcacaacggcgtgaaaatggtgttttgtcaagccatttattttggcgagtaaaaaaattatttcttgccatttaaattttgtactaaaagaggcttaaaacctacggattcgacgtagttgtcgccataatttgaggaacgaacatgcatgcatgatgcatgatgaacattatccgcatctttcgcatggttttgcaaagaaacgtgcagtaaaacaagtagaaccaacagctctctgctgcgcgctctgcctgcccttttgcctactagttgtgtgcgctactctgtactttactcattcagtcattctcactgcccactcacaaactaaggtaagacaagaaaattaacctactcctatacctcacgttggtcatctcttcttgagcttgaaagcagcgttccggactccggagggcgcaggacgaaccgccggcaggtgagggcggggggccagagcaaaccaccaccattgttgcccttggagcggttcgggcacacgtgaatgccgtcgccgtcgcagacatcgccgccggtcgggaggcggactgctcatggcggctggcacaagcacgatgacccaagcacgccgaggggcttctgcaccaagtacttctccgtggagtcgtgcctcctactcgccctcgtcgccgtgctgctgctggtgctcccgctcgtcctgccgccgctcccgccgccgccgttggcggtgctgctcgtgccggtcgcaatgttggcggtgctgctggtgctggcgctcatgccggtggcggcggcggcggcgggtgcccggaacgaggtcgtggacccggcgtcgtacttgtagtcttgtagagttgtagtcttgtagattgatgtacattattattaaggagtttgctatttccgcttattagcaagaggttttcaatattttttttagttttgagtgttggatcaatctcaagcgcaccatatgctccataccgggcttaaccggcgatgttaatttgttttcactttagtttgctcttgatctagtaattatgtgttccctctatctcgtttatctagtatactaacttgtttctcattttaacagcgtccttcttttaaggtttcactgtccgagcatcaatgacgcaactccaccggatatcatattcgccactaccaaaatggtggagttctcctagtatctttagttagtaataaataggggcggacctaggaattagtagcagggtatgcccatgttaaaaaaatttggatgaacaacagaaaatgttcaaactaaatttgttccataacaaattgagattacaaaatattggaagaaaattataa

SEQ ID NO: 4482 - DNA, 4242 bp, Sorghum bicolor
ggagctaacatgtgggcttagatccattttggcgaccaatgagaccaaaaaatggagattaagcaccaaaataccgtatttagtcctagttggtcataccaaccgagactagttgggtcttcaggtagtgaaaatgatggtgcaccccgtcctttagctaaggtagtggaaatcatcccaatttctaccactgctttatatcttgaacaagcagtgaaaatcattccaattttattgccgttagtttctattataaatcatcccaatcgtatagctggcagcagttgcggtgcagggcggagtgctgccaccaacaggggcaggggcaagaggactaggggagtattatatgtcgcaattgccagcataggagaggacgccgaccatcaacagcaatgcatgaaggaggacgagggccgcagctcctagcggtcaggacagggaggagaggtcgagctccaatggctttggtggggaggagtgtccggtctccgctcgtgcagcagaacctagaaggtttgggatgaaatagggagaggaggctgattaaaaaattcttatatgtttagccataaactttagaagtatgtgttgtagatggactgttggaggattgttctattaaactctctacagctgatgtgtccaagttgatagagagtaactgtcacaaaaaaaagttgatagagagtaataagctcgatctcagtcattgattatgaatcgaaattcatgttatgggcatgtaaatgaaagtagaaaatcaatgattggatggatatatcatgcaaaaggagaaaaagaaggatggacgcggtaaatcacaacaaaacaactataccccactcgagtgttccaacactagatttctctttctcttccttttgtctccctctcttcttctccatcatcggcaggcttagaaaggtggtcaggggaggcaagcgggcctagcagtggggatgcgagagacggcggtgacagtgacactgctggtacaagtggaggaggagggggttggactatgttgggatggggacgatcacgttgtccatgatagcggcacgaaagaaggagcaggaggctgctgcggacacagtagagtctcattagagctcatggtggagcaatgggcggtgagtggcggcggcacgtcaggctggggtagaaaagaaatcaagtgcaagagaagttcaaaacacttgggccttacgaggggctcttctggaggagccggaaccgttttggtgaagccacaaattgtggtttcgctaaaatggttcagacaaaaacagtttctctaaaaaaatgtttgatagggctcctctagagggactagagccgtacggtagacaaattccatcacaaagggcaaagtgcaggcggatgggaagaagcgtgcatcctccttcccttgctaagaatagactcgcgcgggtaggggcggggcgcacaagaaaacgagttgaatcaagcaagcgcctgcccagggtggcgcgatcgatcgatccatccagcagttaaaacgggtgggacgcctcctttcccgcggaaaaaggagctcccaccgctaatctatcgtcctcctccctccctccctcccccgcggccggccacccacgccgttgctgctgttctcgccctcttctctcgtaggtgccgtcggagcttgcttttggggaggtaggtaacggagctcagccttaatttcttctcacacatcatcattcgtgtcagcatattttctgcatccgccgccttgtcgccgatcgatttcttgcattatgcaatgtcttctctagctccgaggaccatctgtcaatgaatattccattgctgatctttaattgcttgataagagaatgtgaccatcgccaggtcgtgcggcatgatctgctgaccgaccccaaatcaaccccggccgcgcatcgaccgtcgccgccatccagtccggcgaggaggaggagaaggaggaggaggagaggaaccgacaattaaagatgtcttgctgcggtggcgccgaggaggacagctacggcccgccggccaaccaggcggttccgccacccaatgccaatgcccccggtacggtacagctgcatgcagggcatcatcagatcaccgtcgatgtcgtctgaccaccactgctgtgctgcgtgccttgtcatctcaatccacgcatggcgcatgcaggcaaccgaggtgggccgaggggaccgggcgcgcccagggtcggcggccccgccaagcccgtgagcatcgacgtgcccgccatccccttcgacgagctcaagaagatcaccaacaacttcagcgaccgcgccctcatcggcgagggctcctacggccgcgtctacaacgccaccctcagcgacggccgcgccgccgtcatcaagaagctcgacaccaacgcctcgcaagactccgacaccgacttcgccgcgcaggtgcggacgcatgccattgccatgcctgcctcctcacgtcatcatcatctccctcttcctctcgtttcttaacgttgcctgctcgatcgtctcccatctccatgactcccatcctacagatagcgatggtctccaagctcaagaacgagtatttcctggagctcttggggtactgcttggaggacggcacccgcatgctagcctaccagtttgccacaatgggttctttgcataacatactacacggtgacgatccatgcatctcttctacggccggccggcggcgacattgcaagcatcatggaacgatcgattgattctggcattgctttgtttgtgtgcagggaagaaaggagttcagggtgcggagccaggccccgtgctcaactgggctcagcgagtgaagatagcttacggagcagcaagagggctagagtacctccacgagaaggtccagccgtcgatcgttcaccgagacatccggtccagcaacgtcctcatattcgacgatttcagctccaagatcgctgatttcaacctcaccaaccaggggaccgacaccgccgcacggttgcactccactcgtgtgctagggacttttggataccatgccccagagtaagaatgatccatgaagaacaatgtggcatcacaaactgtgcaactactgcattgttttgcttttgtagcattagccttcttactgttggtaatctgaaccattttctcagatacgctatgacaggccagatcaaccaaaagagcgatgtctacagcttcggcgtgatccttctagagttgctgaccggaaggaagccggtcgatcacaccatgccgaaaggccaacaaagtcttgttacttgggtaatgcgatttgttcaatttcgtttcctttctgaaactcatcatgatatgcaaatgccaataatctcctgactgacaatgtcgtatgcaatcgtgtgagtaggccactccaaggttgagtgaagataaagtgaagcagtgtgttgatccgaagctcaacagtgactaccctccaaaggctgttgcaaaggtaaacaaagcaagaaaaagttcttgcgctatgcatgtttccaggaacttttcagcagtttgccggatatgctacagggacttactggcattttctgaattttcagctggcagcagttgcagcgttgtgcgttcagtacgaatccgatttccgaccaaacatgaccatcgtggtgaaggcgatcacgcctcttctaaatgcacccaaaccagccgctccagcagcagcaccacaatcctgatcaaccagatgacagaattagcctgctcatatctgactcctgaacacgatcgtagaagtatgttaaggaaccacgcatccttgctccatcgatccagcgcctatgcttttgtaaaaaccactaatctgctggtactgcaggacacatataggggaattttgtaaaatgttaatccagtactctgaattcgtgtgcttttttgtttgtcttgtgatataacatgtgcagttttagaaagtacacatgttgtttccagctagaaaggtagacataacctcaaaattctttttaataattcacataaagtgatgctgaacaaaagcttgctaattatgtgctaacgattggtgttgcgaataatatatatatgcaaatttccttttgtcacgcttacaacttgatatgtttgctgttttttcctcctaaataaggcttgacaagcattgcatgacacacaccttgattctaagtgtggtcatggagatgactgcgagttccca

SEQ ID NO: 4483 - DNA, 5135 bp, Sorghum bicolor
attgaacgcaaccatgatggtatcagtgctaaaaagggaccctctggaacacgacaaattaaaacaagttcttgcagcttggattggaagcgttgatctgtttgaagatcttgttgttcctggtcatctagatagcctagctcatcaggatgagaatctccataaagaaaattggtggttgattttggcccttaagttctccaaattagaaaagaggtctctgcttgaatccacattcaggtgaatagacctccagcattcctgcatgaaagtgcatcaaaggaacaaatgttccaccattccttcaacgtgttcattgcaaaggacacaattgtaagtttccatctctattctccttcttctaagcggaactttggtgcttaatctgtcttttagcaacaatcaaaaaaatgacatggtgtttgttctaacatgaactcttcaaaatctatttgaaggctgggtggatgaggtagtatccactaagctattcataggcttttcttgaggagaagcttttagaaccccaagaatatgtccattgttcaaatgattgagaaacctatgttgcctctaagaaattctgcagatgattgagctaggaaagagcttccaccaagagtggcaggtgaaatagatcatgaaggctagagatgcttttaccttagcaaaggtaatgagtttcttccttgagaaaaaagtataatttagaaaaactgaacttgggcaccattccattccaaaggtcgtcctagaacaagaaagattttccatcctatatgatgacactggccaaaccagtaaacttgtcaagcaattttacaatgtctcgctaccaaaaggaatctttatctgcagttggtggcagccttccattctgatagtattttccctaaattagattaacccgtagcaagccttctctattaagatatttatggagaaatttgagaagcggagcttcattttgtgctcttagatttaggacccctagacctccatggttcattcttgtccctgcaaaccatgggctaggcaacttttgcctatttatttgaatttgggtcagcacctctccggagaccgtgcttcctatatttgtctatctgatccagcactgtaatatgaagcttgaaggtacacattgagaaggctacaatcatagagttagtgagttggagcgttccagcctggttgagaagtaggaaagtggcaatgagtctcctctcacattataacaagagagatgtaaacagagaagagtaaggtaaggtgggattgattggcagaaaataaatgtgggagagaaaaatttcaaatattaaaattgatatgctctccttatgtgttactattaaagtagttttttcgcaagtttaggggatagtctacttgtgtatattccgaactggcctgttatttcagcaatgtattacaagatcacgtcatgttggacggaatcattaaaatagtgacataatatactagcaaggtaagttttttttatgattgaggccttgtttagttttcaaaaaatttcaagattactcgtcacatcgaatttttggacacatgtatgaagcactaaatatagataaaaaataactaattgtatagtttatctgtaatttgtaaaataaatcttttaaatttagttagtacataattagacaatagttatcaaatacaaacaaaaatattatagtagctaaagctaaaaaaaattttcacgaaccaaacaagccgcggtaacaaatggcgccggtaaaaactagcagcgttgtgttgtgagctctcgctcacggagcggaaggtccagaagccaaaactgggccgccggaagcgccaaagcgggccaggccgccgtcaggtccaggaagtccactccgcgtagtgtagcggtgtacgccgttcgtacgcaaagtcgtccgcctctggctctgcctctgatccctcctacctctcctggattccaccaacccgtgtccactgtccacccaccggtcaccacctcgccggcccgcccctctccgtgccgtcctcagcattcgcccgctccaccttgcgtgcctgcctctactacctgctgacacgccgccggcgggtcgtcctcgcccgacgccacggggctaccccgggaaccaggatcgtctgccgctgtctgctcgccccttcctgctcctccagctccatcggagatccgtcctggcgtttcctcccggtaagcccgaccacggtcagcagctcagcattgaatcgtcgcctgattcatggaaaaggagttctgggtcccgcgcggatcatctattaatttgtaatttattctggaatcgatgaattagccgttttgtttaggtttgggcagaacatgtgccgtgcgctgtcaaattcgagccttctgctattattagatggctcatgaattttaggaccgtcggtggattttcattttctttgggggagatggggattttgaagtcaaattcatggtcctgcttgagattttttttgggttagtgtccctacataggggtagagataggcgataagatgaagtatatatgctattgatagtttttcttactttaatgttgcccaagctaacattccatatgattacaatctcattcctggttattggtgtgtgtggaatttccacttattgtctgagtaatgaccaatagagttggagcctagggcccatgatgccagtgggaaatctgtgaatacacattgtgtggcagtgatgttgactttctcaaaaacttggttgcaggatgtgttcattttcaagtatttgctcagctctgttagaaatccattttatggtgctttgaaatgtttgtggcatattaatcacatttttagacttgtgctctgtcactatatatctcggacttatattgaagctcatagagttcctattttcaattccagtttcagcacctattgatggattagagatgtaagactgcttcaactatttggtttgaagaaaacaagttcagatgggctccattctaagtgcggcaaatactacggctaagtctatggatcatcatgagacatctgggacatatcctaataagagggtgaaggtatctacttatgagtatgggtcaaacccaaggattatcccgactcttcctgatgagatctcactccagattctggcaaggttaccacggattcattaccttaacttgaagatggtttctcaagcttggaaggcagcaatcattggttctgaactttcccagctgaggaaagagcttggcgtaagtgaagaatggttgtatgtactgacaaaggttgaggcaaacaaactccattggtatgccctcgatccagtgtttcagaaatggcagaggttgccaccgatgccttctttcgtcaatgaggaggaatccaataggacggcatcttctgggttccggatgtggaatgttgtgggatcaagcattaagattgctgatttcgtgaggggcttgttttggcgcaggaacagtttggaccagatgcccttttgtggttgttcagtgggtgttgctgatggttacttgtatgtcattggggggttttccaaagctgttgccctgaattgcgtttggagatacgacccttttctcaatttgtggcaggaagtgagcccaatgatcactgggcgggctttctgcaaggcaacatttttgaatggcaagttatatgtggttggtggagtcagtaggggtcggaatggcctgcttcctctgcgttcagctgaggcgtttgatcccaaaactggactgtggagtgagctaccagaaatgcctttcgcaaaagcgcaggtactccccacagccttcttggtcgatgtgctgaagcctatcgccacagggatggcaccctacaacgggaagctgtatgttcctcagagcttgtactcatggccgttcttttttgacattggaggtgagatctatgacccagacctgaatgcttggtcaacgatgcctgatggtctcggcgacggatggccagcaagacaggcaggcacgaaattgggtattgtgatcgatgacaaactttacaccctggagccttccggctctttggacagtggtcagataaaaagatacaactccgaagaggacacatgggtaactatcttgccacaagtcccggttaatgacttcactgatgcagaggccccttatttactcgccggtctccatggaaggctccatgttataacaaaggcggcaaacaacactcttcaagttatgcaggctgtagtacagaataactcggataacgcggtatctggagaaaatgtggtatggaccactgtggcttctaggaactttgggacggctgagcttgtcagctgccaggttctagatgtttaaaatgtgggtcacaagttacactttgtagagcatatagtatatcatagaccatcgttttaaccaacaaatatatagttttttttcccttttgtctgtgtgtgtgtggagcaagcgtttaatttgatgtggagagagatcaattacagatatgtgtaactgtataagttaactcagttgctgggagtctgggacacagtgtgtatagacatacatcgacatgttaatgtacagtgatcaattttagtttcattttaacatgtttctgatcctgaactttctgggagatccttttaacatattgtatacatagcttatccaagtatccatgccaacatgtggcagaatccccctgtgacttccggttccagcttaactttcgcttgagcttatcatccgaatttacccagcgtttttctctcacaacaaatcaaccaatagtactttctaccatggtttatcagtcaaatgagttgatgtcgacccgtaatgtccggcaagcatgagagcatggtgtgcacacagatccggatctgccagcaagcatggcgttagaaagtgccaattcttccattcattctctgacgagcaaagcaagccgcgtcagctgtctcaacgtgcgtaccaaatgcaacggacggccggcacttgtcgcttgttcactctggctggtcggtgcaatggaagtccacgcgcacgcagcgtcagcagaaaattgggggcgaattgctctcggttgccggcgttgtg

SEQ ID NO: 4484 - DNA, 6871 bp, Sorghum bicolor
aatacaatatatatgactatacagatacaaatatagatatagttatattctcattatttttcaattgtaagtcgtttggcttttttagacacatagtttttgctacgtatctagacagatggacctataaaagctataataacttacattttgaatggatagagtagatattatagactagtagatgtgtccacactttgtaatgggatgtataatttgttgtgcggacacttggatgatttgattcaaacaatcgtcatatgtaatggcggatccaaagggggggctgggtgggctccacccccctataagtatgatttgtccattagattagggttaattagccttaaatttttattaatctctagctttaacccaataagtttactatttagccccccttggccttcatcctggatccgccactgtcataagtttcaatatgttctgtaattaaacatcatactgtcacgacatgtcttggaattgagcatcgtatcttcgttggaagcatggaccataagtctagttcatatatataacgtggagaggtgtgatagcactgtgagaagtaaaaaagacgaacatttatctctgtaggacctgcttgcttagtttctttggagtttttagaccttttgagaagctataaaagctctcggaagccaaaagccacagtgagtttttaggcttttggcttatacgagttgttaggcttttgaaaaatgcaaaagttagtagtctaaaaatgacaaaaagcttggacaaacatgaccttaatatttagaaaaaataaaggtatagatattactccgcttcaaattgtaatttttctttatttttaaatatgttgtttttctatcatctagatatacattatatctagatatataatataatatagaaatctaaaaatattaaaataacttgtataattcagaaaaagagagcagctagatgtagacacattctttggatcctaggcaccgcctagggcctagatggatttgggccgaataagcatgttgaagaatggtgagtttggaatggagggaagaaagagaggaaagggaaaggataaggccgtgtttagtttgtggacgaaaagatttcgcgacactgtaacacttttgtttgtttgtggtaattattgtccaattatggtctaactaagcttaaaagattcgtctcgtaaatttcgaccaaactatgtaattagtttttatttttgtatatatttaatactccatgcatgcgtctaaagattcgatgtgacaaggaatcttgaaaaattttaggattttggatggaagtaaataagacctaaggctgtgctgatgctaggtgttccaaaaggaaacgtgccgtgttcatttttttttaacgaacacgtggcgtgttcattggttggtaatagcacattaagcataatttattggatggatatatatgttaaaaaagtttttaacacggtaatataaatcagtaaatggaaaacttaaccgggccttgtttagtggattttgctactatagcactttcatttttatttgacaaatgttgtctaattatgaactaactaggatcaaaagattcgtctcgcgatttacagacaatctgtgtaattagtttttattttcgtctatatttaatgtttcatgcatgtgtcacaagattcgatatgacagagaatcttgaaaactttttggatttcggagtgaactcaaccaggcccgggtgtccaattggttcgttcctactctatacacacgggtacacggctacaccgtcactcatgtggccgaacgcagcaacgccgcggcgcacccgatccttagggttagggttttagaaaaccccccgctgggagtggacagtcccgctcccgcacggatccgacggcccggcccacccgaagccgacccaacactccacgagcgcgaatctcagcaccgccctctataatagagcaggcgcgggcctcgcggccttctccccagctccgcctcccttcccaccctcctccctctcccggctcgcgcaggcaggcaggccaggtgcaggcgacacagcgagaggctaaaaccctagcgcgaggaggcgagccggctcagcgatgacggcaccggcggacaagggcaagaaggccaagaccgaggccgacggcggcgaggagaacgagcagatcgacggcgccctcgtcctctccatcgagaagctccaggagatccaggacgagctcgagaaggtcagccgcgagcctcttctcccgctctctgggctatttttgggcttatccttcgtgggtcgcggtgggttgtgcgtggtcggtactgttggatttggtagtggggtttgggtaggagcgtaactgcgtaaggtcgtggaacttcggaagaaaaccgcggcggttgtggtatgcgggaattttccggcactgagcagtatacggttcggttgttgctagttttgttcgggcactgtgccaattgtgtaccaattgtgccgctggaggttggaggatggaattctagtgatagtctctagctggagagtaggaggcttctgtcctggctgatacgtaaggttgttctggcgggctgaagttagtaacttttgttatagtgcagaatttttatatagcgttagaaaacatgttagtttatccacaacatttggtaggtgattttgatgtggatactgtggaacttttgatgctcgaggcagggtgttcctttgaaaaattttgtgctgcctttataaccaaaattaagctacacagatgagatcatttgttcaaaaacacttgctcccttatctcatttgttcattgcacgccctgatactccacgtcattcagccatggcatgcatatgaggcaattttttgttgaaaagggatgtttttttaagacaagtggatcattggttcggaacatgtactatttactatggaagtgttgtgaatgaaaccataatgctgtcatgcctatggtatctttgttcattgctgacaggtaaatgaggaagcaagtgacaaggttatggaggtggagcagaaatatagtgagattcgcagacctgtctatctcaagaggggtgacattatcaagaccatcccagacttttggctcacagcggttcgtagcctactctgtgctatacaaatgggtctttctgttggaactgtttgtggatacatgtgattctaatctatttgtgttatgtgctgttaccctgcagtttttgagccatcctctactaagtgagcttctgactgaagaggatcagaaggtattccctacccaacaatttactacccaatcccttgaaattatgaatattgaattggaaagcaaaagaaactttttgaagtaaaaccaacgttgtggttattcttctggatctatgtatgtatgtaacatagagttatcttatgatctcttgttgcagatattcaagtacttggactcagttgatgtggatgattctgatgttaaggcaggatactccattcatcttgtaagtttcatttcttacaatctattatagttcccacattggttcacttgtatttacttgtttaattttaaaaaactggcagaacttctctgagaacccatactttgaagacacaaagcttacaaagatctattccttcgctgatgatggaacaaccacaataaaagcttctcagattaagtggaaggaaggaatggtactgttatgttccaaaactacacataatgcctgttttagatgtagaaagtctaatgctttttcaataatgtataatgtatgtgaagggacctgcaaatggaaatggtcttaacaagaaggggagcaagcggccattagtagaggaaaggttggttattaataccatgtttattgtttcttttggtttacccttgttaggttgtcaagttgtctatgctgtcatttttgtttatagtcttctgtgatgctatttttttgcctgtatatgccatggttgatatagttcaagattttgtctagtgtgaccttatgcattaagttgtcacattgttatgattataattatattgacctgcctttgaagtgttattatctttcagcaggatatgtaatcacacttttttgttatgtattatttcttactacatactgaggtattgccacaatattattattgtgaccaatggacaaccagtggattgattaagcagtctgtttctctctcatttgttgctataacacatatggtttgcattgattaatgtagaccccttcccatggttcgaggtcactggctttcaaataatcctgctgtatccaaatgtatgaccttttggaagcagtgcattcaattttaacgaacatagcatgaacatacatttattctggaagtatacaactacacaagtaggtctggcatccaaatgtacttccattctattgtgctcttgtagttgctaaccaatgtgaacttagcagtcagttcaaggttcttaaggaggtaaaacgaggcatgccaaatttggtgtgcgttgtcatcaggggtggtaccttgggtcaagggtgtacaaatgtacacctgatttttttgggcatgaagtatttaacatagaatgtataatacatgtgtactatgatattttggttaaattacatgtttgagaccaaaatcacgaaatcacacgtcatataattccttgaatcgaggttacctttctcaagatagattttccccttacatttttcttctaatatatagattttaaagtcatttcaggctcttgaaatcctgtgcatgccaccgcttgtcgtctagttaattgcttagccaatctggatacatgttcccttgtggtcaacgagatattccattgttatctagcgcttgagaaaccgaagtcgatattctcttggaaaccataccaaaatggcataaattcatagaaaatgtgcatctcttggcgtgaaccttgtcccatgctcacaatcttttgcctctagacacgtatgcttgcggtctcttgtctttttattgacttgcatgctaacagtcttatttatgacttgaataccttttggattcccatgtatccctcaatccatgtttattggtgtggtttggtgtggaatttagtttccatatgttacctgcaaaccagttcttaaaaagatactgtagttagtaactttctgtgaacttcttatcagattattctgaagacttttattgattattgcaaaagctttcttgcctatcatcagtgtgttgtcatttatgctttcagttacactgaaaatcagaaaggtaacaccttatttcgtttttccttgcagttttttcacctggtttggtgatacagagctcaagagtcttgctgatggtgtgcaagatgaggtaaaaactcatgtcactctttcttgacagcgttattcacattgtcaccaaactgcactactcaactaacttgcccagtatttgttgattgatattgaattattttttaatactttttttttgtaaactgagaataccaagcaaaatgttatcctataatttttgtaagtacttattttgtttatctgatcaactggcaatccgttccatgtgtttgttttagaaggccaggagttgcatacttgttttattcctttgtgagagttttctgagatttcaaattgtgcaggtggcggagatcatcaaggaagacttgtggcctaatcctttgaagtacttcaacaatgtcagtattgttgcctatatttatcttgaatctttttatctggtccttaccttgtttgcctacatttatcttgaaaatatttttttatctggtacttaccttctctctctccaggaggttgaagatgaattcgaaggagatgaagatgatgatgatgtaagcttattatcttgttcgctttatgttttcttgcaattttaaacaaaaagcagtgattccctgacaaactgggctaacaacattgtagcatgacaacatattttttgagcatagggcaattactactatggcttctagatttatgtgtctgttttgttgatcaagtttcccttcgtttgatggcatcttgtggtttgcagttggatgaagatgatgacgacgatgacggtggcgaggagaactgagaccagtggtgcttggatcagaatgttctctgaatctcattagctgtttggtggaaggtgtggctgggcggaaggaattgtgggaccctttttgggagatttttttttttgggttgtttgacttagctggaactcaccgtagggaactgtttaatgccttctgaagtcaaccaacttgaaaggagactgctatatcataatctgggtatatctatcaacgcaatttgacatgcttatgctggtgattcgcgtttgttgctgcaatctttgcttgatccgatgatttggttttctgagccggtcggctggctttggcttctgcagatgaaattggtatgttgtctgtgtcgcaaaagtcgcgtttagttcctatttttttagtttgctataatttatgtgacaaattttttgagcctcttgccaaatacaaagtgccatagtatctaaaaccttttcgtatagggccttgtttagttttctaaaaattttgcaaaatttttcagattctccgtcacatcgaatctttagacgtatgcatggagtattaaatatagataaaaataaaaactaattgcacagtttagtcggaattgacgagacgaatattttgagtctagttagtccatgattgaacaatatttgtcaaatacaaacgaaattgctacagtgctcgttttgtcaaaaattttggaactaaacaaggcccaactaaacaatgcctaaatga

SEQ ID NO: 4485 - DNA, 3204 bp, Sorghum bicolor
aatacttcatacatagtggcggacctacagggtatgccggtaggtccacggcataccctgggatctggccgtaataagtacgtatacatatgtatatgggaaaaaaacttacgtatctaatcttaccagcttgttaacgaggaagtttcgcctggccacataatacacacagtcgatagcaagcatcaaggggcagaccaatacggcgagtcgacgcctaaagcctaatcatagattcccacgacaatcatcccagtgtgtggtttcaaaccgtcgtgatgtcaagtgctcgactcgctgcggctgagacatgggcgatcggcggcggctagcttaacgtccaaacaccgatctcgcgacaccaagcgagaggccaagcacggttttgcgatgccccatggccagtggagccaagcgttgtggaggccagaaactggcaagcggcaagaggtttgcactttggcacaataatcctctcttgtttatatcttccttttgctacacagaaaggttggagaatttatcacaactcacctatccagttatctatttcttcatgtgctgcttattgatcgcttttgttacatagaaaatatatatttggtccttttagttagtcgtctgcaagctgatgcaagatattatacttaaaaattggatctgcaagccaacgcatgaagcgctaaaactatttattagaatactcatcacaggtgaaacctggaaactagagtctgagcttataggctctgctgaccacttacggtatactcctcggcgttcaaatggttttagaggcacatccataattttttttgtttgagaatacggaagtctactggttgatggattatctggcacacaccagcaaatccataataaagattataccaaattgtatgaaaaaaaataatggcataccctgagtaaaaattctaggtccgccactgttcatacatatgccgcaaaattcgatgtgacagaaaatcttataaagttttgagtttttagatgtacctaaacaaggccacgtatagctaagcaacgacggcaccaagggtgtgtcagatcacgcacggcgtggatggaataattaagcaaagctgtagcttaattacattattttgctggggtgttgcgttgcgtgcgagacgggcgcgcgtcaagaataatccttctagctagctacgacagtactcagagatgacgtacgtacccgtcaaccacgcacgtcagtcaagtcgatagacatatatcgatgagccgtgtgccgatcagtcgtactcgtacggagtatctctacgtagcactgaaactgaccgatgagccacacacccgtacgtacgtgcgtccatgccccaaccccaatgcaacccaagggacacggatcacaccatgcatgcatgattagccttgcattgatcggtactgcagaatggaatcgcctgggatgatgggatcgtcatcggatcggatcatccatttttctccgcccagtagtccatgtccacgtacgacgtcgtctttcttctcggcgttggatcgctgacctgattcctcgccatggccatcgccatcgccgtcgcccatcgatttggccgccgccgggggtccgacgaccgtgacaaccttgagcttgagcaccaaggatcgctgcgctggagaccgcttcctagtttggccgccaagtcgtcctactctactcgttcagcagctctcactgtctacttattaagcggccggactgctaaattgtgccgctagtgtgctgggctccaaagtctgaagcctgatcgaacacggtttccctttgtcttatcgcgtttggtacagtgaccacagcggccaggtcataaacaatacaatacgtacggcgtagctcatctcccgttggggagctccgttgtgtcgtctgtatacctaagcgccggcccggcgggtcccgtcggctatatataattgggacgctcgctgctctgctctcaccacagactactactgcttcgagtcacgacccacggacagtcgatcggatcgatctcccctccaaatcattccaagctagcgagcctcttcgtccatcagcgcaccgggcgttctctgaaactccaaatcttggattaaatcatcagccatggccaaggtacctgcatgcatcagcttcttcctcgctttgcgctctgctctgctctgctcctagttcgttccagctcaaagcactaacgaacactactgctggtgaattccctccctgactctccgcagcaaaagatcgtgatcaaggtgccgatgtcgagcgacaagtcgcggtccaaggccatggcgctggtggcggcggcgggcggggtacactcggtggccatcgccggcgacggcaaggaccaggtcgtcgtcgtcggcgagggcgtcgactccatcaagctcaccaccgacctgcgcaagaagatgggcgacgcgcagctcgtcgaggtcggagaggacaagaagaaggaggagaagacgaagcccgaccccgtcgccgacgctgtggcagcctactacaacagccagtactactaccactacccgccgccgccgccggcggtcgccgtcgcctacgacccctactcgcggccgggcagcacctgctccataatgtagactactacagcctgtgcatatgtctctaatttaattaatgaaaagggaaggccatgtgttgtgtaatcgttgtgaagagtatccgtatgagaactgatcaaccgtcagcgtatccgtcaggttataacccgcgcacctcgatttgctcatccgaccgagccagccgcacacacaacgacaatcgcggcctttctatcatgacttatcagacgaacgaataagatggacaatcacgactactatatggtagtagacgacacacttttatggagcaccaaaagaggtcgatctaacacagctaaagctggacaattctagcaaaaaaagaccttatattataatttgagatggacaatcctaacacaatcaaaattggacaatcctaacaaaaaatcctaccacaatagcagcggcttaacaggaggttacttgggaagctcgtgaatcagcggagagtccctcttacgtatgaaattgttgataaagctgtcgaggcatcatttgacagagccgttgttgtccatcgcctggaaagtaaccccctggtggtgaactgggagggca

SEQ ID NO: 4486 - DNA, 3323 bp, Sorghum bicolor
aagttttatatgccacgtggagaggttgaggagacgatttctcttgtgtcccctaattttttagtgatgttaacatcaacaaaagtcacatctcccttaataatgacaagtcagaattgggccggtgtaattaacttattgttgacatcttaagagaagggggtagttagttccaagattatttttttgagcgaaacaggagaaacccaaggggcctctactataaaatatattaaagaaaaaaatgtccaaaacaacaatgtaatcaaggggattacagaaaaaaactcaagctacaaccctaggaccttcctagagaagtttaagaaacaaaaaaggaaacaaagaaaattaacagaattacacaaggtgatctatccataactcaattgctgggaaatacttcttcttagctctccacaggagttgtctgaagatttctttaaaacccgttaaacctctgagggagttgacttgaattcctctaaagatgaaatcatttcttaaaccccaaatgcaccaacacatgatgatgatgatctccataacacaattaggactgctgatcactgttaagttaatgaggctccagcaatctcttgccacgctgcactcaagaaagaggtgtgcaattgtttcttcaacgctgcaatcataggagggcaaaaacatatttttccttttcagcagatttcttgtgcttaacctgtcctgaaccaagtcacaaaaaaaaaacatgtcctgaaccaacaaccaaaagaaaaccttgtgcttgggttcacaagacgacttccaaatccatttaaaaattggatccacctccggatgaccaataagatgctgatagactgactttgaagaaaaaaagaagtttctccagatataagtccaagagtcatggtcatcgttcttgggcggagagctaataatttgtaggacctcttgaaactgttgaaaagcttgcacagacagtggtagattgaaaactttggataacggatcagctctaatagcatttttgagggtttgcttcaataacaatacaaagactgccgttttgcatataatagaaaaaaaataggcatggtaatgaagttaacttcagccatcgccgtaaaggacatggtataggcgcgaggctacctcggtacgacggtacctccaagatctctcttgtttgaacgcttcctcatccctcgacagacaaattcagcagagacgatatcttatccagatgaggacaggaataatggagctgccccaatcgctcgatcgatccggactccggagaaatactgtacttatttatcctattgcctgcctgcgtgtctatccaacaagggccttgtttagttaaccctaaaaatcaaaaactttttaagattctccgtcatattgaatcttgcggcatatgcatagagcactaaatatagacgaaaataaaaactaattgcacagtttacctataaatcgcgagatgaatttttaaatctagttactctttgattggacaatgtttatccaataaaaacgaaactgctacaattccgaaaaccaaaaagtttttggaaataacaaggccttgatgtaactggagcgtatggtctgtataaacaaattgcaatgttaattaatgcacacatccatgagtcaaacttggcatgcatgtatgtttcttccgccgagcaggttttgaatctctatacgtggacaggcagagatcaatggatgatgcagcagcagcagcagcagacatgcatgttgcacgattgcacgcatgcacgttaatgcaatctacctcccaactgctaccgtctcattgatgatcatgtgtacctgcacctcagcgtgcagcatggccggaccccaaacctacacggctgcatgccgatcgacgagaggagagatctcggcagctggccaccgaacctcgctccagtccgcctataaatacgctgagctcgcatgcacagcttcgcatcacactcgcagcgacctttccacagttgtagttcagagagaaagacgacaccgagatcgccgatagcaccaatcatggcgtccaactccaaggcgctcctcgtgttagcgctcctgctcgccgccactttcctcgtcgcctccgctaacgagcaagcccgtgagcgtgagttcattgaatttcatgcagtgcgcactgtagctaatactaattaataagtagtaactagcagggctttcattcaggcaacgaattaattaaaagatagttcgccggatcatatccacccatatatatatacactaattatctgtactatgatgtgttgggttttggcagaggccaaagaggagaagaaggcggaggtccaggactggcacggcggcggcggctacccgggtcgcggcggcggctggcacggcggcggcggcggctaccctggcggacactgccggtggggttgctgcgaccgcgggcactatggcggctgccggtgctgctcgcaccccgaccagataccggagcccatgtaccgccctgagctcgtcgaggtccacaactgatgagttgctgctacgtactatgtccggcgatgggcagcaggcacacgtactacgttcgtcctgtgtagtcaataaaagtttggttccaccaacgtcatgaatgaatgaatgaaataaaataaggtgaacgcatgcatgctttgtgtgcgtagttggaaacatcgatttgcgcggctaatcgattaataatgtactcttctatatcatgcatctcatggaataaatagacttatcattgttgttgtaaaaacacatcgccatagttaaaacatttctcgatctctctgtctatcacgatcaacatagttgatgtaagtacaagaatgcaaaggcgcaaagtaagaaaactatacatctgaatattgataattacaattacagtgtatggctcacacatatatacagtccgaataaggcgtaagagtttgataaaagcccacatagaaaacatagtggaattaggagttttcctcctttcattttttggttggtgtagtatgttctacaaaaatcataacagaaaacaaggatcccgataattcttcaaactctgttgtcctctgcaaaaaggaagaaaatgcaaaataataagggcataaaacaactcacaaggatcaacctccaattcttgacggccgatcaaatgttgggtaggtaatttcgaatcatgacaaacaagctggatgttgaaacccttgcctatgttccttaatttgagcttcagctgagtactgctatgtcaattgtgtgttctccaaatactcttgccaaccaactga

SEQ ID NO: 4487 - DNA, 3949 bp, Sorghum bicolor
cacaatccggcccagatggagaggcattttcgcgtggaccacataaaggatggagccaatgccttgtttaggccttgtttaattcgcaaaaattttcaagattctccgtcacatcgaatccttggtcgcatgcatggagctttaaatatagacgaaaataaaaactaattgcacagtttacctgtaatttgtgagatgaatcttttgagtctagttactctatgattggacaatgtttgttaaataaaaacgaaagtgctttcccacaccaaaaaaatttttacccatcacatcaaatctttggacacatgcataaagtattaaatatagataaaaaataaactaattacacactttagttggaaaatcatgagatgaatcttttaagtctagttactctatgattagcctttcgtgctacagtaacctatatatgctaatgatggattaattaggcttaattaattcgtcacgcagtttccaagcgagttatataattagtttttttattagtatccgatactcctccaacattctacgaaacattcgatgtgacataaaaaaattccgtactccaaggtcttgtttagttccaaaaaatttgcaaaatttttcagatttcccgtcacatcaaatctttagacgcatgcatggagcattacatataaataaaaataaaagaactaattacagagtttacatataaatgaaaataatgaatcttttgaatttatttaatccatgattggacaatatttgtcaaatacaaacgaaaatgtttgtctattttgcaaaaaaaaagaactaaacaaggcccaactaaacaaggcccaagtgaagataggtttttgtggttcacccacggagcagtccaaactccaaaccggctctcggcctctcccggtctccccaaggccaacggtccagaaattcgaaattcacacagacaagcgggatcacgatccgccaaacgcgccgtacaccggccgtgtcgacctctgcggccacccaccatttcaaccgcacgcgcttggtccatacaccggatccattcctgtccgtccatcggtcgcgctccaccacacgaacgtccagatgtgacccggggtccaccaaggataccgtgcacggtacaccggctatctctgcctcgccatttcaaataggtttgaacggacatcccgctccgctcagtagacagaggcggaggagaggcccgtagcccgcccgtagccagtagccatctccatccaggctcaaaccctagggaatctacccagaaatcccaccccaatcagggctgtaccgtatcaagtagccgtcgcggggaccggatcgccgcggctcggggaggagcggagcaaatcgtgaggactcttcgctgttctccgtcggctgtgttcttgcatcttttcgaccggtttggtgatgcggttcttctttgttggttctgttatcgcagatctgtggaagggtaaggattcggaggcgggatcaggagctgagggaacctgttcgaggtgagaatcgtagaggaaacagggggggggggggggggggggggggttcttgcgttgccgggggtgattttcttggttcagcctcggtcgcttttgttctgacgtgtttcacgggttattttgggttcgaatacctgcgaaggatggggaattgaggtcggaatatgagtagagcgactaggatttgcatggttttcttgaagctcttgtctgaacagctctcgtttgcctttcgtctttcttgcaggtgtcctagagtcgtagagatcgcgctgatattgggagaaatcgcggagaggcggaagccgagcaataggtgcgtagattttggtgaataagttgctcacgtgctctctgaattcttcttgccaatttggcagtttcatccgaaaatttatttcgtgcatccaggttgcttggtccatttactgatctgctgattcattgtctggttggttcttgaatcactgtctcaccgatatgcgctatacaaacttctcgcaggactacaagatgcctcaactgaggactgccagcaggccggtgcttgccagaaactctactggtggcatttttatcaggaggagggtggcatcaccgggaggcgccgtcaagccgctggctcgacgggtccgaacacatttcagcaacaaggagaatgtgccacccgtgggtgcagcgagggctaaaccaaagaggagaagccctctacctgactggtacccaaggagcccactccgtgacatcacatcaatcgtaaaggtggacctcgtgtcttaggccaatcaccacccttttgtgttctgtctgcttgaatcttgcaattctcagtttatatagccagcaatataaatgtgcttaaaaccagataaaggtccaatgctccctcgacactcaaaccagctcacttaagagtatacttttatcttacatatgtcaacatatctggtacattactatattagttaagtatacttgaagacttgggccttgtttagttcaccccgaaattcaaaaaatttcaagattccccgtcacatcgaatcttgcggcacatgcatgaagcattaaatatagacgaaaataaaaactaattacacagtttgtttataaatcacgagacgaatcttttgatcctagttagttcatgattggacaatgtttgccacaaacaaaggaaagtgctacagtagcgaaatcccaaattttttcgaaactaaacaaggccttggcaactttctatcgaatgcttggaccttggatataggatcttatttgcagcagcctaccaaacccatgttgcctctcttcctcgcttctgagatgcccattcattgaacatgacataataaattcaacattcatgatgctattcaggatatttgcaacttcagttctgctttatctgtagagtgcgcatattgttcttcagtatacagataaatctagatgcattatgtatcccctgagatatgctgctgtactaattgcaatttacaggctcttgagaaaagaaatcgcctagaggaggatgcggctcgccaacatatccaatggaatgaagattctccacagcctgtggatccaacaactacagtacatgcagagcatagtgatcctgattctcaaagcacacaaactcaagaaacactgggtgttgttgcctctcctggctcaacttcagctgttgcgaacaatgtgacttctgtggctgaggacaagcaagaggcatcttcctctccatcggactgcttgcagatggctccatccaagccaaacgatccatctcctgctgatctggagaagaaaatgtcaagttcaatagagcagattgaaaagatggtgaggcgtcatatgaaggaaactccaaaggctgctcagccttccaagttagttgtccaaaggcgcatactgatgtccatgcgatgagctgaagccttctctgggcatcaatggttctcatatctgctgctttcttagccgccagtcaaaggtttgtctagggacgggggttcctggttctctgcttgaggaccctgtggtaggagagatttctagatcactgcttgagggcatggttatctgttgatacaacttgtcatggtacgcttactgcactacaacttcagttggcttcaccagaaatgaaccactgttgttcacgtcttcttgtttgtgaagtataagagtataagacttcactgcgtagtagtaaggcgtattggatacttgtggaatagatagatagaacaggagcgagttgtaacagcttgagttcttcagttaatataatacttcaattggccttgcttattgttccagatttacttggctgtggttgtgctcatcatattctagattatgagatttttatttccaaaaatgacataggtaatttcatgattattgagttacaatgtgtagtgttt

SEQ ID NO: 4488 - DNA, 4195 bp, Sorghum bicolor
tttcggttccccacaatgagattgataaagttgataaaggtggtctggataaaatgacacttattgaggtataattgcactgagcttctgtatggatacttcacgtgcttcctagtttggtctaaataataatttgtgcttggattgctctatgtaggttggccccaggttctgtttgaatccaatcaaaatatttggtggtagttttggtggtcctacatggtatgagaacccatactacatttcccccaatcaggtatgttaattcaatgttctgatgtcgagtacttctcataagtttgaatatatttgtaggtgctactactactataaaggcaacctaggttaataacttttcatcaagggctactcgctgatactgtgtggccagtttggtttgcacccaggcaaacctgcctggaccaggcagctctcccaccccaggcattggatttccagcgcctggggctgaggtttcctggcaggccaccaaccaaacagccttaattctttcagttttagtgttagaaaaattgtgagccaggtgataaagcacaatttctcccacagaagacagaacacttatatggaagtcatagtgcagttttgaatgaggaattgttggaactatccaagaacgagattttatctaaatttggcactaacgttgtgtttaaggcattgagaattatgcttgcatgtccatatcagtatacagtagaacacagtgcacaccgctaactattttggatgaattgcacttgtggtatacaacactgtgctgtcctgtttccttaagttggagctaagaatgaaaaacatttattacttatgtttggtgcacttgcttcaagttcacagtagtgtgtagttcgttgtagtctaaataattgctcatctgctagtggtgtttatttgaggacttggcattgtctacatctgatattgtcaacaaatcgttttgtgccatgttcaatgtttcttctgacacgtcttttttggtttctatcagatccgtgcactagagaagaggcagaaggcaggcaaatatgccaagaaggtgaaggccaaggtgaggaggaagatgcacgagatggagaacacgctggagcctgatgaatttgctgagctctggaaaggggagtaactgcgctttgatcgagaccctgtcaaagtcctgaacctgaagcaccaggaactcctttcagcaagcgcagattttgtttaccagtgtggcagtgtccatgtcgtggaagttttgtatgacaaggcatacatttatttacataacatcgaatttttgtgatgagataacttctgcccatatgacattcttccgtgtttgcttctactgaatgtggtgccaagtgttgtatcagttccgaattgttctccgagaatcatgaggaagcgcaatcatagttcaaagctcaagatatcaatgcgatttgacagtcatagccgtgttctatatattatcagtaatggtcaaggcagcagcaggccccatttagtgtgactatttttttacatagtgctcgagaaccacttcctagaatttttaccaaaaagaaaactacatttacctctgccttccaaacttcaaacccaaacacgctgaaggcactgtgaagagcctgtttgaaactttgccttacgaacttcaaatccaaacacggtgaaggtactgtcaaggttctgtttggagcgcaaaatattttcagaaattatacttgcagaatatttcacagtaacaaaattatttccttgccttctaaaatggctgtgaactcgtctaaaacgtcacccgcacgagaggcgtatgggcctcaacatttaggcccactactacacgcagaggagcccaagtacctagggtttccacctctacgccgccgcacacacgtataaatgccgtgagcaaaccctcgcctccattcttcgcccgccgccgcccccagtccccgagccgaagcagcgcctcgcaccgctccgatccaatggcgccgacgtcgaagctgtcgatgggcatcaagcgcgcgtcgaggtcgcacgcgtaccaccgccgtgggctgtgggccatcaaggccaagcatggcggcgccttccccaaggcagagaagcccgccgccgccgcggaacccaagttctacccggccgacgacgtcaagccccgcgtccccagcacccgcaagcctaagcccaccaagctcaggtgccgaagccattccttcaagccgcagcccgcgtggtgttcgtgtgtattttgcgtggagatttgattccaatcgcccttcgtttgttcaggtcgagcatcacgcccggtacggtgctgatcctcctcgcggggcgcttcatggggaagagagtggtgttcctcaagcagctcaagtccggcctgctcctcgtctctggtgagccacgcttgctccacttctccctttggtgtggtcctgcggtcggtcgcgccgctgctcctaatcaaagacaactaagccttggtgtcgatctatatctatccgtagttaaaaaatgtgtagtttattcttaatcagtgaaaaattagttgtaaatgtttctgctggttagctcaatctcggaattatattatcagtctgttgttgcatggtgtatatattagcaattggaataatatttgtcttgcagctggacattaacttaggtgaatttttaagtaatctgaatatacattacttgcatagttgaaccgagtttttaaggactccgcatccagtttggactatgtaacctgtatttgtgttctttgatggcactatcacatggttaaaaaatagactgttgtacttgtgcatatataagtttcctttctttgtcagggttcactatctgcattctcatgtctttaaccggctggaaacaattgaatcatatagtttaagtaatgtaaacgaagatttcttggaatgtttggatttataaaagttatttttagttaagttattaaatgattatgtttaccattacaaccctaccgtgcagcttgtatgcctcagttcatgcatgcaaaagagttgtatttttttcctatcctgttctacttgttattgatttcctgtcattagtttctcaacgtttttgttatctttcagggcctttcaagatcaatggagtgccgatccgccgtgtgaaccagacctatgtcattgctacatccaccaaggttgacatctctggtgttgatgtcgcaaagtttgatgacaagtactttgccagggagaagaagcagaaggcgaagaagaccgagggcgagctttttgagacagagaaggaggtaggtgtttgagtaacatgatacgttctttttcgttcatgctccacatagtacttactgtgctaaatatcatttgaatctgcagacatccaagtctctgcctgacttcaagaaggatgaccagaaggctgtggatgctgctctgatcaaggctattgaggctgtcccagagctgaaaacctatcttggcgcccggttctctctcagggatggtgacaagccccatgagatggtcttctaagcttttagttttggagttcggaggaagtcgttttgcctgtgtgctctcttgtacttcagagttttgtaccccgggtagcgaatatttcattctgattgaagtctgcctgtcaaatattatgagaagatctaagaaagttttatccttgttggtggttcggcattgcactatcggcttttgtttctttgggtatgtcagtgttttcttgagttctcattttgtttgaattgctgaatatctggtgattttgctatcattcgagtctcttaacgttcagtctattaaaaaaatattcaccaagtaatgctgccggtcggaaaatattctacaagtagtgccgaaatatgctcataactccacctgctcaattgtatgtttcgccgagctatacagatgcagcagcaagctgcggctggaattgtctcagcaagcgcagccgaagcccgaagtttcaatagtttcacactggctttgtcgtttgcatcatcatgaccgaaaggattgccccgggtatttctggaaaaaattaagcaccggaaagggcaacacagattaaatattataacctataataattttggagaatatatccatgtcatacatggctagattgtttagatggagttggtattctacgaaca

SEQ ID NO: 4489 - DNA, 7394 bp, Sorghum bicolor
  misc_feature (5098)..(5197): n is a, c, g, or t
tggacttgaagtctaaataagacttggagtcttattttttctatctctttctgcaataaatatgctgccacatcagcaaaataccataaataatatgtagttaattgtcttggactctgtgatagagtcttgcattgtgagtgcccttagaacaaggtgaagccattacttcagctccatctcagtctttgaacctttaagccgttatattttaccctatttgatgaaaaacggctcccgaagtcaatgaagaaactccaaatagggtctaatctagcggtgctaccaatatagcggttataacagaaatatgaccatgaacaatagtctagggatgatctgttttttaataaatcaattcctagaatgatttataagtcaaacttttctttaactttaattgagtttctaaaaaggagtgtaaacatttatgacactagattagtattatgagatacatcatagactacatttttataatatactattttagtgtcactattattgtgttttactataaatttagttaatacaaaaaagattaacttaaaagaactcttgaagttgatttacttaggaatggaggaagtgtttgtttatatgtgtttatagagattattgtgcatgcatataaacatccgctatgaaacaagggtagctctagttagattatttattttgataaagttttccgcacctttatttaagttgacttattttcggaaagaacaatgatattcattatgtagcaccgtagtagtaggtgatatgcatatgcttgtcaaatacctactcaatctcttaaagctctactatagtagagtttgtattgtatacctgtattcataatggtaagacatgtgagcatccgtgcgctaactcaaaatatgtttgaacaattttgtgtgttctgcaaaaggccctaatttagtgcccatttggattgcagatcctcccatctatatcttccatgaaaatttgaaccgattcttataaaatattatatgtgtacgggcatttgcaaaatttctgtttttcaaaagcacaggtaaacatatctttttttaacatgaggatcctaagtactcaatttattttaaattataagacattttagttttttagatatatttttctatatatttagacacaatgtattaaaaaaattcaaaacgttcaatctatctatatctcttataaagataaattccactagctatttttcttgccatgcaaagtgtctacactaatatccactagaacattctaccagcacatagcacattcaactatctcaccatacaaagtgtccacatcagcattcactaacacatcaaactatcacataccattatatctttatttaaactattcatattagcaaaccataacgtttactaacatatattgttgcattaccaacatcatacatacacatcttctgattcttagtgattaatattctaacctacttatattttttcttcatacccgcggcaacatgtggggaatcctcctaatataatttgaaacgaactttctccgtctcaaaaataactgtcgttttatgttttcatgtcacaagtttgatgagatctataaaaaataagtacaacgtttttatctccaactaaatttgttaaaaaattagttttaaaaaaactttttaatgatattaattatgtactattagtattaatatttttaatatatatttaattaaaaattttatcgggaaataaaaacaatagttattttggatgatgtgagtaacggatagaagtggacctgaaacttctttatacaaaaggccggtttgcggccgagattggtcgagcccacttgaaggcccaaccgagggagatgtgtcgccactcctttggcgaaccaaccgcttgcggatttcctttgcccagtggcgcgggttcgagaggaaggcgacgccgaaaaccccccttcctctccagcctccaccgcgaggcgtagggtttaggcggggaatggcgggaggaggaggagggggaggcgacgggcgcggagaatcctcgccggcgatcaagccaatcagtaaggcggtggtgcaccgcatctgctctggccaggtcatcttcgacctttcctccgccgtcaaggagctcgtcgagaacagcctcgacgccggcgccacctccgtcgaggtcagcctcaaggcctacggcgaggagtggttcaaggtcgtcgacaacggatgcggcatatctccctctaacttccaggtgagggcggtagctgctccaatgcgtggagtcaccaattccccccatttcgctgctgtagacgttggcaccaattgctagtcgctaaccatgttgctgacactttaataggctctcgctcttaagcaccacacgtcgaagatatcggatttctccgacctcggatctgtggtgaccttcgggttccggggtgaagctctgagctcgctctgcgcgctggggaaactgacggttgagacgaggagcaaggatgagcctgttgcgacccatttggagtttgagcactcgggcgtggtggttagtgagaggaagacggcacggcaggttggaaccacggtgacagtggaaaaattgttctccaccttgccggtccggagcaaggagtttagcaggaacattcggaaggagtatgggaaagtgatctctctgttgaacgtgagtttttatgtttcagtttgtaagttctttttggtatgtttgatgccgaggaacttgccaaatgattaaggtagctgccccctagctttgttactaattcttacatcttacctgtgttaggcttatgccttgatcgccaaaggggtcagattactctgcactaatactgttggaaaaaattcaaaaatggttgtgcttagaactcaaggaagcagttctatgaaagacaatattattactgtatttggtccaaatactttcaaatgtctggagcccttcagtgttaccacctcggatggctgccaaatagagggctttctttcaaaacctggacctggtactggccgcagttcaggagatagacaatttttctatgtgaatggcagacctattgatatgccaaaggtcactaaacttgtcaacgagctatacaaaagttcaaatgcaaagcaatatcctgtggttatcctggatttccgtattccaactacatcctacgatgtgaatgttgcacctgataagagaaaagttttcttctcgtccgagagcttgattctgcagtctttacgtgaagctgttgaaaatctgtactcccctctacaatgcagtttctcagtcaatcacatcaaagatcctgaaaaggaaggggatgctgttactgatgggcataatgaagacacaaatgctatcacaatggcaaatgtttcagcttccaacaatattgatgaagatgaagaaacagacagtgaggaccatgtttccccagagaaccagaaattgccttcttcagtggcaaaggtagccattgaagcaacgtctagagatgcaagccccttgtcaagaggcacagccactcaggctgataaatcatctgcttggcttccatcctttgctatgaccagccaaaaagattgcctaaagaaggaaatagttttgcatcgggaacaaatcgtttcagaactgggcttgctgcaaaatctactcattcaagtaccattcagtcttctcttatgaactttgtatcactaaacaagcggaagcatgaagacgactgcactcttatttctgaaactccagtgctgagaagagggacatgctcagaacaagtgaggagaagtttagaatcaaactttgttacaccagaaaagcagaaccgtgaagatgattgcattatttctgaagctccagtgctgagaagtgggacgtgctctgaactagacaggagaacaagttcagatgttgacttcgcatcaccaaataagcagaagcacgatgacagcacctttatttccgaaaccccagtgttgagaagagggacaaactcagaacaggtgaggggagcaagtttagaagcaaattcagcaccttcattaagctcaagcacgaacaatattcctgagttcaatttacctctggaaacaaactctttaaaacagcatctcccacaatcttttggatctgtgaggacagatgtttcaccacagcattctaaacaacctagtattgtgacccttggggcggaggtatcaggtccatgggatgttcacactacagaatctgatgtggtaggcaaattgtttgctattagatagagtttttgaggcttcaattatatttggacttctgccaataaagtatacgtgttcctgttcttatgttgcttgctcacctttattcttaagtcttctcttgttaaatgctttgcctgctggtcttacatttagagttcatggtgattttcttgtttgtaaattgattaggcatcaccaatctaattttggtattttgtaactcacttattggttttggttatgtaaataataggaatggcttctggaatagtttcttaatttgatatgttatgattcagtatgaagctaactcatagtttttcttgggggtcttttactctttttatcactttatttgtaagattaactgccaaacccttgcaggatgaacatcgtggtcgatgcttttcagcgtctggtgctcctaacaaatattcagaatcacgacatcagaatgcatcggctgatagtcctttgcctgatgctcaggattatgatgatggtgctgtagtatgttatgcacctgtacagtatcccattattcagtttacagttgccgagcttaggagaagaagaaagaatggttatatggtatcccatacaaataaaccatattgtcttgagaaaacaacaaggtaacattcttgctgttaccacaaacaacttctgttatcatcaggatttgtgttattatttttgtaatgtatagtttcactttccttaatgtaggtgctataaagctgcaacactggatattattgtacccttagctgacgaggcaaatcaaattcattagctgcagccaccaatgagttgaacaggcttttcagtaannnnnnnnnnnnnnnnnnnnnnnnnnnnnnnnnnnnnnnnnnnnnnnnnnnnnnnnnnnnnnnnnnnnnnnnnnnnnnnnnnnnnnnnnnnnnnnnnnnncaaaacccttggggggttgttctttccctaattctcaggattaagaagaggggggttttatttttttacccccttgaaaatttcccctttttccatttacagttcccggattttgggaaaaaaaaaaaaaatttttttttgtttccccaaaaaaaaacccaattttttttggaaaaaaaaaaagggtaacttttttgtttttcccaaaaaaaattttttttttcaccgggattggggttttttttttgaaaaggaaagtttccctttccttaaagggggggcaaaaaaagccccacccgggaatttttttttccctttgggggggggggaaaattaaatttttttggcgccccccccaaagggttggcccggtttttccataaaaatttttttgggaaaaaggggggccctaaaaaaaaatttttaaattgggggcccctttttgtaaaggttcccttttttttgaacccgtttttttaagggtttcctttggggaatttttggaaccccccccccccccccccccccagcgccttgcaaaatggtcgcctaggcgggcaaggcgggcgcctaggcgtccaggcggtggcgcattgtcatgcctcacctttacgccttaagaactatgattttatactattaaatgaggttgaaagggatagacactccttccaatgattttgtagaagggaggaagcccaggttggctaacccaccacccacgatactagtaaactcaccgcaggtccctcctcaaattatattgtcaagatatgttggagtacctcctcaaattgtactgtcaagatatgttggagtacgttgatgatttttttttctgtgtcaaatttggacacgttgacagttgccactcagtattgccaaattcttgaaaacttggaaagtagcttacaagaaaactggaaagtgaatttctagaactaaaagattctttttactactgttaagggtaaaatggtcattgatctaatctagggtttggtgagttccacatactacatatatccccgttggggactgttcaatacatataattatccatcctcctctcatcttattcgaatatttataacctattactttatttgcttgatacatattcaatttttaaaagtattgattgcgtgaaatttatacaattattttgtagaactaactatttcatctgttaggttgttgggcaatttaatcttggttttatcattggaaagctcgaccaggatctgtttattgtagatcaggtagcttattgtagtttttcgtggaatgttgtaacaccatcatacaaacccaaatgcgagttgcaacttgcaagatgcattgattgaagttctgtttttgttattagcatgctgctgatgagaagtacaactttgagtgcctttcacagtctacaactttaaacatacagcctcttctccagtaagtaaacgaatccattatttttgcctgctatttctaggcattgaactctaaactttgtgtgttttgaatgtttccaagtatggatccataatgttggcaaaatacttttccataccattagccaaaattgccatatgcctcacttctgttgggtatttgtgggtatatctaaatgcaggccactgagacttgatctctcaccagaggaagaagtaattgtttctatgaacatgagcaccatcaggtattgaattgtcttacttcttcaatttgatttgtccgctattaactctaagatcaaacaaaatagtgttgagtatgcgtcttttatgaagatatccagttgattatgtgactagatgtttgttacatctgaaaagaaaaaaaagtacatttgcttgttgaaacaacatcacatttattattttgtagtttgtcttgtaatatttgtccataactcacaactcacatcgtccatgtatagttttttcccctaaaaaatgcaggagatctgcacatcattatattaagaaagagagaaaaaggagtctaagaaaactcatacaagcccaataaggttgcttctagtacagaagggttgccaagaaagaataaaagctacaaccaatggcccatacgccatacccaactcctatggtcaaatgcccatgagatctttggcccttgccatagccatacaccataaatgggcctcatctttaatgttctgtacgacattaagcctaggtga

SEQ ID NO: 4490 - DNA, 5815 bp, Sorghum bicolor
actttagaacagctattccattagctactaaatagagcaagtgctaagtatcggataagtatcatacaagtattgagacttaatttatttatttttattggtgatattatctgatacttctccgatacagtatcagaggcgtaccgatttttgcgaagtatcaagtatcgtagtagagcagtcagcaaatcgtttggaatctcttccctgcagatggacggaccagcaacgcaggcaggccgccaaggaaggactcggataccggcttgtcttcactggtcgcttggtaattcatctcaaggagatggcctgtcaaactaaattccttgcaaattgcaagggagagggattgatgttttctttgccctggaacttcaggtcggagcactggtgctacttgacgctttgtttctaggcgctcaaaggatcggtcctctgcttcaagaaatgcaacctcattgatctccgcagaacgctgctgtagccaaggtagctctgcaaacgcgtccgcttgggtttattgtgtcatcagagacaccaagcatgttgtcctctgtacaagtgtacatgtaaaagttcgcagcagggtcttcgagttgcctttgttgtaggcctgtagcatgaatgaacgtaatttttttatgagtgtatgtgccaagaggagcgcttggcactttgtagctgtttagcacggcaaaaacagaagaaattccttttttgagaggccatgtcttccatcctgcagctgctaggaatcaattcggaatattccttttgagataatggagaatgagatgccagccaacctaaccatggtttacacccaaaccaggggtcgcgcggccgcccaacaacccccgtttcgtacatgtgttactgaccagtgggccgccaacggccagcacaccagtctcgatcgtacatcggtgtagagcaggtcatggctgcacctaaaccggccttgtttagttttaattttttttgacgaaaagagcatggtagcatttttattttttattttataaatattatttaatcatatactaattaaattaaaaagatttatctcgtatattacagacaaattgtataattagttattatttatatttatatttaatactttatacatatgctgcaaaattcgatgtgacggataatttaaaaaaatttgcaaaattttttggaaaaggcccaagcatgtttttttttgcctttggggattaggtctaccagacgaaatacagagacaacaccgagaatggaagagaaattggaaactattatctggcacggcttcatctgtctctaactctttgatcaaggccttgtttagttcaccctgaaatctaaaaagttttcaagattccctgttacatcgaatcttgcggcacatgcatgaaacattaaatataggcaaaaacaaaaactaattacacagtttaaatggaaatcacgagataaatcttttgagcctagttagtccatgattggataatatttgtcaaataaaaacaaaaatgctacagttccgaaatccaaaattttttcggaactaaacaaagcccaaatacatgaatctgtggtgtcagtgtgaaaataggctcttattttattttattattttataaaaattaaaagaaaaatgttaattactccacggaagagaaccgcccggaccgggctctgcccaagtacggaagtacccaagcaaaccgggtgcgctggccggctttggccaaagcatacacaacgagcggacagcggtccacgccacgcccccgcgagagacgcggcaacctctctcaccgatacccctaccaacgcttaaactgacatgtgggccgatgcgtttctctgggcccccggacctactgccaccgaacagcgtcagcgacccagctcgtttttgcgtatacacgagctccgtgtgcccgtgtccgatcccaccgcccaccaccccttcctctcgcctcgccataaagcgcggggagccgctagggttagcgcatcggaatcaatcgtgttcctcatccgcacgcagagaccaatcccccaatccagccgccgccgccgcctccgccgcttcgccttagcctccgctctccggcctcccctccgattcgagggatccgatggagtgcatcgccgagatgccccgcgcgccgctggacagccgcccgcgcaagcggcagcggctcgggtgggacgtcggtcccgccgagatgtaccaggttacgcggccgcggctcggctgggacgtcggccccgccgagatgtatcaggtataacgtcttttgccgtttctgtttttctcatgtggatctatcgttggggatgtcgattttccatgcgcagctcgtctattggtgctgttgttctagggttaagtggtggatctgtagaatagcagtactcgtcgccgtagattgaatcgttttggtgtcgatctgtcatattcctcccagacgctattactattgataggtttaaggggctgatttgttcagcgtatgatgggttaggtttaaggggctgatttgttcagcgtatgatgggtggtaggtgtggttgtgctttttcgggccaatacttaatcgtactgtttattcgttatttgttatactttttgtagttagtaatctgctagtcctattttgtgtttataggtagactttattttacaaagtagattatagttcaatttgtgtagtcactgaaggtgaattaactgtaccattgaagaacttgggaactttctaaattggtattagcaggatgttgtggtgattttgttgctttataatttctcagttagagaatttattggttcttctttccatgttcagctaggactttgtggacaagaagttgtgaatgccatcagtgctgcggcattgggcctctcttcaggatgtgtttcttctcaagttaaccaagagcagcctcgtgatggttcccctcctctgagggaagatgacaaggatgggcattatgtttttgctgttggagataacctcacatctcgctgtaattacctacccttgtcgtctcttgctgtccgtacaaatgtgtttccatggttggttcttatcaattcctttccatttttgcagataagatcattgcaaaaatgggagaaggtcagtttggatggccatgtcttctgaaataattgattaactcgcattgggcatgctgtgcaatacacgcagcaagttatgttcataactgaatgtgtctggaatacatcaggtacctttggtcaggtgttggagtgttgggataaggaaaggaaagaaatggtggctatcaagatcatcaggggcattaagaagtacagagatgctgcaatgattgaaattggcatgcttgagcagcttggtaaatatgatgaaagtagatccaggtgagtctgctggttcagttagcactcgctgtgtgctttacattcataagattgcttgtatatataagctggtctattttgcagttgtgttcaaattcggaactggtttgactatcgtaaccatatctgtattgtaagtacattgttagattatggcaattatgaactgacccaaaaagataaccatgtggtgcttaaacgttggtgaatttggattaatggtgagcaggtctttgagaggcttggaccaagcttatatgattttctgaagaaaaacaattaccgctcattcccaattgccctagttcgggagattgccaaacaactgttggaatgtatagcatgtgtgtgcacagttctttctattacccctcctgcactataatgcatatacattagttttgtgcactatctgtgtgcagcctgtcataatccattactcctgcttatactaaggaatatctaacatcttgggatgtttatgtatttaccctctctgtaatgtgttgcagttatgcatgaattgcgcctcatacacactgatttaaagcctgagaacattctccttgtttctccggagtacattaaagtgcccgattacaaagtatattttgttcttttatttaattcacctgcctaagatttaccttgtgctgtgcttgtttatttctgttgtattgcttagtgaagattgaaaatatggtactgatcctctcttcatttgctaggtttcatctcgatccccaaaggagggatcctattacaagcggttgcccaagtccagtgctatcaaggtgattgattttggtagcactacctatgatcaacaggatcagagttatgtcgtatcgacaaggcactatcgtgctccagaagttattttgggtatccatcgtgtccagtgaaaagcttttcctagttcagcctgatttggtgacattttatgaccgcgtggatcttgtgttcaggacttggatggagttacccttgtgatatctggagtgttggttgtattcttgttgagctttgcacggtatgttattgggcctaggtttgatttggcatgtacaagtacaggggatctgagttaccaaggttctgcagggcgaggcgttattccagactcatgaaaacttggaacatctggctatgatggagagggttctcggacctttgccataccatatgcttaagagggcagagtatgtttcataccaatgtagtctgaacatcagtcctgtgaggtctggtcgttgtcttgtgcttattaatccttgtttgtagtcggcactctgacaaatacatcagaaaaggacgcttgaattggcctgagggttgcacttcacgggagagtatgaaagctgtgatgaaattgtccaggcttcaggtatgtcttagcaatgcttgacaagtatccattctagtcagcatgtgaaacttacgtctatgtttacggcagaatctggtgatgcaaaatgtggatcaggctgcaggagatttcattgaccttttgcaagggctgctcaagtatgattcagcagaccgtttaacagcagaagaggcgttgaggcatcccttcttcaccgaagggtttgggcaaagaagatgatattccttgtagcccatcttcaccgaagggtttggtcttactatttggcagccttcttcaccgaagggtttgggcgaagaagatatattccttgcagagcctaccgtatttgtctgacttgatctctttgtatctgacagtccgtacttggcgttttaactgcccagtggggtatatgtaggcggtagatagaccaatctgtatgtaaagctgtaatgaagttgtttcaatcttatttgaaacatcgtgtaactaaagttgtgtataataaagggaagccaaatgatttgactctataaatcttgacatttgattttggcatgtcaatgaaagtttggtttgagcaaaatgtgctggcatcatatatctattttaagttgttagtgtctcccagaagtgttcggctaaatcgacgtcagttttatggctgtatttcttcaaggtgttatagttgggtgtgtgcgcgattggcactccctctgtaccggaaacgtgacatcctgggcctgtttctgcagtttgcgttggaatgtaaatgaaatgtaaataggtgaatgaatagagtttctcattgatctgtaatgtttatatacctgtacggacgccatgggtaagtgctcgcaggcgccattgccgatttccgcggtcaccagcggattcgggggcacaagcgaggcccctcccccatggcgtgctcaagccggcggggaagcatggccccccatcctcatcggaggaggaccgtgcaccaccatttccgcttggctcggcatggccgttcgggaggctgcgcgccg

SEQ ID NO: 4491 - DNA, 8493 bp, Sorghum bicolor
  misc_feature (657)..(756): n is a, c, g, or t
taggacaacaacatagataacaactaaattgacatttattttttatacacaagaaagctatcttttaaagaacaaagaaaaaataacaaattttaattaccactaggtttctaaccttcactcagtgaatctaattgttagatcaaaaattaatcatggtaataataggaaccaatgagatgagatgagaagataaaatgaagattaatcctaaataaatagatgacactgagataaacgtggagggagaacaaacaaggaaaacactagcaccttttttttgcgaagaacattagcaccatttattaaccaatgtatagaaattatgctccaacatgtacacaacgttaaattcggttctttagatactctataggaaaaagtctacataacccccaaactatctagggtggactacttcaccctccgaactatgaaaccggatattctaccccttgaactttcaaaaccggtcaaataaccccctcgagtggttttggaggtggttttgtctttttcttttttatttatttttgctaaatctttgaaaaatcataataaatcataaaatgaaaattttaattttgttggactcctgatgagttgatctacacaagtgaatatataatatgtatactttaggatgaatagatgctnnnnnnnnnnnnnnnnnnnnnnnnnnnnnnnnnnnnnnnnnnnnnnnnnnnnnnnnnnnnnnnnnnnnnnnnnnnnnnnnnnnnnnnnnnnnnnnnnnnntgggctcattattgtatgcttgaactatggtaaaaatttcatactcattggatcacgtataacttagttataaataaagcatagatttaacaagaataaagctaaataaattgataactaagttatacgtgatccactgggtatgaaacttttaccatagttcaagcatacaataataagcccaccataaaaatttcaccacaattggatcataggaactgcatatatcaattattcgatttaattatagaaaaatatagatttaaagctacaacaaaaactttatactaaagtataccatattatatattcactgtgtagacctactcatcagaagtccaacaaaattgaaattcattttatgatttttctatgatttattaggatttttcaaagatttagcgaaaataaataaaaaagaaaaagacaaaaccaccatccaaaaccactctagggggttatttgaccggttttgaaagttcacggggtagaatatctgattttatagttcgggggtgaagtagtccacccttgataatttgggggttatgtagacttatatggaatatatttcgacagtgaacttatttgttcttttagtaatgtatatttatttttttccaaaagtttggtcgtaactagagaagtttaaattaggataaattttaagtggactataataatttgaaatagagggactaaaatacaatagcgcactgtcggcccagggtaatccactgaccactgttgcaaaacatgggctgcgcagcgcagaagaccatgtgtgcctacggtacgtgattgcaatcttatcatcagccggcgagaggcaaccttttgatccactcgatcggcggcgtcggcgggggcagccggccggggcagccattccagcgagagctgactagcggatcaggtcggccggccccggccgaagagatgcccgtgccccggttccggtcccggtctttccacttgcagttggcagcggcagcggcagcacctaccctaggtaccctagtccagggcgggcgcgcgcggtccccgcgcggcaccccgccacacgccccgagaaccaatcacggctgcctggctcctcacccctcctcgcccggccgctcttttaagcccaccacgcccacttgcagccgcgcgcggcaccaccagtccaccactagctagcctagccacccagttgccgtagttttacgcgtgaacgcacgcgcgcatctgccaaaacccacgtccctcccggccaccgcgcgcgtgcctcgtcgtcggcacgccggcgcgtgcaatcgatctactcccagccgcccaagttcgtggactgggtagtagtagcagctaggggttgtcggcaggcatccttatgaggcgcttcctgccggccggaggcggcggcggcggcggcggggagccgtcgtcttcctcctcctcgggcgggcaacaccagcacggcggcgggctcgcgggcgagagggcggcggcgggcctgcggtaccgaggaggcgacatctcgctggggcacgggcacgacgacggacatcgtcgtcatcagtaccacctcggcgccggcgacgcggcggataggcagaacgacgggtccatggacatgctggcgcggcacagcagctcgccggtcggcttcttctccaacctcgtcatggacaacggtgagcgatcgagccaaccacagttttacgcctgcgcgtccaatcgcctcttaatcaatttccatttccatgtgcttttctttcattttcaccatatctatatagcaattgaattgggggcatgtttttcggccacgaattagtccttcatcatacatgattttagtttaatttggaaccaaacaatttgcattattggctagcaatgcctaataattaataatggcgacattcatccacacccccaactctttcgatcgagaaatggccaattcccctcctgtgtggaggataataatgaagaagcaggccgaaccggcgaaggcagcgtggtcgtttttgttgcattcgtgataggtgccggccgccgcaaaggaaatctactatagctagttagtgcaccggccactggctaaccagtttctgcaacttgttccgtgtcgtgcactgcccagcaactttagctgccggttttggttgattaaagcagggagcaggtaccgaaattttgctagatgaggccaagccagtttttgcaaaaacagatgcgcgggcggctttttgttctggctgctgctgccccttgccatggcccatggaggagagggcagtggcggcatcttttacagtttcatcaacttgccatagtatagttactttagtctgtcttctatgcatttagggcactcccaatgctagaaactacatatagtttctatatgcattaatttttatagacactatatatagaaactatggttccaatggatagtttctatagaatgtttttttacccaatcacattcattctctctccattcttaaccaatcatatcacttcctgtgtagacatggtttctaacttagacccagtttctatgatttttgctctctcttttcaataactcttttgccacatcagcaaaatacttaagtggcactataattaatgtctatagaaaccacgatggtttctgcattgggagtgcccttaagatgccttacattttctgtcacatgtactcatatggtgattgtatgggttaattaacttaattctattcagcatgaaattacagacccttagctattgaacagtagaagaaagtttgcatcaaatctcaaatcacagtatgcatataacatgaaagcaacaggtttttccccctcgtatgttaccttatgcatgtggcctttcggtatatatagacaccctacttacaaattacaagggtatggagaactaaagggttaaatatattgtagcggtggttttctctattgtcgtcccttcgacagtgaaacgtggggtctgagtttttgaaagacacgctttttattctttttacatgtacttttgtattcacatgtctagagtttgtctcattttctaatcctagtagctcattttaattaaagttctgttcgccacttgcacactatgctgatgtgttttgcgtggttgtcttccatttatccattcattaatttggatcagttgttgcaaagtcatttgcatgtataatatgtcctttggtagagaatactatacatatataatcttgaatacatactggccagctaattgagaggagcgtgagattgatcaagaggtttactctttcttttgtccattggcttgtttctccactggaggataagaaaaccatccatttgctgagtttttttagagttaaacatataaataccttgtaggttcttccaacctaacacgtactattgtccttatattaaagtctatatgctaatatttatttcaccttaggccagtctcaatgaaggtttcaacagagtttcataggtattaaatatgctgatgtgacaccgtattaataaagagagagatgataagagtttcacgggagtagggagagtttcatggggatgaaactcttctgcacagttttcaaaatatagatgctttagaaactgagtcatgaagctcccattgagaatgaccttatttgctactgagctatctatacatatatagtgtgatggaaacgctaaactgtacatcatccttaactagagtactatatgtggaaataagaaaattgaatatgtgatagtggaggagcatgattttgatcgatgttgacatccttttggcagattagaaaccatccatgattcatttgacgccggccaaacaactgcagatgtacttaattagttggattggcttatgcaacttcaattttaggatggagggaataggatagtagtaagagcactcacaatacagactctatcatagagtctaaagttatttattacctcgaacaatgtggacttagagtctaaataagacttggagtcttatttttctaccgtacctctttcttcaataaacatgctgccacattagcaaaatatcataaataatatgtaattaattgtcttggactctgtgatagaatcttgcattgtgagtgccctaagtgtgttagtgactggaaaattttgagaggtgtgcgagttgagcgcttgccatctcactagcttggtaagttttgtggtcctctctctttctaattaattaggcagatgaaactcttagttagcagactgttagccattggggacaccctttgagagtatagattgttgtatagtatattttaggtgcctaacttcctatggccatgtacacaatctacattatagttgtctaatgtaataagagatactccttagcaaattaaacaattatatgctagctagagaatcgacttgtgttctctctttgtagcagtaagattttgcttttgcggatatatgactacgtgactacgctattggtgcgagagtgaggcattgttcagttcgaaaaaaagggtgaaaaacggcactgtagcactttcgtttttatttgacaaatattgtccaattatagagtaagtaggctcaaaagattcatctcgcggtttacagatgaactgtgcaaatagtttttgtttttatgtatatttaatgctccatgcatgtgccgtaagattcgatgtgacggggaatcttgaaaaattttgcgaactaaacaaggcctgagattgaggcggatttggatggcatcacgtacgtacggtacatgtcctaccgatgaccaatacttctttcaaaccggtcaatgctacccgatcgaatgaatgcgtcccacatggcagggttgccttcaggtatctctcgagggcccggccgggtcgagttgaacaaacagtctagattctggtctagctagattggccagcagttgtgaattatatgattcttacactaattaatgggggtcttaattagtggctcatcatgaagccctaaccaaggcggccacttgtcttaatcaaatacaggggacaacgcccacttggctgaggccgtgggcccggcgctgtctgcagtccaggttcagctgacggctctaccgtgacgtcaccgcgcgccgttttgcccccaaaatagtagcctatggccttgtttagttcgcaaaatttttcaagattctccgtcacatcaaatcttacggcacatgcatggagcattaaatatagatgaaaacaaaaactatttgcacagttcatctgtaaaccgcgagatgaatcttttgagtctagttactttataattggacaatgtttgtcaaataaaaacgaaagtgctacagtgccgtttttcaccattttttgcgaactgaacaaggcctatatattgcaagttgcaaagtggattggcgctttgtgcgctcctcctaacgtccacgcctgatcttatatatggctgcaaatataaaaatatccatcatattactatttccagaaggccacaagtttgtaaattagctagtagttgccccactggttcagatcatgcattatattatattaaccatcttggcaagttggacagtttttttaatctttcgaaaaagtcgacagtggtttttctaaacaatgcgccgctggttttggttggaatataaactacgaagggtacccacgctcaaataaagccggagtcagtggtggcggcgaaggtcagcgtgatccttcaacggccaacaacaatagtggaagtagcagcagcggccggaagatgaagccgtcgtcgtccgggttcaacttcgccggcgggacgcagcagcagggccagcagcagggcgccgccgggggccacctctcgcggatctccgaggacggctgcgccagcttcccggccggcggcctggtgggcgaccgcgctgcaggtggccgcggctctggcgagagcagcagcggtggtgctgccgcggcggcgcgctcgtactccggcgggttctccattgttgggccgtgggaagagtccagggacatcattaccaccctcggcgcatacgaccctcaggtatgcatggaagactacacattatttacgcataccaaaacccacagctatatacgttgcaatgcacgctctagctagtaagctgctttgattttctttcatttgccaccagtcaccagtgagtgtcgtcgtcgtcgtcccgttctttgtgtttgatggatctgtgtgaatatataatgcatccagtttagcggcgccatggcgggtacggcgctggagatggcgggcatggacaggtacatgcagctgcagcaggaccaggtgccgttcaaagtgcgcgccaagcgcgggtgcgccacgcaccccaggagcatcgccgagagggtgcgtgacgtttgtactagctcgtatatatcccaaaattcctctatcagggtttctcatgtagcaggagcgattatattcacccgtgatttatatatatatggtgcaggagaggaggacgaggatcagcgagaagctcaggaagctccaggacctcgtgcccaacatggacaaggtaactacgagttgttgatctatgaactatatatgacgccttacatgcatacacattttcttagataatgaatgagttattccttctggcttcaacctctttatacaagaggagtcagaccactcggttatagatatatagaagaatgatgacgattgtgcaaatcagttctcccttaggtacagtttgtgtatgtatacctgcatgaggcagcaatatgtatatataactagattactgaacactacggcgaaagaagatttaactgatcagtgatcttgcaatcttgcttatatatgtgtgtgttgactgatgccacagcaaacgagcaccgcggacatgttggaccttgcagttgagcacatcaagggcctgcagagcgaactgcaggtaatgtactacattcctgtgcatgtatacaattatatatgttactgtatgctttttctagagagaatacactgatctgaaaacgaatgcgtttcagtttcgactgatcacatgcgggtattatattattgacagcacacaaattaaaggccattcagtttgatatctttcttgatcgtcctcagggattactacatactgacttagctcctatccgccgcaggctctgaaacacgagcaggagaagtgcacctgctgccgaaagcgatagcgattcacaacagggagggcatagaacacagaaacgcgtccatctttaacggttactgctaccttcaatttccttgatgtgaggaattgtacatggatgaagccatctacatatcttgattgtcgagtccttgttgagagtcctaattttagtgattattagcacacaatgggagtgcattcggcgcggcccatggatggagcgtgcatatgcaattttgcgtgcatagctaccatttccaaagcagtgagatccacatatagtcatgcatggacatctagctaggcaggcagtgccaaaataggcaacccttctgttctgatactttggtttcttcggtttgttgatgttcaacttgaattttagatttccttttaggatatatatctggaaacattttttttttctattattatttatacaagtgcctgattttactttatgttcttaagaataggacattgcttttatgcagaaaatgatgtaattctagttccatc

SEQ ID NO: 4492 - DNA, 8066 bp, Sorghum bicolor
gaactgaacaaggccttaggaaggttagccattaaggacagttccacgaaggaagaaatcattttgatggattaaatgatatgccaacaaagaaaaagttgacatagtctcgcaaacaaaaaagaaaaagttgacatatagcttagttatagtgaagaaagagagaaagttagagaaaacggtttgtgcgtccgagaaagtcaactcgatatcaaagacatcagaaaagagggagttcacaaaagaatataattatagaatatgtatagacaacctagctcaaatttgacaaaatttatagtaaataattaatatttatgtctctatataaatattttataaagatattttatatctaattatgtttattttgtatcatgagtattaatatttttaatataaatatagtcaaagttcaaattgtttataaattttgaaagcgagaattacatttgcatggagggagtagttgataacagcctcggagggccacctactggtactacatccgtccgttaaaaaaaatataattttaggatatagtcaaagtagttcaaatttaaacaagtttatattaaatattattaacatttatgtcttaaaatattttgtctacgaaaatatatttgataactaaattgactgtatttattttgtattaagaatgtttgtatatttttataaatattttgtctatgaaaatatatctaaattgattgtatttattttgtatcaagaatgtttgtatatttttttatataaatttagtcaaaggttaacctatttgactttaaaaaacaagatcttttttttggacagatggagtgctaggcagtactcacgcacaacacattgcggtaagagcactcacaatgcagaaactattgtggtttctatagacattaattacagtgtcacctaagcattttgctgatgtgacaatgtagttattgaagagagagagtaaaaatcatagaaactggatctaagggcacttccaatgctagaaactacatgtagtttctatacatattaatttttatagacactatttatagaaactatgatcccaatggatagtttctgtagaatatttttttatccaatcacatccattctctctccattctcagtcaatcatatcacttcatgtcttggattttgtgtagacatagtttctaacttagacccagtttctatgatttttactctctttcttcaataactctcttgccacaacagcaaaatacttaggtgacactaaaattaatatctatagaaaccacaatggtttctgcattgggagtgctctaagttagaaatcatgtctacacaaaatccaatacatgaagtgatatgattggataagaatggagagagaataaatgtgattggatataaaaatattctatagaaactatccattgagaccatagtttctatatatagtatatatagtgtctatagaaattaatgggtatagaaactatacgtagtttgtatcattggagtgccctaataatgcgcgtactaccaccgttttgttaatcacacacgaattgtcagaagctgtccacaactgcacagcgcgggagcagcagctagcactctggtatggtatcccttcgctttcagacgtggctacctgtgccgcatctcgtatgccaccggctacgttgaccgtaactaatcccatgcatgagatgagcatgccccactgaccagcctctggcctccgctccacctccacttgctctccatccgtccggccgtcccggccgtccctatatataaacgctcccttggctgcctacttgcttgtcccttccattccatcatcacttgcaactagatagctagcttagctcccgatcgagagaactcgccgccgcgcgctccatctctttcgcttcgttcactgcaactttccaagccccggccagctccaggtggatcgatcggagatcaagcgccggcggcggtaaccaccagctcgatcgatgtcgtcgtcgtcgtcgtcgatggactgcgtcgccgcctcaaaggacaaggaggagacgcctccgctcaagtgagtagtactagtagtatctcgttgtgtttgtgtgtgtaaccattagcttcggtcttcgatcgtcgtcggggctcgagagatcaacataacatatcattccttgatctgttgcatgcgtggccggcgcatccagtagcagggcggcggcgtggtggacgggggagacggtggcggtggtgacgggcgcgaaccgcggcatcgggcacgcgctggccgcgcggcttgccgagcagggcctgtgcgttgtggtcacggcgcgggacgaggcgcgcggggaggccgccgcggccgcgctccgcgccagggggccgctccgcggcgccgtgcggttccgccgcctcgacgtcgccgacccggcctccgtcgccgcgttcgcgtcgtgggtgcgcgacgagctcggcggcctcgacatcctggtgagcccctgccctgccctgcctgtccgtccatgcatgtttctttcttttcctcgccctagttcactctaaaaaagatttctcgttatattaaatcttgcggcacatgcatgaagcattatatatagacgaaaacaaaaactaattacacattttacctgtaatttgagagacgaatcttttgattctagttagtctatgattagacaatatttaccacaaacaaacgaaagtgctacactagcgaaatttaaaaaaaattcatatctaaaaaggcctaatttcctcgggtttcgggcatctccttttggcctttcgattcgcgctttgccgttctaggtcaagtagggtttgacttgtcaaggaacaagcactgtattaatgatgcagctagtggatgtgggagctcgacactttggcctgccgtagattgcaatgacaagcattttctttttcgtgcatgtcaaacaaaagtgcttcacaatgtgtgtagtactgtatatgcctataccgagtatataagagcacgaaaaaaatagtcatgtaccattttctttgtcatataaacccaacgtcactaggacttttaaattttagcaatatatattgcggcaatctagcttggctcttttatcacatacggtcttccaaaaaaaaaaaaacaagtcacgctcacgcacacacaattaagttcaaagccaatgtcgtcacgagtccagtcggaggagtatatatacgtagtacgaggtgaagcatggtagtcgtcgctacgcgcagtaacaaccttaccagttcgccgtgtagacgccatgtagccacccgcgactaattttgccctaaaaaaaaagagcccgcgactaatttgtgttctccttcgtgtcggacacgagacaaagtcgaagcccatgaacaacaactcaaaaggtatatatatatatagacatcatcatcatatcctcactaaatttaggataatatatctctcgatcgctagctagcaatcttgtacctgctccaatcggttttgagctcaatagttcttggtctcttgtgaccgccaccggagtattatattaggtgatgatatgctcaagttttattattatgttctaataacgtagcaaatgtttccggccggcggtgtcaaacttctgacttctgagatacataagtagctacccagtctacttggaattcaagaatttcaattcagtcatagaaaacccacagcagaaatcacaaaaatattctgtgtacagtcgtttggaattgaagtcaagtcgcccatttgatcggagatccggcctagcttcatgcttattatatatatacatatatacacatacacgctactagaattctagaaccatatatattatggggtgtatataaatctgctgcatatattggttagaattcgttcaagtaataattaataataaattactatagcactactagtaaaacgtagcacagctcaacttcactagtaaagctgtttttttttaaaatagctttataagcaactttataggtgaagctgaattattttggaaaaagtgtttggtaaaatagcttcaccaactactttatgcataggtaagagagagaaataggggagagaactgcaataagctaatttttttcagcttcatcccaacttatgtcttcatgagagaagaagaaaacaacttcattcataaagctgttttagaaataagtgtttggccaaaaaaacagctcacaacagctcataaacctattgtgagctgtcatgccacacgctaagttgtataaaaagtagctaccgcaaacgcacaagcgagcaaaacaagaaatggacgcacatgccgcaggtttctattttacgcgagcctcacgaactgctcccactatcgcataccatacatacagtatatagaagctaagctttgcccagtgcctagcacgacgatgcaatgcagcctcacagtacgtgcagcacacaatgcaagagctactaaagctgtgttcagattatatagtgtcctgcagtttagtattgcaaagtggcggcagttagttactgcattatggtatccagatcatcacgctctacaatataatccaaagcattgcattattgcactagctagtagtagatggtgtacattactgcattatattacgctggaaccacgcattttaattttcttggtagtcaacacgtacgtgtacaaattaatccgtgttgtgcgcgacatattatactaatataataagcattggtcgaatatgccgttgagatggcagtacttgtgaaaatctgacattctgaaatctgagggcagtcccaatggatagtttcttgagacattttccaagagagaaagaaagcaattaatgtgcaattaatgtgctgtagaaactatccttctcaatgcatagtttctttaataatttctatacaagagataacttaaatgcaacataaaaaaggcatcgatcaactctaacaagcaaccatatagcctgattgctttctgcagatcagatcaaacatctcggagcaaaaaaataacacaggaaactagtatttgctcaagtcttcttcacgtaacaatgcttgtctacacgtatgtgcactctagaaagaagcaaatcaatattgtcctttttgtagtaggcatgcatgcatacaactgatcaaaaaatgatcctgctacgcaagttctgctagtttatccgatggagttggacgagaacatgagcatagcctcctgtagtcacacatattacggccgtatgggcaagccaaagtctgtcgagcaagaacgacacaaacatggtcagttcaccatcggcgactcggcgagcagccaacctagctcgagcctcgaggacacccttcatcattacctcgtccagcactccagcgccttctgccacggccaggcgagacccgaccacgacgatagcaaggaccttccacaggttcacagacaccgcctcgacgcgtgacaaacgctggggcttggtgttatggtgctcgcctctgtggacggcgatgaagctctcacgcacacaagagagaggcggcgctcaccagcggccacgagaagatacagaggaggaggcgccaaagcacgaccaggcgaggaatcacgggagctcgcatggggtggcaacatgggtgcatgcttgcacttcggtgcggcggtggtggagcactcgatctggaaagaatgagatagaaacgactcgagtctctccaatgccgaacgaccggtttcttcccgtcttgattcgcgagtagactcgatttcttgaggaagaaacggtgtcttccttttctaatctctctcctcattaattctattgccatgtcagcaaattgcttagttggcaggataattaaagcacatagaaactaccattaatattccattgggagtgccctgaggctgattttgcatggtgttggttgcacttgcatacacaggtgaacaatgctggggtgtcgttcaacgagatggacaccaactccgtggagcacgcggagacggtgctccggaccaacttctacggggccaagatgctcaccgaggcgctgctgccactcttccgccgctcgcccaccaccagccgcatcctaaacatcagctcccagcttggtcttctcaacgtaagtcgttgctgtcaaacgccttgtttagatcagaaaggtttagaattttgacaccgtagcactttcgtttttatttaacaaacattgttcaattatggagtaactagatttaaaggattcgtctcgcaatttacaggcaaactagacaattagtttttgtttttatctatatttaatgttccatacatgtacctcaaaattcgatgtgacgagaaatattgaaaagtttttgatttttaggtaaactaaacaagcctatatatcttttctgatgcttgtagttgtatgtcaggtcagttgaaactaacacctgcagttgcagagattaattaatgatggcacatgtgtgtgttgacctgaccttagtttatttcttgccggtcaaatcagtcctcaatcacctcaatccattgagatcatttgaacaagcagcaggctggttaattctgttcagaggcatggactacaacgtttgaacgccctattacagagacagcgccacttgatttgccgttgccatggcattggcacatgcataccataccaggcaggcaggcaccagcagttcagaactgcccggtgcccggtgtacagtgtgctgtgtcgtgccagaacgttggcttttacatgttcggcagctactatcctggccatttaaacaactttgagatatgtgcagcaggagagagagtgcaaaacactggaaagaaaagtgctgaatatagaagagagtgtactgcagcacgaatcttaaaacacttttgaatggtaggagataaacacaactgagcagacacatgctacaatacattatcgaccatgtaactgtcgaaactcacaagccatgacatgtctgacccaacctccaacaaagccacatggatgaacgctaacaacacgcagacatatatcagtgcagcgagctagtggcattggatcagatgtcggtttcagacgaattgctaataataataataataatatataccatttgatattggctgttgttgcagaaggtgaaggaccctcagctgcgtcgcatgctcctggacgaggcggcgctgacggagggcgacatcgaggggatggcgtcgcggttcctggcgcaggtggcggacggcacctggcgcgggcgcgggtggcccgaggtgtggacggactacgccgtgtccaagctggcgctcaacgcctactcccgcctgctggcgtcgcggctggcgggccgcggggtgagcgtcaactgcttctgccccgggttcacgcgcaccgacatgacgcgcgggctcggcaagcgcaccgccgaggaggccggccgcgtcgccgcggggctcgcgctgctcccgccccaccacctgcccaccggcgagttcttcaagtggcgcacgccgcagctctactccaagctgtgatcaaagttgccacgcgcgcgtttgcgtgtgtctcgcatctcgcggtcgcggtactggctgcccgggcagctgctgctgcgcgcaccgatcggcgcggcgcgggcggcaggcatgcccgcgtgcgtgcgtgtggtgtgcactgtgcagatcatggtggttgccgtttccgtatgcaaagcatggttccctttttgtttcttactgtagtatttaagatggaaaaaaatggtcgtcttcttgctcgcaaaaaaaaaggagagaacaagtgtacgtctttcacgtgcacatatttataagcgttttttggactgctccgccacatcatttctaagaccttgtttagttctgatttttttgtttgaggtaccgtaatactttcgtttttatttagtaattattgtccaatcatagactaactaggctcaaaagatttatcttgcgatttacaagcaaactatgcaattaatttttgttttcatctatatttaatattttatgca

SEQ ID NO: 4493 - DNA, 5001 bp, Sorghum bicolor
aggctcggacgcgtcacatcatctacacaaagcatcgcagacgctaattcattgcgtaaagctacgtattgttcaaccaagggtgctcacccccgaagaggaatctggcctcccgctccccggtggctccaacaccgccgaaagctgcggggaagccgctgttgcctccgccgcctgcggtggtggcatcctccgccaggccggagtccgcgagcggctgcgggttcgaggacagcagccagatccccagccccgagccggcggccaccgcggccgcggtgaaagccctagagtcgctggccgcctcggcctcagcagcggctgcggagaaggcgcggacgcgggcgcgggagggcccgagccgctcgacggcggatcggaggcgggttaacgcggcagccatggatgtcgggggctagcggcttcgattcgccgaggacggagggaagggaagggaggggggaagcggcgacgcggggacggggacgcacggacgttggcggagcctgccggaatgcgagggaggagggaaggaataggcgattagctggccggctttcttgggcttcccatttttgtgccgtggagacaagacaacccggccagggcctgtccggctttgtagcctcaggcaatatgcaagcaaaaaaaatgttctttttcaatttcctttatttattcaaaaaaaaacacggcttgtatatggcagtggcagtaagctttggcaaaactacatcgagtatttcaaagtcacatgacttcggtaacatttggcgaaccttgctaactccacctggtctaccctgacggagaagccagtgatatctcatgaaaacaatataacagtgttttgtttgtgttctttgttgtcttagcctttcccgctacgaaagtcgatggaaagctactcaaagaacatgtgcatccgaaggattaagtgttccgtgttccgatcccgtggtcctacgtaatgcaacttaaaaagtgcttcatgaaaatccaattaaaattatgaatgaaaacaacatgtgccagtgctagtctattttttgtataaagcttgacattgaacaaacacttaaactatggatatatacatacatacatacacctttatagttcacaacatcttttgtttgacactatttactatttttgctctaaaataatcaaatacaatgtcagatacgtatatcgtatctgacactatttactcacctgctccgccatggttgacattgtatttgatatgtctattattttagcatgaaaatggctccacacagataatattgtgagttgtagaattttgtttcaatccaatccaactcataaaaaagttaagattttttgtagtgagttgtgcagaaatggaatccctatcaattgaacgcgagatttgaatttcttcagtaccacttttttattcagaacaattgtttaaaaaaattttaaaaaaaagcttaccagcggtagtaataaagcccagtatgtaaacagtaagaaaaagggcccccaaaaggaaaagcccatgtaacctcaaaagaaaagaacaaaagcccacctaactcgcatacatataaccagccggatgagtagggttttggtttgggcacgccttctatcctcgcgccgccgccgctgtcgccgtctacgccgtgcgccgctgcccgttagtcctctcgaacatcaaccatggcggagcaggtgagttgcatccgtggactgcatgacgagctatccatttgttatctttcgataagcccgagtggggaatactagccttcccgcagcgttcttttggcccaatttgctatggtgccttgcttgtaagtcatgttgacaccttcaggtctagacgtctagtgctgttctgtcgaggtgtccttgctcttatgtagacgtcctattgatcctcattagcatcgttcaatcctgatccgccgctgtcgccgtctacgccgtgcgccgctgcccgttagtcctctcgaacatcaaccatggcggagcaggtgagttgcatccgtggactgcatgacgagctatccatttgttatctttcgataagcccgagtggggaatactagccttcccgcagcgttcttttggcccaatttgctatggtgccttgcttgtaagtcatgttgacaccttcaggtctagacgtctagtgctgttctgtcgaggtgtccttgctcttatgtagacgtcctattgatcctcattagcatcgttcaatcctgatactatgaaatggatgtgggtaactaatttcctcactgattgattcagggcctgtttagatcccaaatttttacattccaaaagttttggctgtaaactttacatctgaataggtgtttaaatgcttccaaaacctttttggtctgcaacatataagacagatttgcccacatttaatgcttgatttgttttattaattgaagtacaggcacatgattgctgggggtatatccgtccaactcgggtctctagccactttttggacagttttgggactcaagggtcccaaattctaaatctttacaacccatggtttacatacccctgtttagatccattcttccaaaaagtgtacatttctccaaaacattttggtttttggctgcatctaaacaggccctcagttgcgacgctataaaatagatgtagataaatattcagtcgagcaccagatctatgtggatcagtctagttcttactatgtagcacgagtgggttgctatgtttctgttatcagtacaatttcatcaacttgtcaccattttatctgtaataaaaactaaacacttatctgttttttgcagacagagaaggctttcctcaagcagcctaaggttttcctctggtaagagaaattagtgttattctttgtaaattgggttcgtggtattttgttgtgcaacgaactactaatcatggtttcatttctataatgctgcagctcgaagaaggccgccaaggggaataagcctggcaagggtggcaacaggttctggaagaacattggccttggtttcaagactcccagggaagccatcgaaggtttgtcctggagctcgcttgtccaacaattttgtcatttcagaactccctaatttgatgttacttgttagcttaatgtaacttactctgggttcgtagtgttcactgattcatcacttttaagagactagcagagaatccacaactgatcaaatccagtataagtgtaccctatttaagctatcggtcactcaagtgtttcatcctttatgcaacacttgggctgtactgaaatagaaaacattagcaatcttatggcaatgttgctatactccaaggagtgcctggttctcttaatggccattgaaatgaatgctttgtatccaacctggaggtgtgactagaaacagtatggatggcatgaaaatttgtctttcagttcgtccttgattacacgtgcttctttatctacctgattctttatgaacattcctgctcccttaaactagattgtttgctatccacttaccattggtctgtctcttcatgttttttttggtgtctgtgtggctctttttttttggtttccaatgcatttactcagaattgcttgccatagctgtccagtgcagaaactaagtaaactttgagacctaaatgttcttcatttgtcttgtattgcaggaacctacattgataagaaatgcccattcactggcactgtgtcaattagaggccgcatcattgctggaacatgccatagcgccaaaatgaacaggaccatcattgttcgtaggaactaccttcactttgtcaagaaatatcagaggtcggtgaatattctttgatggttttcagacttgtatgggataatttcatcatactaaccgtaattctggttttcttgtataggtatgagaagaggcactctaacatccccgcccacatttccccttgctttcgtgtgaaggaaggagaccatgtgattattggccagtgcaggtaaaaagacagttttgattattttgaagctaaggccttgtttagttcgcgaaatgaaaagttttcaggcactgtagcactttcgtttgtttgtggcaaatattatccaatcatggactaactagggtaaaaagattcgtcttcatctatatttaatgcttcatgcatgtgccgtaagattcgatgtgacggagaatcttgaaaactttttggtttttggggtgaactaaacaaggcctaagcttggtctttgcacaacttatctctacatttgcaccacttttcccaatacgattatggcattactatagatactagattttctgctgtgcccataatagctgctcgatggcactctaagctctcaaaaactcactgttgtgccatgtgcctatgcaggccactgtccaagacggtgaggtttaatgtgctgaaggttatccctgccgggtcaaagagtggtgcagtgaagaaggcattcactgctgcctgaggaagaggaatacatcaaagattctgaaagatatagatcatgagaagattctgaaagttatagatcatgagaagattgcgaaagttataagatcacgagattttgatgtcagtttctatatgccatttgtactaggatttttgactcagagaaatatgtgcgaagttaaaagtcaaatgtgctgaattcagcaatattgtgaagagcaaaatcttgagtgacgtatttaaggctttgtttcagttgaacgattatccttttgcgtttacaggtgaaaacatctcgctggttgtgattatgtgggttcttctaagagggccgacaccgattggtctatgcctaatttgcatggatcccattcctgacatcatcgtcgacttcacgaattgttctttttcctgtaatcaaaagaaccttaggcctttccaggaatttagaggaatttgaaaataacctaggtaatctaagtaataataaaatagcaaggactttctagatat

SEQ ID NO: 4494 - DNA, 11764 bp, Sorghum bicolor
tgtgttactaattaattttgtgtgatgttgtgcttttttagtaggaattaaggtttgtaccaccgagcatccacacactatttcctacgtgtgttagtggttgacgagatgagtggttgaagcttcatcaatgggcaatcaatacggtgccccatggtagcaaggtggcttaccaaaggcaatgtcaatatatacgagggtgcttatgcgggagcacatgacatgaccttagggcattgtgttcatgtagtagccatggcatgagactgagttattgcaattagcaccgggctataacattgttgggccatgaagggtgtggtgagcgcgacggtgaagacaacacaactagcggcagttgggacaggcttgtgagccacaaccatatgggtgaatgatacttgcaaataaggcaacgaagtttacgagtgttttgacttataaaactaacattgcatctagctataattttgaccgaaagtgatggaatccacgacaatgacgtagatgggagaaaagaaataaacaataccattttaggagcaataaaatttcaatggcaagtaaatgatcgatataagtttcgatgcatataagggaagtttttaataagaaataggatacgaggataaactaagactagtaccgtatctataggattaaacattcaaaaaaatagaacatgtgtttaatcaataggtctaatttcataaatatatgaatatatgactttattttgtattctagtattttatcgtaagttaggatttttacttggtatcccgtggaaacaccttgtcataaacaagacaagtgtttttgcgtaagacccatttattgagctgaactttttaggtccaatctcataagtcataacatatacacatcttccctggtagaactttgttgttcacttttcttattacatatatgcaatatataaattgttagatgaagattgaagagtatatccagccatttatttgttttattattcatgattattattaataaccatgctaatacatgtttcactttcttattttcaagcattatatcttataatagatgacacttttccttacaaaatattttatatatttaagaattgttcatttcaactatatttttatgcaacttcgtacaagtttttacgtccggtattttttgacgatgtatcacatgaatgttggtctaagtataaaacacgacaaaagttagaaacagacaaattttctgatgtagtgactaagagcaagtcgaatacacttccaaacctaactttgactcatttatttatgactgtattactttattagttgttcgatgtttgtacgagaaaaccataatttgtttccttttgtcacgcaacaattttacaaacgtcccaaagattaagcctatatttgtttacaaatgcaaaaataaaataccaagctagaacatgttattaacacaacattcatgaattattacaagctactcgcatacatgatcaattgtcaaccttgattgttttttgaaggaactagaggggtttgcacccctacagcttacgaattaattaaagtaaaaagttcagcacatacaagaaacaaaaacaaacagggttaaccgagagatcaatttagatcataaaacctcacatcccctctctaccaccaaacttttctgacttgcagccagagctctatatttgtatttatataatagcacatttactctagcaggagaaagaaaatgtgaaaggtgaatcatatacagtcgtaggtggcattattgattataataccaaaaataaagaaacggaaggatagggaaacagaaataataaatataaataaacaaatagagtagaaaacatcacgccagcggcaacaccctcctcgcctcgcctccccaaccaagcctttgctcctgcatctccaagagccaaaggccaaagaaaaaaaaagggagagaaaacacaccccgaaaaacaaaccaaaaatccccaatccatgaagcccaccacttccgccgcggcggcggcggcggcggtcaccaccgatgacccttccccttcgccgtcggactccacgtcggcgacgtttacggtcgaccgccgcggggacgcctccgcctcctgccggtggacgctcccggacttcccccgcacccgcgcccgcaccttctacagccggtacttcgaggtcggcggcttcgactgccgcctcctcctctacccgcgcggcgactcgcaggcgctgccggggtacctctccctctaccttcaggtcctcgaccccaaaaccccggtgtcgtcgtcgtcatccaccacgacaaccacctcctccaaatgggactgcttcctcagctatcgcctctccgttgtccaccccaccgatcccgccaagtcgctgggccgcgattcctggcaccgattctcgtccaagaagcgctcccacggctggtgcgattttgcgccctcctccgccgccgccttcctcttccagccccacgacgccctcgtcattgctgctgacatatctgtgctctccgaggcggcctccttcgctgatgctgacggtcgttttacctggaaggtgctcaattttggcctcttccgagaaatgatccgcacacagaagatcatgagccctgcattcttccctgccgctgcctctgctggcgggactgactgcggcctccggattagcgtctatcagagcaatgtctctggcgcagaacatttatctgtttgtctggaaagcaaggagcccgttgtgcaggtagcatctgggtcatcgacgtcggcattgacatcaggtggtacagggagtggtgtgccagatggtgatcgagggtgctggtgtcttttccgcatttcgatccttaatcagaggtctggtgggagccatatccacaaggactcgtatggtcgttttggggcggatagtgccagtctaggttggggagaatacatcaagatggatgagtttttggctgctgatagcggatacctggtagatggagctgtggtgtttagtgcctctgtgcatgtcataaaggagtcaaactcattcactcggagcttgccaatggttcccggaatatgtggtgctggtggtgggcgtgccggggctaggaagtctgatggacactttgggaagtttgtgtggaggattgaaagcttcacaagactcaaggagcttctcaaaaagcgcaagattgcgggtctgtgtatcaaaagcagacggtttcaagttgggaatcgagattgccgtcttattgtttatccacggggtaagcactagggcttatgcttctcatatggtagctttgaaatagactttgtgtatactgttcggacatacattgaactgcttgtggagtgaaacttggtgaaatgctgtaggcaactaagcatgtgtacacctgcatggtctgcacaaatctttagatacttaaatgatggaaaaaatgtgaatcaatggtcagaggtgcttgattaaattagttccggaattgtaacggtgaaatccagacatgcatttgaagtttgccattcatttagaattaatgaaattttcaccataaaagtcaattcttaatttgtacctagaaacaatagctaatagttgtaccgattaggcaatcaatgaatatacgacataacttctctctcttaggtgtggcttataactattgttctcatataagctgtcctacttgtccttgtggatggcaggcacactttttatcttatataagtagctgctgcctcttccagaacaatatatcatgttgatttcacattttttccatccatgatccctgttcatgaagtgtttgttcgtgtggcattaaaccaatggatgccactgacaagtgttatttttcttatgtagcagcattcatagagcaccacagtgagtgttgattttttttgttttgttttgttaacgaatcccctatttgcttgagattgtaaaacagtgccaatttttgttggagctgatccaagagttggctcatgattacactatatgactatagactataccgaagcatcaaattgaccttaaattccactttagaagtagaatatgcatttgcaaatgcagccgcaacttgggtttcctgaggctccttccctcgatattgaattaagtgttatgaccaagtacttagttttgtttgggggcagtaactgctgccactgagtccatatttctatggctatccccaatgttttagttcattagaagtttgaacttgttttcactacaagaaaactgtgtccatttttcagtagcatctgagtacgatttacttgttaatgttgcatatgtgggcattcttagaatttggtactgatcctttcacttggttttgtttatgttgctgcaaccagggcagtctcaaccaccatgccacctgtcagtgtttctggaagttacagatccccgaaatacaactactgagtggagttgctttgtcagccatcgtctctctgtcatcaaccaaaaagtggaggagaagtcgatcacgaaagagtctcagaatcgttactctaagtcagcgaaagattggggttggcgcgaatttgtgacattaactagcctctttgatcaggatgcaggttttctcgtgcaggataccgttgtgttttcagccgaagttctcattctgaaggaaacagcaactatgcaagagcttaccgatgaagattctgaaatatgcagttcaacttatggatgtcagattgaagctttaccaaagcggccatcattcacatggaaagtggaaaatttcttgtcttttaaggagattatggagtccagaaagatttttagtaaattttttcaggctgggggctgtgagctgcggataggtaaagtaaatttattcacttccttgtcttatacagctgcaccaaacccttactttgtgtttacctcatcgtaacttgcaggtgtatatgagtcgtttgatacgatctgcatatacttggagagtgatcagtcatctgggtatgatcctgataagaacttttgggtgcattataaaatggctatagttaaccagaagaattctgcaaaaactgtgtgcaaggaatcttcaatctgcacgaaaacatggaataattcagttctccagtttatgaagacttcggacatggttgacaccgatgctggctttcttgttcgggacactgttattttcacttgtgaaatcatagactgttgcccatggtttgatttctctgatcttgaggtgagttttcatttgctttttcttcatgtcttgtctatttgtgctttttaatgcataggcggagggaagtttagtgaagcagctgataagtagagttttactgatttgctacagcatatgctaatgaaaacaattgtaagcatagcaaactgtgcacctatcagatagttaaggccttgtttagtttcctccaaaacctaaaaacttttcaagatttcccgtcacatcgaatcttgcggcacatgcatggagcattaaatatagacgaaaacaaaaactaattatacagtttgcctgtaaattgcgagacgaatcttttaagcctatttagtctatggttggacaataattgccaaatacaaacgaaagtgctacagtacctaaaaaattttcccccacccaactagacaaggcctaagagtcctgtgaacccataatttttttagcaagggaatgaagaattgcattgtttaatgaggcttgtgtagcatcagctatccatgttgaagcaggcatctcttggcccttttgtttactgttttagttgcatttttggtgattgttactgccgaggactatgctggcctagctatgccctatacgaaatgtgtcctgctgttatattgcaatgatgcttcatatttgctagttcactcgaagcaatgggatgtcctctgaccccctgccttttttctcctttttgaacgggtgtcgtatgacttaacagtatgtgctggattagttaactactattgttgagtaagtagactttagtcttttgacctttgaaggattttatatgggtcatagcatgatatttgtatgtaagttgtagctgtgcttgtgcattgtagtccttaatgtgacactgataaatatccgttttgttcatggtacattcttggaactgataaccagatgtgctcatatggcagacagtgctcttttcttattaggctcataattaacttgtctaccaggtttgggcctcagatgatgaccaggatgaattgtcgacagatcctgatgaacttgttgattctgaagatagcgaagatatgagtggtgatgaggaggatattttccggagcctcctctcgagagctggattttctcttacatacgaagataactatactcaaccacaggttactttaagagagaaaattctaacagatgctactgcgatagctggattccttactggactgcgtgtttatctggataacccagcaaaagttaagcgtatgcttcttccaaccaaagtatccaccaagagtggtggaaagaaagatgcttcaaagtgtgattcaagctcaagctccacaagtctcattagcttgttgatgggggttagtgccttgaagcaggctatcatagatttgcttctagatataatggttgagtgttgccaaccttcagaagaaagtagttcctcagcaagcactaaagcttctcctgattcaaatggggctagctctccaccagagcttagcgttgaaggtgaactaacagaatgtgcatgcagtgatgtgtatgcgagggtggaatctaatagtgatgatattcgagatagtcctgcaatgcataatacagatttggctgcaactgagatcgctgtaaataatctagaacattcctgttttcctccagaaacatctgctgctgatttgccagcagatgaaggccctgagctggcttcctgggtatgatttgaggtttattattttttaacctttatgatcgcattccttcaattagtgtatgatctgaccaatttttttctcagtcaaagtggccagagcaatcagaggaactgttagggttgattgttaattcattgagggcattggacagtgctgtcccacatggatgccgtgaaccaagaaggcggccccaggctgtccggaagattgcacttgtcctcgacaaagctccaaaacaactccatcaagatttgatttcccttgtaccaaagttggtggatggttcggaacactcccttgcagcttgtgccctgttagatcatcttcaaaagccagatgcagagccttcattgagattgccagtaagtttgcctcctaagactatgctagctactatggggcatgtattgacccgggatggtctccaaggctacgttttgactgttaatatctcttatgttatattgttaatgatcatgagattgacatcatatgaaagtatattcaaatataaatccaattgtactgaatctgtatgctataatctacagaatcttatttctttataaaagattaagaagtttgcaccttggcttgtgtgcggcccttacaaaaacgaagtatggttttggctaatttaactttctggacacttttcagtaattttgttgtgtgaaagcatatggtttccactattttgggaatgaatagctgatgtatctgcatttgttctgctgtatgtatcatgggtttgtgacttttatgattgtatttgtggatagctattgtgcttgattagcttatataaaatatatgtgaacagctaatacctgacacattctttttttcaattaattatggcaggtttttggtgctctttctgagttggaacttgaaagtgatatctggaaacaagcatctgttcatgcacttgaattattgtctgactcaaacgatgagtctcttgtagctgccattacttatgttcttaaggcggcatcacagtgtcagcatctttctgtagcggtatgtttaccagtcacgcttcttgactttctgcttgctcagcatcttctcacttttcatatcattaactgctttggttttttgatttccaaaggttagagctattagatggagattgaaagatttgggaacggaagttccacattgcgtgctggactttttgtctaaaactattcaaacccagccagatgtagccgaagctatattgaaggatattgattctgattgtgagcctgaaaacaattgcctatcatcaacatcaccttgtagtacttgttctacagacgggctttcagctgaagggatgtattcttggcaagagcaagctgtgcatggaagaagtcatctatcagatgtttttgcactgatagaaatgttatcaatgcctggattatttgttgaagtcgcacaggtttttgagagggctttattgcgagggtcctttggtctacaattagtagccatggtgctggaaagaagacattcttacagttcaagttcaaagtctgggtctgttgtgaatgattcacagaacaaacaagttctgttagatgggcagttggaacctttatctgtccaagaaaatgatttcacttcagttcttgcacttggtgaggtattatctctatctacagaaacgaaggttcaagattttgtgcggatgctttacgctatcatatttaagatctatgccgaggatcattatagatatagaattcttaagggccttgttgaacgagcaacaaatacatcagataactgccgagcagttgacatcgatatggatgtcttggtatttcttgttaaggaggagtatgggatcgcgagacctgttttgaacatgatgcgtgaggttgctgaagttgctcaggctgaccgtgcaaatctttggcaccaaatatgtgctactgaagatgaaaatattcgtcttcgagaggacatggaaatggagcaaacaaatttcaccaacgaaaagattgcactaaaccaacagcgaactgagttggaggcaactattggcggtctaaaggtatttctttgttgtggccaactgttaacccttttttttcatctttgtttgttagcctaagatttattgattttctcattgctgtagtctgagctaaaagctgagagggaccgttttactcgtgagaagaaggcattatccgatcagatgcgagagattgagaatcagttggaatgggtgcgatcagagaaaggtgatcagattgtaaagctcactgctgaaaagagaaatctccatgatcgtcttaatgatgcagagtcacaactctccttggtgaaagcacggaaacgtgaagaattaaaggtaaagttgaagtaatcctaaacaatgtgtcaaaaatgtgtttatgctgatcaaaatgaactgttcatctgtttctgttgtgtttcttgtcatcaattgtttgatagactgcttatgataccgattgtcgaaatgaatgttctttaattgtttccttgctgtgttttcttttggctaccattgtagtttgtgttgagttattcttaatgtgtctgcacaccttgaccttgagtctctatatgcagtatacagaacttatcccatgtgattgaggttaagtgtaggatgaaagcacactcactgttttaagaaccgaatcgagtttgttttacaattttaaaattgtttgccaaattattggtcaacgattgtgaagtctgaatcttgatatgtgtgtgcgccttataaactggaccggagggagtagagatatcagttatcatgaccttcatgtaactgtttacatttcaaatgataccaatggtatttgctatacatttttaaacaaccaaactaatgtgctatgtgctgcagaaagtgacaaaggagaaaaatacattagcagaacggctgaagaatgctgaaggttcaaggaaaaggtttgacgatgaattaaaacgttatgcagctgaaacacagactcgtgaagaaattcgaaaatcactagagaatgaagtgagaaggctgacacagacagttgggcaaacagagggagaaaaaaaggaaaaagaagagcaaattactcgttgtgaagcatacattgatgggatggaatccaaacttcaagtttgccaggtttccaccttgctaattttttatgtttcttgtttccacaactactgtatgttattatggattagtcaatggcatcatacgtttttagggacttgtccatgatatcgggaaacagtattgtctgtagagtgcagatttggcgccgaggggggctggtgccctcatcattagctaaaataccatgttgcaatgtttaaaaaatcatcacaaaatctgtatgtagtgcatataaagttaagtgtagccacgacaattcagtttgaaattactcccagatgtcaagaaacaaaatagacaagtagtcaacttggctgttcgtcatgtgctgacagtcacttctggttttttaataccagcatcaataaatacatgattgttgtgatgattttttttttaaaaaaaatattcatataattttccattgtctgtattttgcatatttatttttagatagctagtacaaatagtatgcctagtttttggatgaaccctgcgttatttttaattgacctaattgaatgccgagcaaaactatatggaccttactgattacaacattgcgaacatgctaatttctgtggcggattagtaactttttgtctgtcatcaccacctgagctgtacttgttcttcagctagtatgtgctggttatgaagaactttgaatggcccactcattgtcatgaccaatttggcaatttcacattattttcctgctgctgctcttattactagtgtaggaccttgcatcacaactatacctataatgtttactgatgtatcatcattttcagcaatacattcggacacttgaaacgtcactccaagaagagatggctaggcatgctccactttatggtgttggcgtcgaatcactgtcgttggaggagctggaggcacttgcaaacatccacgagcagagtttaaggcagatcaaagctatccagcaaaggaaaggtagcagccatctcttgggtggccccgccctttctcacatccctgccctattctcctcgcctccttcagtggcagttggccctccgtcctcacggatccccacatccccaatggcacccaacggtgcagggatccatgggaatgggcacctgaacggcgcgactggccgctggttcaatccgagctgagtgagaagaggtggccgattttgtgcatttgattcaatgggccacatttgcctgggcgtattttgcagccgctgagcaagcccaacatgatagcctttttgttcctggccttccgtcaggttttcttcttgtacttacttggtagtgccgtcggcttgatatcgcatgggcgtaaagggcttcatatgaaataatgtatgtaataatcaaggaaaccgatggaaatatcaggtgcaagtggagagctatgggactggttgtgcttgttcagttctaaaagcattcaggttcatttgttttcgattagagttgcggtaggtaaaggtgaacgagttctaggctttattttatttagagttaaatacatcgatggtcagtgaacttgtcgagagatgtcacttaggtctatgaacttttaaagcacatttctggaccctaaacttggtagattgcaccacatgtttctaataaactcgtaaaaagggtgcaccgtaggttca

SEQ ID NO: 4495 - DNA, 7229 bp, Sorghum bicolor
ggatgggcgcttctcgatacggagagagagagagagagggaggttagtagggggactcccgactgatgcggggaagaccgtgggtctggatcatttgattatggtaccaaggaatgatcaagaaaagataactgtagaacgctttagaatatatatctgtgaccagagagtgagattcacactagttatactgacacttgcatgcagtttcattgagtcttgcattttcagaatatagcaagtagcttgctgctgggtgatttgacgggtctacactggcgcaattcatcaaaaagctaaaaactaataaaccaccaaagctttgagtctttatctatcactgcgctcagctgtttatttctcttagaacaactctggaactggacgaagacagtgaactcacaactcacaagtagtgacgataaagtgatcgatcttacttctcaaaaaaaaaaaagtgatcgatcgagaacattcatcagctacactggcattggttggattcatcaggcacgcccgcccgctgcagaaaccagaaactgatcttcgaacggttccattcggtcagtcgtccaccaagcaggtcatactactaccagtagtccaatccagcgattcacctcgaaagcatcagcaccccgccgaatattttagagcgggcaagcctaggctgccgccgctgcccgcgtagccttgtgccctattgtagtggcgcggggttggaactcggaggcgcacgcgcgggccggcggacggccgcgcgcggctcgcgtcgccacgacatgtcagagatcatatcgatcggctactatactactagcttccgggcttccacaggtgtgcgtgcgcgcgcgggggctggttctggtttgaccgcgccgcggcgagcgcgagcatttcccttttcttttttacgggaatctttcgctggattcgccgtcgttggacgggacgaaccgtccgcacagtccctgccggtcgcgcgcccgagtgcatgcatatgcatggcacgccgcacacgtcggcgcaccgtgcacgacggttgttggcgcgtgcacacaccttatcggcgcgcggatgcttcgtcttctttttctttcttccgattgattgagatccaaggaaatgcatgcgcgggccgggcgcgtttttaaactgggctgatcggctgatcgtcccgcgcgctgatcttgatcctgttccgatcgagtcatcagctttcttttcagactgtatatgtagcggcgaatgagatggataaatatgtatggaccatgcattaattaattacttaatggtttagctgtatagtactagatgtgcagtgtgtgaacagctcccttggaacgaatgcatatgaacaatgcatgcagttcgatcaagattcaagagccacgcgcaggttaacctttcagtttgtacgtagcaccagaacctattaattgcctgtttttttgggggttattctaatgttttggtgaaccttaaatttttgtatagagtttcgtcctaatgaaatacaggtacagccccgttcgtgaaaaaataaaaataaaatctttgtagaggatgatgtgctgattgatcacaaacgtggaactttcctccctgaaaatgaaaagaaaaaaacttatggcccacattatactaattaaaaataggacttaattatatatgcttgagaataattaaaccaatcgcgtagctataatatatatgcaacttttacattttgaagcttgcctttggtcagtagctagaaaagcaaattgtactcaaaataaactccatgtgctcgaaaattttcattaatcatacaattttctacatttgagtgtactaacatttttttggttaaaaaaacatatttgacaagatcttacgccctttttcctcgaactgtttatccttaactaagaagcattaaacgggactactctgttcttaacttctcttataaatacagaccttgtacaacactttcacctcctctcaggtggcgcgcggtggccaggatattttttctggccccttcctgcccctctttcacattgacccaagatgtggtgtgctatccctggaaagctatacctccttcctcctatcagcttctccctacatctcctctcgtcgtcaccaatgctatcaccgctctgatcatcacaagcaaaaacacaccctcactgttctatcacaccgcccctctcccttggattagatggcttcgacgaacaaccactggctgggtttctcgctctcgggccaggataacccgcagcctaatcatcaggacagctcgcctgccgccgccggcatcgacatctccggcgccagcgacttctatggcttgcccacgcagcagggctccgacgggaatctcggcgtgccgggcctgcgggacgatcacgcttcttatggcatcatggaggccttcaacagggttcctcaagaaacccaaggtgaggacggagcggcggaggccgcaactaataacagtctgtttcgcctgatcgatcatcgatgatcttgttgctagtttttgtatcgtatggtgcacacgtactattccatgatttctttttctcggttttgttcttcatatttgatgtgggtgttcctgctctcagattggaacatgaggggattggactacaacggcggtggctcggaactctcgatgcttgtggggtccagcggcggcggcgggggcggcggcaagagggccgtggaagacagcgagcccaagctcgaagatttcctcggcggcaactcgttcgtctccgagcatgatcagtccggcggttacctgttctctggagtcccgatggccagcagcaccaacagcaacagcgggagcaacaccatggagctctccatgatcaagacctggctccggaacaaccaggtgccccagccgcagccgccagcagctccgcatcaggcgccgcagactgaggagatgagcaccgacgccaacgccagcgccagcagctttggctgctcggattcgatggggaggaacggcacggtggcggctgctgggagctcccagagcctggcgctctcgatgagcacgggctcgcacctgccgatggttgtggccggcggcggcgccagcggagcggcctcggagagcacgtcatcggagaacaagcgagcgagcggcgccatggattcgcccggcagcgcggtagaagccgtcccgaggaagtccatcgacacgttcgggcaaaggacctctatatatcgaggtgtaacaaggttagaacattgattagtttgtgtcttcgatacattttgttatattgttctggattcgttcgtttcaaattggtctagtactctagctagagagttatttatttaatttagaggtaactatcatcagagaacatagcattagcatgaccttgttctagtactactctagcaaaataccatggccttgttgagcgatcagtccatcgagaacataaactatcatcagagatctatgctaatgcaacctttggaaacagcgaggccatgctatttttctttaaattttctctagtagttcatatgatactaattctaaattaaagtaaaccatttttgtttactaagaagtggatgcaatatatactgatgtatttttcatatgtgctgtgatgatagcaacatatgccactgatcacatgggcgattgagaactgagtatatatgcatgtacaattcatggctagttgtggaatggttaacatttgaaatcgtacttcttgagtccattgttaccgttgcttttgttctatttgccaatgaatatcgaaagctatatatatgcaagcgtatttttgcttagtttttagatatttagcatgtatatagacgtgttaattgagggtggtaatgctatatatgcataattttgagttttcttgtttacctatcgattatatatgctattgctttggtatgtgtagacatagatggacagggcgatatgaggctcatctatgggataatagttgtagaagagaagggcagagtcgcaagggtaggcaaggtaatgaaatatgtgtccataataaccacttttatcctcatagagaaaacatatttagtatgtacagcttgaactactgataaagcattgtctcttttgtttccgtcaacactctggcttcacgcattgcctaccggaatgacaccaacaatatgcagtttaccttggtatgcattcacctttgctctcctgcccttgcattttcattgtgtcgatcttcccattttaacaatcattttgccttgtcattgtatatatgcaccgtatacacttaggtggctatgacaaggaagacaaggcagcaagggcttatgatttggcagctctcaagtattggggcactactacaacaacaaatttccctgtaggcaaagttctatatggtttttctctgaatgcgcttataacaaaagcattttgatttttttaagtattatattactctttgttcttgaattaattattttgccaaaattttattgttgcagataagcaactatgaaaaggagctagaggaaatgaaacatatgactaggcaggagtatattgcatacctaagaaggtagtattttgatgcttgtatcatattctcaatgtttcacttccgtagatgatttggctaacagtaatatgatcctatacattcagaaatagcagtggattttctcgtggcgcatcaaaatatcgtggagtaactaggtaatcaaacttttcacacaagtatatgatttgcgttcatacaatcaaaattgtcaatgtttttatttcacattatcattagatgcctgctgtgtgaaaagcataattacaagagatttatgaaacttgttttcattttcttttttgtttattattgaaataaaatgttgtttatcgagcagacatcatcagcatgggagatggcaagcaaggatagggagagttgcaggaaacaaggatctctacttgggcacattcagtaagctagctgccttcttttcttgtttatttgtttgtttcgagaactcagtgaagctctagcacctattaagtgagtaatgcgactcatcaaaaccaaattgctcggttaatggagatccttaagctagttaatgactactcatagtgttatatatgtccccaagatctaagtcatctcgctctgtacttgtttagtcaaatttcttgaaatcttcgtctcgtagaactgaagattagatattctatatgttgccctatgggtgcataaaatagtgatcacagcattaactatgtcccaaatgtacctttccaagtttttgtctcaaagttgtctgagaaaaccggggcatggggtcaaagggtcgcgcagaaaaccctagtgctttgaatcacacagttcgcaccctgcatgcagcatgcatgcatgcaatatgcaaaatatagctagtagctactacgatcgacctaacctgcattgggaaacaaccctaatcatgcaccctactacagctaatcgtcgtgcacattccctcgtacgtaggcaccgaggaggaggcggcggaggcctacgacatcgccgcgatcaagttccgcggtctgaacgccgtcaccaacttcgacatgagccgctacgacgtcaagagcatcctcgagagcagcacgctgcctgtcggcggcgcggccaggcgcctcaaggatgccgtggaccacgtggaggccggcgccaccatctggcgcgccgacatggacggcggcgtgatctcccagctcgccgaagccgggatgggcggctacgcctcgtacgggcaccacgcctggccgaccatcgcgttccagcagccgtcgccgctctccgtccactacccgtacgggcagccgccgtcccgcgggtggtgcaagcccgagcaggacgcggccgtcgccgccgccgcgcacagcctgcaggacctccagcagctgcacctcggcagcgcggcacacaacttcttccaggcgtcgtcgagctcggcagtctacaacagcggcggcggcggcgctagcggcgggtaccaccagggcctcggtggcggcagcagctccttcctcatgccgtcgagcactgtcgtggcgggggccgaccaggggcacagcagcagcacggccaaccaggggagcacgtgcagctacggggacgatcaccaggaagggaagctcatcgggtacgacgccatggtggcggcgaccgcagccggcggggacccgtacgccgcggcgaggagcgggtaccagttctcgtcgcagggctcgggatccacggtgagcatcgcgagggcgaacgggtactctaacaactggagctctcctttcaacggcggcatggggtgacggtccggccggtcgacgaagagggcagaagctagtggctagtgataggggattagctagctagaagatccaagtctaggttagagtttatttgcgggcatcgttgtcgtacgtgtttcgacgtactcaggttctgggttctgcagaattaacccgtgcatgcacgtaaggcgtgctgcctttctggaagctggtaatggcaggtcagggtaagtaaagttagcgttgtaagttttcctgacgtgctgttagttttgggtagtttcagaaggtccagtcaatttcttcggaagactcaatcatcatcgtgcactcgtgctatgagaataattaactttgtcatatttcattgtttttctaatcacagttatacttttggttagcctttctagatttttttaagggagcctaggcaacgacaacggatctagtgcaaactcatctcccgtataaactttgtaaactctaatctggaccgcaggatgttgatccaagggggcgcatgagaaaggtgaaaagagggatctgtaaaagtgtgattaagagcaggcggttaagtgcaaaattacccaatctctccacgccccttggattaacatcctgtagtccaaattagagtttgcatagtttgcacgcttctaaaaaacagttacttttggttcttctggtcatactactatgttcatctatagatatatcaactcagtactgttgcactgctaattatctagcatgtgctttttctctcaaatatacaaaaatttatgcatctttatattaagactaaaaaaacagatggttacaatgacgcgcacgcactacataaccaagtttaggcgattccgtatcgctccacact

SEQ ID NO: 4496 - DNA, 4218 bp, Sorghum bicolor
tctccatctccttcactcatccctctcttcccctcttcatctccctcaccctttcccttttgcagatctagtggagcagaggcagcagaggcagagcgtgggcgtggatctagccaatgggctcagaaacgggctctccggtgggctctagttttttttgtttttatgaaattcattaaccatggcggtcttccttacttgcccgctgtggttaatggattaaccgtggcgggcacaggcaaccgctgcggttaagccaccattaatggtgacctttcattcgtggcggtcgcatgtgcccgccttggttaaccaaaaacgaccgtcgcagttaaagaattttgtagtagtgcaagaaagctacatcaattatcacaaaagcattatgatttatgaacacattcagtcgctgttgtctgtttgaaatttacaattcagcaccaactaagcaattaatcagcactatcaaattataaagcataactcatgactaaaatcatttaggaattcagatttagcaatcattttgtaatcatttgcaagcgaaacaaaaaaataaacaagaactttcaggtaatgaacaaataattgcagacacaaaccttttttttaatgcacttcccatgtatactggtatgaacttctgtgccactgtagctcttcgaatagcagcctgacaaaaaatataacatcaagcagcatgacaacaatttagaaacagttaggaactaacatgttactaatggttcctataatgtcaccaatatcaatatcacacatttcaacctgatatagtaaaacaatcaggaatgatgcaatgaaaatttttaagtaaaaactatgccaataagtaggcaagatatcatgtcacaaaataacaatacatgttgtcaactcaaataatgaaaaaaaatgtgtaatttacataggtgcacaataataatgaaaagaagaagataaataatgtagatatagtagactagaaaacactagttaagaaggtaaagtttaacaaaccttaagctgattagctgctgatcatctacttcaaacaacttcaataagttcacgacgcttctcagtgactaaatcctccattttcaatggaataagaagcagttacattctggctgcacattcaaatgagatgcgtcattcaggattcaataaaataaataacctggagtatttaattctcgacggaatgagactcacccactaaaaccctcgaacttataagccttcatttctacaaggtcaacaaggccctcaaactcctcttctaattctatgggtacttatacagctgcattgtggtgacggggcttggatcgtgcctttacatggaaagaacaaaagcaataatcagttggagaaattggttccatacttccaatacataacctaagtcacgaccagaaaatcactgaagtaagtaataataaaagtaaccaagaacaaaagttaaagccattatattagggatagtatggaacacaacaccagaaataattacatagcataatgatgacctagtggtcccaaccaaaagatgaccactccatcaaaacataagcctcatactatataggtatgaaaactgtaaggctatctacagtacggtttctcaattataattttgaaattacaattatttgaaagtattccaaaaaaattccattttcaccacaaagagacatatgtcaacaaaaaatgttactacagacttctttttggaaaaaaaatttgttgaaaactctgaaggttgaggatcggcctgcacctaacactccactgaccaagatttccataggcagggagactctaaacctgaatagagatgtgcacgccatcaaggggcagcataggctgagctggtcataggtgaaaaactaatgactgcactaattaaaaactggttaccccaccacgctacctacagtcactttgctagtgtctatatatatgcacgactcgctagtgcgcgagtgcgccctcacgtccctcgcccgaactttctcggctcttacatgtttcagccgaagcacactagctagatctatcaacctcacttcgatcattgtttcagcatggataaccaccttaaatcgcccttgatctccctactgctcttttgcactgccacaacagtagcataccctgcttgcagtgaaatactatctcacaaggtgagcaaacattttgtatcatacagcccacagccaagggatttcccaaatgaacaactttatcgcgcctacttcgtcatccagcgcttcaagaacaccatcaccggcgaccccaagaatatcaccgccacttggactggtcatgatatctgcggaaagacatcctatgttggtttctactgcggagcactgccagggcgagataacaagttgacagtcacagcggtcattttgaatggctacaatctacatgcacctaggttgcatgggtttgtagatcagctacccgatctcgcgcttttccatgctgcttccaacaattttggtggcgacgtcccccgccttgccggcctaggatacatgtacgatataagtgttagtaatgatcatcccatacatacacttattgacacatatggggcgcaaggcgcaggtagtatcaacgttgtgtctcagtgtgtaactgctaccataaacttcaattttcatttgggaattcccggcagtaaggaagggaagcatagtactggagctacggatgctaaggcgctccttctgaaccacaacaacttgtcggggccacttccttcgaacattggtttctccaagttgagctacctcgccctcgccaacaacaagctcaccgggccaattccatcgtcaatcatccacctgcaagactccctcttcgaggtgctccttctcaacaaccaactctccggctgcctcccccacgagctcggcatgctcaccaaggcggccgtgattgacgccgggatgaaccagctcactggcccaatcccgtcgtccttctcctgcctcagcagcgtcgagcagctcaacctggccgggaaccgcctctacggtcaggtacccgacgcactctgcaagctcgctgggcccgctggccgcctcgccaacctcacgctgtccggcaactacttcacctccgtcggtccggcgtgcgcgacgctgatcaaagacggcgtgctggacgtgaagaacaactgcattccgggcctcgccaaccagaggcgcgcggcggagtgcgcggcgttccagagccagccaaagacgtgcccggcggcgagcaccacccaggtgacatgccccgccgcagctgccatggatgcggcggcgccaggggagaggaaggtcagggactactccagctacgtgacgtacgctactctgcacgactgagccacatcggcatgcagtaggagacagaatgccttggtggcattttggctatttgttcttgtaattcatgatgcgtgtacactagtgtgtcttggtgttgttgtagttgttgtctatttgcattggacgtgtgttgctgtcacatcctagatcatcccatcatttgtactgccacgtccattattattgtatgaaaaatgttgtttgtgtacctgtcttggatatgttccacgcttccatgttgcttaaactgtgtaatttcggatatggcagtgactttggacaacattacttaattactacactagaatgaattgcttgccacctctgttccgtaagagtgtcgatagatatcctcaattcctaatggctcacgacactcacaatgcagaaataattcataatttctatagattagatatcgtatcaaaaaattatcatttataatatagtttttctagctagagtcctagtaaagttctgcccaatcgttatccgtgtgcttctctcgcatcagcagatcctctgcacgtgtgctgcagcctgcaggggcggtgagcgcatcacaatgagaaaactagagtagttccaggtgagcttagcaaatgattgtttttgcaagcacgagctgcctaggttacagaggttttggtttacaaaagctaattactcactacatagtcgaacgaccattaagctattgagagctgccccttctaccaagtatcagtagtggctagtatccttaatctccatgaacataccttctatcgtaagatgacagccaatctaaagttccaccgctgcttaaatccggcatacttcc

SEQ ID NO: 4497 - DNA, 6414 bp, Sorghum bicolor
tgaattcttgctaggaaagtagggatactgatacatcatacatgtagtaatttcaggcgaacttatgagtcggtgcttggttcttggaagataaattaataaaacatcgctatgatttagtgcttggttggaaagataaattgagagagagctatgattcagtacttggtcggagaaataagaaaacccgagttaggattcagtgagtgaaatgcagtacccatctttttgcatatggcacctgttatgtcacctcactatgcactccttaattttccaaaaagggataataaataaaaattcagacatgcatatgctgtttttggcacatctatgtaccacatggtgatatggctataattttgagcgctgtagactgtactcttcagttacctgtatgcttcagtacgtgtctttgaacagcttcttccatggagttgaattcgtctggaaaagtgtttggcagaacagctgccacgagctggggaaaggggaggagccggtagaagctattttttttccagatgtttagtacaaaaccgctccagcttcatggttacttctcgtgcgaagctgtttttctgccctaccaaaggggcctaatgtggtactagaatatactaagggccatttagcattgatccaaatggctccggtttcggagctagagccagtgaagcaaaaaataatggcttcactgctcaaatttattttgagagagagagagagagtgagagagatatagataaaaagggtttcttgctcatggagaagccggagaggcctaagagtcaggaatgatgagcaaaccaagacaaagtttatggttcatggtgtattttaatctgtagacactgcagcattactgcatgggggaattgtctcggtttcagggcacatatggagacgtacagacctaaacatctcgttattctcattcttgattgcatattttattcaacgtagagtgcatgccctctactttatcacaacatcattgcccttttcttttcctggattactctgtcaagattcaaggtgctgacgagatttccagagaaaatctggagcctttaaggaaggtgttggtgcagactgcagagattcctctgtcacctgtaaatcttggcattattttggttgtccatggcttcatagttatattctgtgccaattcattttttagttttcacacttgtctgatctgagtaagtgtaaaacattcgaaatctgtgctcttgattggtattttcaggtcactcttattgccattctgccttctattacctgacaaaaatgcagttttttcagagattgttgtcttttctgcaagattccttttgggagtacgtacgaactcgttaatgtcatgtccttatgcgtccatttcgttgttatttgtgttcattggctctgtggacttgctttttattctgtccttttatccgcctctctgctagactgtcactattccatactgccaagtgctgctctgtccacctcgaatattttagttctctgtgttgattttcttttcataagtaaatttggacaataagaggccataaactgtgcttctcttttgcactaatctggcctacaagtgcctgcaaaatgttcatgtgtctcttgaagtttttccaacgaggatcttcctacagtaatggcaacagacattttgtatctagtgtagtgtcccttacatttaatcctaagggctttagacgctaaggcctcctgaaatatatccattgcagttatccattcgtggcgagtgttactatgttagtgctagttggccactattctactcaaaatttcctgctcctagagtttacctagccacctaaagggatgtggtctgatcgtatggttaatttacatggtttcagtatacaactcacataaggttcatggagtttcacatctttttgtttgcttttcaggattccatgttccaaatggactgttttaagctgggtgagctaccttttatcaggagaaattgatcaattggtttgaagtttgaactgtgtaccagaatgtctgaagtaaagccagtaattgatcacgctcgtggagatggtatgtatcacttataatatctttttggcgcttcttgagtaggtcctatatttattgtgttacttttgtatttttgtgacatttggatgtaatggtgggcggttattttttacaaaataatcatgggattaattgtgaacaagacctgtcaggattgctgtattcaaaatgtcaccattctgctttatgttgggataaattatagccattcctgtttttttattgcttggtgtatttttataagtcaagcttatcgaggcactaatcttttacttcgtatcatttacatcaaaataccttattcagtgtttctcctctcaggattatctgttcaaaagatcatgtcagaattgaagaacattaccaatcctgttgaggaaaaacttgtgagtgtcatatacaatattattttagaattttgttccctcacacttatattggtgaatgtcatttgataagaaggactgtagggaccttttgatatgatacaatttgaaaataaaaagaaagggaaatatatatccctacatgtaaagattagctatcagttagtgctaatagaatttatggtatcatattctccataagggcctgaggaaaaataatatatacaattgatatttgtcttgattattgtttttgatattgtgggtttatctacagggtgctgatgacaattcttcaagcagaaaatctaatgcaacatcattaaaaatgttattagagaaggagatgtctaaagaagcggagtcaaagagaagacctccaagtgtcattgccagattaatgggtcttgaggaggacttacctactaaagaaccaattgttcaccataccgtaagtgacttgagtagagatttaaatgccacaaacaacaccttacagggaaaagaacggcatcaattcataatgttgaagacacaaaatgaccaatcctgttatgaaaaaattgaatacaatgatgtttatgaagtatctgaaggtcaatcaggaacaggctattttcatgatcgaacttcacagaaaggatggtgtttggagaacaagagtaagcaattcgacattgcacaagacaagatcatggaaccagaacactttggcattgaagagaaggtcctttgtacaaaggagttacctgaagctcttgtttttccatgttcaaatagagatttatttcttgaatttcctgaagaacataaccccacattctcaagacagtcgagtgggcttcacacaaaccgagcaccgcctcagacaaaacgcattacagtgctgagaccaattagatctgttgatattaatagcataagacggtacagagcagaaattggtaagcaaaatgtattgaacatgagaagattccatcagattcctagtccaaaggaagagataccttcccagcacagtcgaatagtacttttgaggcctaccccagggaagcctggcatatcaaaggcaaagctgacctccagggcaacttcatttcagttaactaaccgtaacagtctcaatggatcattagatggtaaccaggcatccataggatctgcaggactagttcatggtatcatgcagtgccgggaagatggatgtcaccaaagagatgattctttattatcttctgcatactcaaatggatatgggggagatgaaagctcattcagtgattcagaagttgattataccagtggttctgaaatcaactatattgaagatggtgatgccctcagtgactctgagggaggtagccctctgtcaaaacattcatggaattacataagaagatacgaaggtcaatgctcaagctcatcctttagcaagatctcccacttttctgagtcatcagtaatcacggaagccaaaaaacagctttcagagcgatggtcaatggttacctgcgatgagaacagccaagtgcaaccgtcgaggagaaaatgcacattgggtgagatgctctccattaaggaagcaaagaaagatgaggccaccactgggatgttttctgtttccagtaaacagtcatgtggcctggaaaatgaactgactacacgttctacaaatgtaactatttctagaaagaatgataacaatggggagagatcttctaggaagttgccaagatcaaaatctgttccagtgatttcatccacgtctgataacatggtggtgaatgtgcaagcttcaaatcctgagagcctcaaactgaaggtggctgttgtgtcaaataaaggaaaatcagctttcaagggaagagtttcagattttttcttgtctaatagtaaaaggccaagaaggaagatgtccacttatcatccatctgattgctttgctgagaggcttgaaggttgtgtttttcatagtagacaggattgcaatcatgaaatggatgccattgagaaagcaatgcattgtgaggacagatttgatagtttttcgacacgaatatcaactagcacatctgatgtaagcatttctcgagtagcacacaagtttaatacaatgttatattcttctgttcttgcataagaagcataccgcacggttggagtgcctttgcttttgagtttgttgactttttactacctgtttattcctgcataagaactctatattactgcattccattttcttggcctcaaaacaactgataagaaattgcatgacagagaacaacgtctggtgcatctgtatcattggaatgttcaagtggaaacctggataaacaaggagtaaataaaggcctaaatagtaaccgtgatcaacccagccctacctcagttctcgatgcaccatctgaagatagcagttgtaatgaacctgaagcacctggaataactacttccaagaatgctagtaagtcttgtttttctgtatcaacaaagctctccattatgttttatatattgattgtgtcttccgttctattctctgaaacagcatcaagatcttcaacaattgaaactgtcacccgtttcttatcatgggatgacaccacctcagagtcacagtcaccttgtaacccaaggctgagttctcgtctccctgatgtagatgatgatgagtcagaatgccatgtccttgtgcaaaatataatgtcatcagctggattaggcacttcgcaatcatgtatggttttcaccggttggcatttacctgatcaccctcttgacccggtactgtgcaacaaattatcagagctgcaggagaaaagttcatacagaaggcttctatttgactgtgtgaatgttgctctaattgagatcggtgagaacactttactgagtgcattcccatggagtaaaagacactccaggacatggagaggcacctcatctcctgatctgggtgtagaagtctggagtatcctgaaggactggatatatggggccaggatgtttgtggtgagcaagagagataatgctgggatcatattggatagaattgtgaagcaggaggtcgaagcaagagggtgggtgaaactgatgatggcgcaggtggttgacatcactgaggagctcgaggggggagtaatggaggagctggttgaagaagcggtgctggattttcacagtttgttttcaatgatgagatatcgattgtaactggtaaaactttccagggagcagctggtttgtgtatgctcctgttttgcagctactccggttgttcgtcgccgtatccccctgattctctatgtagctggttctgcttgtattactacgaggtctataaacatctggtagatgagaacatgacaattgtgcagttcatgagaagttttgtcggcaaaatgtagtgagccaaactttccatggtgggatctgctgtttctgcgtttcacatagttcgttcgttgttaatgagcaagaacagcaaaagcttcgccagcttatgggcttgttcgtttgcagcccggaatggcctggaattgttctgggcctggaactattcgataaattgtattgggctggaattgttctgggccgttccaggccgagaacgcttaaccgaacgggccctaagtgatgtggagcatatattatctcattgagcatatatttaggcgcatagtaaaagataaaaactacttagctaaaaagacaaaacgatttataatttagaacgaagggagtacgcatgatgaagaatatacgaagacaattattattaataattagccaatatcaagtatttgcaaatcttttagcaatgttacaaattatgtatgcatttttattttgctatatataatctatttgcatttccccgtatcattgttttttagaaacaatggtgtatcagtactagcacatcgtgtatccgtacaaa

SEQ ID NO: 4498 - DNA, 8949 bp, Sorghum bicolor
tacctagcaccatatctgcgtcatacttatacccatacagtaggagttcgcaaaaccccgatacccaatatccatacctgaattactcgaacctgaaatacatgattataacttcggatatagtaactcaagatacctgaaattagtttagatagttcgaataacaatatctgatacccaaaatacccattctacttgatatttagacaaaaagcctaatgcaatatagcctcaactccaccaggccactaggttcattacggcccatcagcccacctgattgtccaggtcctattgcttacctagtctaaaaaatctagcgacgtctctctcttggcctattcttgtctccgtcttttagttctgctccgtccccagtcacagactgacgaatcaagcatcaccgccatactcacccgccttgcaatattgcctgctgctacacttgctcaccgcacgttgccacccacaactatcactattgcctgcgtggctatgtcgtctctctacctctttgtacatggcgccatatctccatcatgcccacataggcagcttgacaagttggcaccacctagcggcgacatgcactagaaagtagaagctacacgattgaaggtgcaatatatacagtatgtctaatcctttctaaactattagtttatgtgaaactcggtgcacggctattagaccgaacccgaatcatcgggtaatgcctcttcggggctaaggtcgggtattaaattatattacccgagttacctgacccaaattttttgttttttttgcattcggtttgaaaacgaaagctctagagcggttgaagactcccatacggcgcagctctcaggtgacgtcttgttaatcatactcacacggtcacaccacacacatgtcttgccatacgctgatacgcatgcagccggttgtccccatccgtctgtttcccccgaaacacacatttgtttagttcaccttaaaaacaaaaaaaaattcgatccgtcacatcgaatcttgtggcacagatatgaaacaataaatatagataaaaacaaaaactaattatacagtttacttataaatcatgatacaaatcttttaaacctagtttctatgatgtcaaaatccctaaacaaggccacatggccggaaccggggaggccgggagtagcgccaagccaacggaatggaaaaacgtcgtcgtggacggcggcctctcccaaacctccaacgcaccccaatccccacacggaaatctcgctcgttcacgcctgacgggtgagcgcccaggcacccactcgggaccgaaacgtttttgttgctgcctgcaatgcaagccccgtccgccgcagcctgccgtacccgtacgcgggcatgggcgcggggcgcgggcgggtcgacgccggccgccgcctccgcataccggggccggctgctagtggtagcagttgcgccattattgcgcttgtgtactgtgtgtaaccgcagcgccgcgcgcgcgtcgtatcgtactcctagtataccacattgtacaggcagcgtgccgctatggcctgctaggcgctaccgcatcaatgcggcgccagccaatgcatgcagtccgtagaagcgctgtacatggccagtcgagcgggagcccacacatgcagaggtggaggccatataggccttgtttagttcacctcgaaaaccaaaaagttttcaagatttttcgtcacatcaaatattgtggcacatgcatgaaacattaaatatagacgaaaacaaaaactaattacacagtttagctgtaaatcacgagacgaatcttttgattatagttagtccataattagataatatttatcacaaacaaacgaaagtgctacagtaccgaaaagttttcacttttcgggaactaaacaaggctaaaaaaacgagaggaaagagacgtgcgccagcggccgagcctgctctgcgcctgcgcggttataaaacgctaggcgccgtagagcaagaccgacgagcgcttggcgaggtggtgctcttggtcttggggtcctgggacactactagcgcgcacagcaaagggaggcggcttcctgggcgtctcgctctcgccatggccaccaggccgggccctttgactgaatggccatggcagaggcttggcaacttcaaggtgcgtacgtacggcatgcgtgctttttcaccgtcgatcttcttccttggttgagatctatcatctagtatgcgatgcgtcggaagcaacgcacggtcgccatggctgtgtgatcctcccggcggtttcgttgctactagctctgtacgtaggactaccgaccgtcgtcgtctctactgcttgcttgcttgcgtttgcgtgatggtgagcttgagagagcttcagctacgaggttactgtgtgtacaccgggcgtgcgtgcgtgggaaaattgaactgagattattctaccactattcaggcatatgtaactgttttttttctcaccatagcttttggcctgtgcatcacatgtactataaagtcccatattataaattaaaagaaagaactgtttatgcttttccgtattagtaataaaataaagaacgtttctgcacagtagtaataacttcccacaaaaaaaacaaagaactgttcataccttttccgtatttatattattgcctcagcaaaagcagcagctaccatgcatgcactagcaagttattagtaaaaaaaaaaacaaaagaagggggcaagaagggcaatttcttatataaatattaagaaaataataaagtaaaaagaccttcgatcgttctcatgatcatttcatttcatgttcttatgtcggagacaaattagtccaacctttttttttatcttctgaaatatactccgtataataaatgtagccacgcgcataacaaaagccaacaatcctgggtacaaataaatgtgtgcgctctcctgaccgttttgggatagacatgcgtatggcatggttacactaccagatcggcagaacccgatcatctgagatcgacaggggatgggaaatgatcatatttcgctctcagtccaaggggtgcatgcagtgcgtggtcctcctcacgctcaaggatgcatgatcctcgccatcaaagccaacctcaaaatgatcttaggctcttcttcaattctattctgagtctgagtgtaatctgactgacaataataatatcagctgctagctgttggtttgcgcgcggtttcatgatgcatttgcgtgcagtacttggtgatgggtcccgtggtggtggacggggcgcggcgggtggtggcgcggggctggggcgacatcgacctggcgttcgcgctcatcctgccgtcgctgctgctgcggatggcgcacaaccagatctggatcagcgcggcgcgctaccagacggcgcggagcaagcaccggatcgtggaccggggcatcgagttcgagcaggtggacagggagcggggctgggacgaccagatcatcctcaacgggctgctcttctacgcgggctacctggccatcccgagcgcgaggcacctgccggcgtggaggacggacggcgccgccgtgatggcgctgctccacgcggggcccgtcgagttcctctactactggttccacagggcgctgcaccaccacttcctctactcgcgctaccactcgcaccaccactcctccatcgtcaccgagcccatcacctgtaagtaatcctcgcctcgtcatgccatgcatgcattgctcttctttctactgtacagtactagctgtgtgaaacaggtctgcgtaattattaattaccgcatccatccatccatccatccatccatccatccgtatgtgctctgctctgactgaagcaagtaacaaaacactctctggttaattacgtgccgctgctagcttgccaggatttatgagatgagagagagagagagagagcgctctggcctctgaagaaaactctcgacatcatgatcgtctatcatgtaatgtttgagccagagccaacgacacttttcacacggcaagtgaaggggggccttgcatgcatccatacatgatagtacatggatggagccgtttgcccatttactcaccagaaccagaaatgtcctgggcggctgggcctgtctgtccaagcccccttgatccatcaacagtgcgaccacaccacaggccacaggtacagtgtagtacgtacagtacaggaccacattgatactctctctcaacgactctgacgcgtctatgtactgggtcgggctgggcccgttccactgtcctgcgtgcaataaaaacggcgcatgtgattgctgattgctctgagaaagctgccgtggcatgtcttttgttcggcaagagttaagacaccctttccaatatggacccaattattgggccgggaaaacacaggccgaactgccaagtgaaagcgactacactcatgcagcgtgcagtgtttcaggatgtttagcgatgaaattgcccctgaggatcattgaaaaccaaccatctttcggaaaattacaccatgtttcaggatgttagcgatgaaattgccccagctgagatcattgagattttggattttgatactgtaggactttcatttgtatttaacaattattgtccaattatagactaactaggctcaaaagatttgtctcataaattacaggcaaactgcaattagtttttgttttcgtttatatttaatgcttcatgcatgtagcacaagatttgatgtgacgaggaatcttgaaaaccttttgaatttcggggtgaactaaacaaggccttagtggacaattgctcctcggttcttactaatgcacttacctaatgcagcggtgatccatccctttgctgaacacatggtctactacgtcctgtttgcgatccccatgctgtcgactgtttacattgggaatgcctctgttctgggtattgtggtctacatcgcctacatcgacttcatgaacaacatggggcactgcaatttcgagctggtgcctaagtggatgttccaagtcttccctcctctcaagtacctcatgtacacgccatcgtaagtgcgatcatccaatcctgctacatgaaacacacacacacacaaaattaagaacaaaatttgggctcattgatttctaacgtctcacaaaacacaatgtaacattttttattgttgttgctgatttcatacaggtttcattctctgcaccacacgcagttccgcacaaactactcgctgttcatgccgttctacgactacatatacaacaccatggacaagtcatctgaccagctgtatgagagctcactcaggggaacagaggaaacacctgaccttgttcacctcacgcacatgaccgatctgcaatcggcctatcatctacggattggattcgcctccatagcgtccagaccgtctgacagctccatgtggtatatgtgggtgctatggcctgtggcgtggctgtcaatggtgcttgcatgggtttatgggtcctctacgtttgtggttgagagaatcaaactagggaagctgaagatgcagacatgggcagtaccaagatacaacttccaagtaatcaacttctcctctacatatggttttctttctatctgatggtgtgcaagctactgacagtttttttttctcccctgcagtatggcctgagctgggagagagaatcgatcaacgacttaatcgaaaaggcgatattagatgctgatgcaagaggtgttaaagtgctcagtctaggactattaaaccaggcaagaaactattgctttacaactcctgttgaaactacaagactagatgcttactgcagtctggccttattcttgtaccttctgggcgcaggcgaaacaactaaatggtggtggtgaactatttaggcagaagtatccaaaattaacagttcgccttgtcgatggaagtggcttagcgactgcggtggtgcttaaaagcattcctcatgacgcaaagcaagtttttcttcatgcaggcccttctaagatagcgtgtgccacagctttcgcattatgtgagaggggcgtccaggtatgtttatatcatcgtgcatatcttttgttgcattgtccctgtatttactttgttacagtttttcactgaaaatgggactacacttgtttggtggatcaggtgatcatgaatccaaagaaggaatatgatatgcttaagtcacagattgcagatagcaaagcaagctatttgaaacactccagcaaccacacgcctcaggtaaacgtttttgttttacaatgggatttcccatttttctatatattaaagaaaaggtatcaattgccagaaaaaaacagagaacccatccagttatgttttattatatgctacttgataaggatgttagtaggcaggtctgaaacataaatagttataaagcatgtacaattaacaaacctaatagattctaaatgatgctggaagtaaagataggaagtcaaagaaaagcatttatcttagcctttgacatgaaatgtgagtacagatttgatgatggtgaaaggctgaaagcagctgttggagcctattaagtagtacaggagcataatgccttagtggattcttctaaaagtgaacaaagaaaataccttgtcgtgcgaaatagcatatactgatggtgaatacttaaacactttgttttaaaatgggaatttactaataaacataattagcgtgctaaagaaaaggtgttaattgccaagcagaaccgagccagttaagtttgatatatactccatatgtgctccttcatagacgttagtattcggcagacctgaaacattacaggtatattaagcatgtccagtctcgcaaaaaaaaaaaaaaaaaaaattaagcatgtccagttaaaacgctacagataatcatgttggaaataaacaagagaaaacatttaatttatccttttttcatgaaatgtgaatacaggctcaaaaaaagttacttggaaaccaagtaggactggaacagagtgccttgatagtagtaaccaaggatatccttttaaaaaaactttgttcagaaaaaaatattttgtcatgaagttcagcttatacttatggtgtttgcttaaactgctgcagatttggctagtagacaacattgacgataaagaacagaagatggcaccacaaggagctatattcgttcctatctcacagttccccatcaagaaaattcgcaaggattgcacttacttgagcactccagcaatgaagatccctgaaacaatgcagaatatccatgcctgcgaggtaacaaagataacgaatatagttaatccactttattaaatttggggagaaaaaaaaaggggtaatatagggatatattttactgagccttttcagcatggttttctttgattcattgacagaactggctgccaagaagggtgatgagcgcttggcgcatcggaggaatacttcacgccctggaagggtggaccatgcacgagtgtggggatgccatgatgcatactgagaaagcatggtcagctgctattaggcacggattcattcctctgactaaagcttgagattgagagctttcgaaacccggatttgtggagctaggagatgtatgcactgcaactctagatgggcattcgacaatgctggcaaactatgtttcagcgtgattctgcccggtataaaagccaactatggtcttgatgagtcgtcagggacggggaggcacatcatgaacgcctaccttgattccaaaagcttagtaattatacatatgctgtatcattgtatgatgcaagtgtgagaaactacttttatggctgtgtgggtgacgtatacaattattataataaaatgacggtttgggttgtccctttggaatttgaacccgccgaagaatggctgaaaaacaggtaaggaatttttgatacgcaatcttaatctcggcggtaagagctgacttctatttcagcctttcagggattcaggaaatggtacacacgcagtcatccatccatagtccaaaagagcatactggtatgttcctgcttcagaacctgtatatccaggcacgatgcaatctagatagattgtcgttgatccgacgaaagagatgcagtgcgagaaccgagagatgcagttgagcgaggaaacctgcaacggatttggtatacgttggtgcaaagatcgtagctcgctgaagatcatcgagttcgagtccagagtttcctttgactgcggagatcggcgcaggggcgaagacaaagagaggcaggggcacagtcttcacaagtacttctcattatagttatcactaatcactagtcaactaattctagatttttttttctaaaatgcatatcttgatcggttaatgttaagcgcttaaataaagtaaatataatattttttatgaaaccagagggtaaaacacccctactgaaatttattaaaatgctagagcagtccaacaacaacagttcaacaaacaaagaacgaaataaagaaaataagaactaagacgtaaaagagcgtagccataaatctaattgagggtggagctttgcctttgctcttagtaaaactagagcaaactttttctaaaagatttgacagtatttctgaaccgaatgggggagctgtctggagttatatcattacgcagagtccagattgaccaatatattgcaataatgatcttcatgaagaaagaaaggtttagttgagctttgaaagtaaatataatatgaatcgctaatctatgaataatgtctcttttttatcttcaatttagacattatcgttttctaagatgaattttgaaatataatatgaattttctaagatgtctcttttttttacccatctccatatatctcaatcctgcattggtgacagaactgggcagatgc

SEQ ID NO: 4499 - DNA, 3913 bp, Sorghum bicolor
ccatggccacttggggtgtactaccttttggtgaacaaggacctggattgaaagaggatgaatccaatgagatgttttttttgcccattgctaattatattaaatgagctatagcttgcatactacatgtatgcttaatttcttctatgatcatgtcagacatcgcattcgagttggcgtgtggcgcatgctgcacttgtagtcgtaacgacatttcccgtgctgcatgcatgctatcttattacagtagacacaataaaacgattggctacgcgcgcaaataagctcttagcttgttgtgtgtgtgattcgaaccaagactccttgcctgacgcgcctttttaccaactcaattgtacactatatctaacatagttctcggcgctctctgtttaaattaactcatgaaagatatttagtctcgggtgtaagacctttagtccaagtttatgacatcaactaagactaaaaggataccctttagtcctagttagtgttattaacagggactaaatctttaaccgagactaaaaagtaacttttagtctaaggttcctgctgcaaaagcctgctacactatctgcaggcagaggattttagtctcgattggtaattttaaccgggactaaatcctttattagtcctagatcaaatttcaagtgggactaatagccaagattgaaagtttgctttttaccagtgatgggtggttattaataagatatttttagctatattattatagtacaaaacgtagtttattagaacaggtataataatgggtttatagccaaactaatgttgatgtagaagagagaagatagaagaaagaggataacttgactcttatacaagcatcaagctgggcacggatgcataggtagcgatagacctacatagcaagtgttatgaggagaaataggaaaaagaagatatcttagagacaaatatgagacatcttactatataacttggctctaatcatttagcttatagttaaacacttggatttattattaactttactcttagttgggcgaaggccgcagatcatcagacggagctgctacatagagtatactatatatatatttttttaataaaggaatatacattccagcctgcacattcctatatatcaagctaacttcagtgaaacagggtacgcgtgatatatactgcaattaacctggtctttcaataaaatatcggtctcaataacttgaagcataaacttattattattaggcaatgtgttcatgtgagctgcaggtgcatgcagtggcccctgccaatgacacgagtagtttagtagccggctggacaattagtcacaggggcttgtgcgcagggaaacctccaaaaccggcacacaacttacaagcgggatcccttactacttgtcaaattgttcatccaatctactagcaaattgagaacatgctgctcatctgcgcactggcgtggcgcggctgcttgcttctgcttgtgtgcaactgtgttggatggatcggacgacacgcggcgagcctgggcctagtgccctagagctgcaaggtgctcacagccaacacgcttgcgtgcagcgcagctactggtaagggacgaactcaggtgggccggccatttccgcacagaaacggcctgcgacactgcccagtttctcacaggcccgccaacgggtacgcaattcacttctgcttcggcccatggccgcgacaatggtcccggtccccgtcccgcgaatccccctcggccacacgacgacgcgcccgacgcttccagagcgttccacaccattctcaccacgatcccacgagcacctctccctcccaactcccaaccgcagcctcaagtcgatcccgcgaacacctccctcgacctcacgccaccgtccagccccgtagccagccccagtgctccggcgatccggcctctccagactccagagtccagacgcgcgcgtctccgcccccctcggccgaccccgacgcagccacatgtcgacgcagtccatttcgccggcgtccgcggccgcgcagttcacctaccccgctgcggcggcggccgcggccgcggccacgggctcgtcctacttccccgtgccattccacctccagaacgcgcagtacgccgcatggccagcgggggccgcagctgccgcgccgccggtgcctgcgtacaacgccatctaccctatgccccaaatccagcaggtatataatacaaccatacgggagctgcaccttacgattagagtttcaagggctatgtctttggtaatttatttgggtatatgcggaagtaaaggtgattgtggatttgccgatggccgatgggagcaacctagctagacgcgtgcgttctgtctccgcgggttggggagtggaaagcactctctgcagttttgtctactcttgatgtggccattctattaatactcctatcttctatcttgtctgcttggttagacacctaggacataataaaaaaccatgtgattagaggattagtgatggtatgccactatatatgtagggattttaggttttttattgttatcctacctttgatagctaatgattctgacaaagatccatcctcattcagacatctctctagttcagtgtaattttcagaggaaactattcattgtcttgcaaggtttagctgcaaatggaaactaaataattgattcgtggtgcaattcttaacaatgcttccctgtgttatgtggctctttggccatgaggtctttatacaactatttgtgcaagatagcttaggtatgcaacgagtaatatgtgtgggttagtgctggttctttttcgagaaccattcacaccacatccaaaatgaaatgagggtggcagtatgggttttacatactgtttgtactcccaagagatatacctattgtcatgtgatatcttctcccttgcagtataccattgcttcatgagatcttacgtctacaattatcctttttattcctttgtttatgtttacgctgtacggagtaagtctatttgaaataaggtttatgctgaattcgtttttgtgacttgcctgcctatttttgtgtcttccaggcccaacagttgttccaaaaagactcgaacataattactcctgaagctctagctactgttaaggcagctattgcaaatagtgagaaagacaagaaggttgaagcaacaaaaaaggcagtgcctcgaaaggcggctgggcaaagttgggaagaccctaccttggctgattggcctgaaagtaagatatctaattctcaattgtcttttttttttcacaaagtttctcaaataccccaattctgtggttatggaatccttaacctggcaatgtggcggttttttagctcttattttccattatcttgcagacaacaaccatgagaaaatgtcattctcacaggcaagatctaatgctctatctattatgctttgatctgaaacaaattgctcttttttcctttctctaaaggtgctcaaggatgtgatgtgtagcccaacgattgccacacgggatttaggtgggcttgcagatgattactaaacattttcaaattacctaattcctatgcttacctgttttctcacatgtaattcgatattgtttcatgtgcctttattaatcttggacatgcctatgctgttatatgaaatgaaatatcatattcttctagtgatgttcgatgcaaacatatgtgtagggtttcagtctctctgtgcattaacatgcacacaccccttactgatatatccctccattacgtagttatccatattggccagtgaagagtcatgtaaagactggtggcatacttgttctgtcaactgttgatttgttggtcgtaggaactttgtcttggctgctttcttcattgattctttcc

SEQ ID NO: 4500 - DNA, 5159 bp, Sorghum bicolor
cttatcctccataatcactaccacactcacacccaagcagtagcatgagcgtagccagccggggcaccaagcagtagtagccgacaacaacgcgacccacattgctcacatacaccaagcaacccacattgcagatggcctagcagcccacaccacccaatcctcgagcaaagtccatctctaccacctcctttcacaccgaactatacatctgctaattgtagaccacctctacggtttgaggatggctagtaggagcaatattgaaatctagaacaaattacaatttaacaccaatgacatatgaaaattttgtatttaggtggcagataagggatttagctttcttatgtcaagggcatgtaagatttttttttctaatttttgtatggatattgcattataaaatgagtacagagaaagatcaagcaaggaataaaataatttaattttgattagttgtagatactaactaaacttatcgacaaacttttattagtatatatatgtctcacgaattgatggatgctagttatgatgacaactgcactgtttaccatgaaaactatacccccctcttcagtgaggttttatagatgagtacacggtacctaaaccctctcataaccacatgtcatacacaaaaagctagctaagaaggcgtagcatctaacacacgtactggcacacacgcatcagcccgatcgacgacgcatatgattcatttccccccggatcatggcagtactctaaattcccgcatgacgttgatgcctgaagcagcttgaaccccgtcacgcccgtcgtccaagatgcatactctacatgcatacacgaacggaacacacatgaagctaggcgagagcttggtatatactagatgatattgacgtctccattcggcgtgtacgaccctcgcgcacgtcacattcgccgcgtacgcgacctagctagctagctagccgtatagctaattaacgacctcaatcaagctgatacctgggccttgtttagttcactctgaaaaccaaaaagtttttaagatttcccgtcacatcgaatcttatagcacatgcacgaaacattaaatatagacgaaaacaaaaactaattacacagtttagcggtaaatcacgagatgaatcttttaatcctagttagtccataattgaataatatttgtcacaaacaaaagtgctacagtaacgaaaatttttcacttttcggaactaaacaaggccctgatagatggcccggcctgttcccgcgtcattaatttgcagctatcagtagtctgctttgcctccccccggaagcatgcacattgcacgcacgtaaaacgaccacacgccatggctggccggccggatcggggagctgaaaactgtacagtagtacgtacccatgactttttacatcgatttcgcccgtgtgtcacgctgtgctagagcctaaggcagattatttcgcctgtgtgtcacgctgtgctagagtctaaggcagacaatttttttgagcccaattaacctataattgaacactaatagctaaataaaatgaaaatattacaataacggaataacctattccaaaaaatttcgtaaacaaagcctgctgccggcacttaattgggcgagcaatctgatgatgatctcgcgcatgctccgtagcaggtggatcggatccgacgggaaccctcttgcggagcacgggcggcatgacaggatgctgtgctcggaatctttccacctgtgcctactgcctagctagctagctagtagacggttcgtttcagttgctgcctcagcagatagggaccggaggtattagtttcagttttagctagctttgccgcctctagaggtctatataacagagttctctcgcaaccaactccggtcatcacacacacagacacacactggaatcgatcggataaagcaggtcaggcttagctttgcagctagcagggttattggacccatatcgtcgatcgatccatggcactgagggagatcgagtcgacgttgccaccggggttcaggttctaccccagcgacgaggagctggtgtgccactacctccacaagaaggtggccaacgagcgcatcgcgcaggggacgctcgtcgaggtcgacctgcacgcgcgcgagccctgggagctcccaggtcagtcagtcaatcagtcagtcagtcagtcagtcagtcagtcatattaatgagctccatcgatctctcgatccgtcgtccaagctagaatttgctcctacatatatacatatactatcagaatcgaaccgatcgatctgaaatcgtcgtttattattaactgggaggatcgatctgaattcgcagaggtggcgaagctgacggccaccgagtggtacttcttcagcttccgggaccgcaagtacgcgacggggtcgcgcaccaaccgcgccaccaagacgggctactggaaggccacgggcaaggaccgcgaggtgcgcagcagcagcagcagcggcgccgtcgtcggcatgcgcaagacgctcgtcttctaccggggcagagcccccaacggcgtcaagtccggctgggtcatgcacgagttccgcctcgacaccccgcattcgccaccgagggtatgtaaatacgttaattatgttacgtcgtcgtgcattacgtaagacacgcacattgctacacgtaattaataagtaacacaggttaagttactcccagtagtccagctgcgtactaatcaatcaattgctgaattgactggtttatctactacaagaaataatcctttctaaaaacaattctagaaattgtctagtgaaggacgtactgtagtacggagtatctatcaaaggaaagaaaattaagcttggtgcactgaacaattaattgattagctgagcaagcaagcggatatatcggcccgtgaatcacgggtggtgatcgaatgtactactggaactaggtgttgtggctagtacaaagacctcacattacacggggaagacagtgacacgtacaagcttaggtatgtacataattcacaatcattcgtggaattgcgtgcgtcgtcgacttaattagcatgcaaaacaccaacacgtgaagaaacgtccgctcttgtctccaacgtcgtccctgcgactctgcgagcgaggctgcgatgttcccgacccacttattatactatcttcatttgatgatgggccgagaattcggcctaccaagtactacagtatacaaacatgcatgatcccaactctacacaccaccaccaattgtgaatgaattctagcgtttctcaaaaaaaaaaaaaaaaaaaagcgaattcaagcgggcctgggtctgggtgcagttgtcgtctcttcttccaaacctaggccttgtttagttcatctcgaaatccaaaaacttttcaaaatttcctgtcaaatcgaatcttatgacatatgcatggagtattaaatatagacgaaaacaaaaattaattgcacagtttatctgtaaatcacgaggtgaatcttttgaacctagttagaccataattggacaatatttgtcaaataaaaacaaaaatactacggtatcgaaattcaaaaaattttcggaactatacaatgccctaattaacagccactagtcgacgagcaaccatgcatgcacatgcctgctcctccacaaggagtggacaagctagctaggcgtggcccaggagcatcaggcacgggtgatcctgtgcgcgcccgcgcctgtccttgtgcgactgcaaagcatcagcgcaagcacgtcctcgatcagcgcgcacacacacagacgtgcagaaaaattggtcatgctcatgcacaggtggcgcagacacgttgtacgtacgaggagtgtaaagcaggggcagggggcagagagtggaccagccatatttgactgcctgctccccctttcacaaataattggtgcatactagacctatcatttctccctcgtggcctatagcggtcctaattcctgtaactaaggacaagtagtactccaaggcggatggcttcaccttcatggcttcatgtactaggagttgcatgcactaaacaaatctatactttatgtcgggcaattatatgtgtcagcatttctcaattctggaatgaacagtgcaataaaactgctgccgtgtgcgtacgttacgtgcaggaggactgggtgctgtgcagggtgttccagaagacgaaaggcgacggcggcgacggccaagacggcgactactcctcctcctcgcccgcctttgccggcacgtcgcaagccatgccggacccggactactattccgcggcgtcgtcagcaggatcaggctactacggcctcgcatttgcgccgccgccgccgcagcagcaggaggaggtggcggcgcccgtgcttccacagtattactacggcggcacggtcgacgtcgaccaccaccaccaccaccacggcttcacgcgagacgacaacgtgggcgccgcgttgccagggttcggcggcgcgatgatgaggggatcatcagtcgccgccggcggtgatcagtacgggtttggatactttgacatgggcgggggcggctttgatgacatggccagctttggtggtggagacatggacttcgtccctcaagtgtggagctagctgattgtgcaaacatcgcccggacgtatacaacgtcctcttgaagaagaagacgttacattgttattactggatcaattaaatttattaattgtttaatacacatggggtttggcaggtagatttagctatagattgggtttgaattaaatgttattgtgagctagcttgacaaaggttcattacgtgaaaaatcaaatgtaaattaattgggagatcctttatttgttttctaaattatcaagtatatatatatactaattgattattgtggatgtaaaatacagtacgtgtatatcattcgtcttttgtttttcttgaggagaggagtggggtgtcatgtactcatgtgtggtgacaatcataattctgcatgcgcctgaatcaatttgggtggacaaaacaactttatggtccggcaattgggaggttgaaataaaggcccagcaagttattcacaacagtgtcaactggcgaatgcttaccgaaatgtctggcat

SEQ ID NO: 4501 - DNA, 3414 bp, Sorghum bicolor
tttgcattagaaatcatgtcctactcattatttttttccacgtcttttaacctccaaattatccgatcgatacacacacatatatttctgcatggttgaatcagttttctaagtgtggaaagattgagaggtgagatgacgagttgttggagttttcagtcttgcccaaaaaaatcaagattgggagtgagtttttggagactattggaagtttgcatgtaacacatggacccacgccaaaaaccgaactctcacattcacattttatacaaacctatacatatgcacacgtctaaaaatcgttgggtatgattcaatataacatagagttacttggtgccaattagtactgtcagctcaatatataggctccacatcaaagacggatcctgaactaaaccatcgctttactaaaactgattaagggcccgttcgtttgaaggggattggttctctggaaatattctaggtggaattcttattctaatttgaataggttttgtcagctggaattattcccggccagatttcaacttaaccgaacgggccctaaatttctttgatataattcagtgtacgcgatactattttgtgctgattagacaagagcaaacctggccgtacctaggccagcccatgaaccttattgcatgggggcgtagagagaggaccgtgaccctttttttccccaaggcaagcacgttgtttgtgcacaggaatttgactcctgagctcgcgcccggatgtgttccattacgcctgtacttgctcggcggattctgcacgaacccgccttcgtccttggcctgcacacagcacggtcgctcttttaacaatctctggagaaaatctgtgcccatagcaaacgtcagtggcagcgaacagctgctgtatacgccggtttcgtcaaatcgacgagctggcttggcctttttgctttcctggtcacgggcctgtgatcttcatgagctctacgaggacgacaaatatatatccactgccaaaatcaccactgcgtgctgcatgaaataaaacgagttattatggtagcacatgcattgcaaatatgggtcacggagctgtagaatcgtaatgcgaagctagcaataatctcgccagccgatcgagagagcgtttggatgcggggactaaagtttaacgggtgtcataacatatgttatatagggtgtcgtatgaggtatttatatattaattccatcagtacttcgcgagataaattaattaaacctaattaatccgtcagcagcacatgttttgtagcactatattctcaaattgtggactaattaggtttacaaaattcatctcgcaaattaatcgtaatctatataattagttatttctattagtttatatctagtactttatacatgtatctaaacattcaatatgatacgagctcaagtttaaccaaacggggtaatctcattgatgagatggcagacaaatatggatcacggagtctgctgcagagatatccgatatccaagcacatcgcagtcgcaggtgctcatttaagcgaggagatccttggatacggaacaggagaaggagacgagatcctcctgtcctgcgcggcgccaggcggggaggagttaatacctgcgtcccctgcgttcgcaatcgcagcaagaaaaagatcctcggcgttactagcccgctcgcacgaacgcgaggcacgtgtgcatcgccccgtatcaagatcgacgacctcaccggccccgtatcggagatctcgcggattttcactcgccgcacagccgcactgggatctcctgaccgatcgcttccgtcccaccttccgtaacaggcaagaagcccgccgcccctccgcgtgtattatatataaagcgcgcggtgccggcccgtggctgggcaagacggcggcggcggcggcggcgtcgacggggggatcttgcgctagctgatcatcgatcgctcttctcacgcgccgctgttcgcagtgtgatagctttgagatggccagcgtcgtcggtggagcagcagcggtcgcgagtgcggcggcggcggcggcggcggcggccggtggggcggcgggcgtgggggcgacgccgcacgtcctcgcggtggacgacagctccgtcgaccgcgccatcatcgctgccatcctacggagctcccggtttcgtggtgcgtgttgtttgcgtggtgtgacactgttgcattgcaggctcttgtggtttttcagtactcatccactgcttgatttttagtttttttcattcaagttgtgtttggtctcgtgttcgtgcagtgacggcggtggaaagtgggaagagggccctggaactgttgggcacggtaactgtgtttcttcttttttttactaattctctgtcgttgattttgttggcgttcttttacacggagatttacgcctttctcacacttgtcttcgggttgtaataattcatataggagccgaacgtgagtatgataatcactgattactggatgccagagatgacgggatacgagctcctcaagaaggtcaaggtaatataatctgacgactatatagtccattctgcaatgtaaaatctgagtgagccttttagcatcactgaaactaatgaaaaatccgtgcaatgcatgcaggagtcatccaagctgaagcagatcccggtggtgatcatgtcctcagagaacgtctccaccagaatcagcaggtaataataagcaaatcctcgtcatcatagcaaaagatagcagcacccgtacctacactacacacatctaagcatctaacccctgtgtgttgccccccgtggctgatctaatcagatgcctggaggaaggggcagaggatttcctggtgaagcccgtccgcgcgtcggacgtgtcgcgcgtcttcagccgcgtcctccgatgagcacccgatctccgtggagcgagcgcggcgcgcgcgcggcttcggatttttgtagggctcgggttggcaggcgcgggaaacgaacgacgtacgggcagtcggtgtcggtgtctgtaatccaagtgcttcgatatagccgtgtggttacgttttcttgtggtggagccaagtctacaaaggctggtctccgtgcgtgtttaaactttgttttttttttttgaaccttgttggattttgcagttcagagcaagcgtctgtttcttcttcggttgtgtatgggcttctgcagttgttttggtttggtttggcctggtctagggatcggaattggttgatgaaagatggtgacaatttgacggtgcacttgccttaactatgcgatgtgattcagtgattgactagcgctctcggcctctaactcccttcgcttacgatcgcaggaaacgtggtctcaaaaaattccacttgaattcagactttgtttaagattgcttcactcc

SEQ ID NO: 4502 - DNA, 6428 bp, Sorghum bicolor
tgatgactatgagttagccaagttggtttgtcagtgcaggtttctatggtttaaaaactgagattgagaaggtcattctcttctatatctaaaaggtcctaaatggctagggggtgaatagcctaactaaaattctacaaaatcattagagcaaagtattagacaacaggatggcataaatgtggttttgttctagctctacaaaatactatgcaagccatctaatgaatgctaatttctgtgatctctatatcagtatcacacaagcaatcaatctatgttgctactactaacacaactagtagtgagctagcaagataactagttacaatttattacaactaaccattcaactagcaagacaagtaactactacacaaaaatgatatgtaagtatgaaatacaagtgtagtagagagtgataccgaatcggaaaaatccaatgagacaatgagacacgatatttatcccatggtttggcttcttgccggtaacttagtccatgttgtgacgacacactcacttggtggttcacgcgctaataggcatcacacgcctagtcctacacataggcgccataagaactaacacaagagagggtacacaagtcacaagtaatttactaaagttgccttttgtgatcgcccacagggtatatgcataagaaccactcataataacaacgatcagagccagagacaatcaccaccctccgctcaatgatcccgttgctccaagccatctaggtgacggaaaccaccaagagtaacgagaactcccacagctcacacgatcgctagtgccactagatactcaaactctaagcaaatgcaactagtatcactctcaatctcacaaatgatgatcaacatatgaactagatgagtgggagtgtggagtatgctcacaaggtgtatcaacaagttagagatccaggagagtgaacaacacccagccaacctctattgagttttcaatgtgcgagagagtgggagagcacggagtatgctcacaaggtgtatcgaagaaatgctaacaccacttgtgtaaatagcttttcttgcaaaagtgttagcttttcacaaatcatttctcaacaattgttagcacactttaggtcctaatgcatatgcatggagttaaaacacctagtggcactagataaccgtaatcacagtgaaagttcctctcttaatactatgactatctattctaaacccaatcacgcactctattgtgtcttgattggcaaaacaaaatagccctagatagctttatacctttgccttgagccctattttgttactctttcttcttttccaagctagagcatttgatcagcaccttttagccttctccatcacatgagtgccatctagctccaccttggttgtgaaccaaccttacttcaatcacaacacttagagagaaggttagtccaccatggtttcatcaattagccaaaaccaaaatagggcttttaacatccccgcatgaaagtgctgcctaagttgaagtacgcccctcccccttcctcgtcgatcatgatcacccctatccctgctagcattgctcttctcctcctccatcgagatctgacgctctccctcctccatcagtggcccctccccttctccttcgtcgatgcccttcctcttctcctcctccatcgatgtggaagagtgcagccctgggcccaagatgccaccgtgtgctaggagaggctcatgcatcggtgaagaggagcattttgtgcatggggtcagggctgcaacctgcaagccattgaggaggccgaagcccacctcctcccttgcatcccagagctaacgatgcaaatacaaaggtggagtagctggcgcggagggagatgagttgacggtggtctctgctagtgcgaattcttaggtgcattgctgtcattttctttgagtattgatagcagtgttatcttttagaaggaccattattataagacggagggagtataccgagactttagttctcaactcattttcttgcacttgtaccaatatattagaatcccccttccttacaagtcttaggccctatttaaatttcatggtctaagttttagttatcgaaagtcaatggctaaatgttagaccattttagatagcagtttggagcctcaagaactaaagtgatttaaagtttaggtgctaaattttagaccttcatgaatcaaagaagaccttaattttctgtgattggtacctttgcaaaaaaaagaaagaaagaaaacgagccacgagtgacgagcctactcgaagcatcgtgatatactagaataggaggttcctccctccctccctgcctcaatccaccaaaccaaaacccgcccggttctcaggatccgctccacgcgagctcccctgtccccagctccccgcctccgcgtcgcgctcgcgcccaagcaagtgctagcaggctagcagcaaagcaagccttccctgatggctctggtgccctcaggctcgggtgccggccaggtgatcgccgaggtggcgatgaacggcggcgccgacccgaacgcgaccaccgtgcgcgctaccgtcgtgcaggcgtccaccatcttccacgacacgcccgccactctcggtgagcacacgctcgtgttccagcccccttctctgttctgcgactgttattccgtcagtgagcgtctacgcaagctgttcgtccgattgcctctgacggcgcgcacggagctgggatgtgacggcgcgccgctgagatgttactgtacgagttgttgaaatggggggaaagggtgggtggagatgctaaggaggctgattccgcggtgctcctgtgatgcagagctcctcgccccattcgcagtgccagagtggaggcttccccctattatttatgcaaaaacagccagtgccagccaaaaatgattaaccggaattgcaactaatcattgaagaaattaaaagtgggattacagaaaataaaaatccaagtcttaaataaaaggatgtggttggaactacatatagtttcttctacaacactttagattcatttctattgtattatcttgaatctacatagaattgattagtagattaaaatagtagtctagttcaacttattctttttcactgcatccacttaatttcaatcaaataaaaataaaaataagtgataattcttcatcaaaagaatccataaaggggagaaagttaatgtgagaatagattactgtatatagtaaaaaagaaaaaaaaaactatcaattccctgcttcttctagctcattactttagaagtttaatagctaatgatcagcattaagcttatcatgagtaagaatctgttcattctatttcatacgtttcactggaggatctttaagcagaaaacacaatacttgagtttaactaaggctggctattagaagggggatgtttcgatgatcgtgtgggcatatatgtcccggtatttgttttttatctgacttgtttaaagaaactgcagatagtgtaacaaataaaattttcaacaaaaaaagccactgcggttatgctttcaaggcttgccgttgtagtgggctgtgttatggataaagtttccatgttcaccacatcccatcaatgccattgcccaggagaggaacagggatggatgactttctacttttacctggatatatatgagctattacatactatcgttgggaggggaagatgcatttcaatgaacttttatatgaatatggtttgttgtcaactattttctctacagataaagcagagagattgatagcagaagctgctgggtatggttcacagttagttgtctttccggaagcttttattggaggctatcctcgtggatccacatttggcttcgggatcagtattagtattattaatccaaaagacaagggaaaggaagcattccggaggtatcatgcagctgctatagatgtgcctggtatgtggaaatactatggacatacctctgcattattattattattaattctcttatatcattgttgaactggctctcaaggcacttaggtgttaacacttctccatttgtcccctgaatgttgggaatatcattatgtatttttgtgcttgatatatggcaatttgtataactttggtcaggaagaagttcttgtatggatttccagaatatgctaactattcgttaattcttttcacacttcctgattcagatgatcaagtagatgaacaatagtgcttgtagtgaatatttggaaaatcatctaagttgtcccttttgttggtacttgctagtgctgcttcatcgacatgttgtgaccatgttactccatttccagcattgagctctattacccagtaacttgagatcctttttaaatttagcggctaaatattgtagttatttagttctctgtttatcacagccaatgcatttttccatctttttcatcactgtggacatatagtttgctccgttaggcgtatatatctacttgctgacagaataatctacaggtccagaggttacacgattagctgctatggctggaaaatataaggttttcttggttatgggggtgattgaaagggaaggttataccctttattgttcagtgcttttctttgatcctcttggccgttacctgggtaagcaccgcaagctcatgccaacagcattagagagaattatatggggatttggggatggatcgactattcctgtttatgatactccacttggaaagattggggcgctcatttgctgggaaaataaaatgccacttttgaggacagcgctgtatggtaaaggtaagagtcagtctcatgttgataaatttccaagatagcttacattcattggatggaagccttgaattgaaatggaaataaacctgcaacaaaagtcagataagcaattgctgaagaggcattgacaccagaatatgtattgagtttcttagcttatgtaatgtgcaggtattgagatatactgtgcccccactgctgactccaggcctgtttggcaagcctccatgacacacattgctttggaggggggatgctttgtcttgtcagcaaaccaattctgccgcagaaaggactaccctcccccaccggagtatgagtttgctggtttaggtgaagagccatctgcagacactgttgtttgctctggaggcagcgttatcatttctccatctggagaagtcttagcaggtcccaactatgagggagaggcactgattacagccgaccttggtaagaacgcaaacactcaaatatgctttactcatgcagttatgaatagttctgttgtgtttccgtagttgtttcagtaccaattttgaagtgttgaaaactgtaccatattcttgttgccatttgcagacctgggagagattgttcgagccaagtttgatttcgacgtggtgggccactattctcgacctgaagtccttagcttggtagtgaatgaccagccacatctccctgtgtctttcacgtctgccggtgagaagactccagctgccaagagtgacagcgatgctaagtcttactgattgagtgtggccatgaaactatgttgtaccgaagccttggtgaaggtcgctcagctcctctggtttgctgtttgtgtgtcgtggatgggagttgggaattgtagcttttgaactctaaaagttctctttaatgaggcggaaaaaatagtagatgcagttatgttgcttgtaaagtcttgtattcggtgaataactctgccagaactatgaatcctattactatcgttgtagtttcgaatagtaccaaatgataatcgcccgttttgggctgcatatgtttattttgtcttgttttctaagaagaactatgaatcctgagttagctagaattggagaaccaaatctgaacatgattatattctcaggctaactgttagctattctctcagcaactaaaggtctttaaagatctactgcatctatttttttatgccttttcagcatatcttgttggaactcaagggacattcactggaacctcatcttgcaaccgtccggtgtaatttgtgcggcctgaccacgaacagcgtcgtttacatagggctgcatgagatatttcatggctccgagtatggaaaggtcaattaagcatgaaaattgcaagtacatactatattcgcatttcatgtagcaatttcagaaaacaaatacaattttgaatatccccataggttaacaagtagcgttttagaatcgtattaagtcaattgttctagactaggactacaaatttttttatgttctgagtttgaatgttagggagtgggtatgtatagatttgccttgaaaaccagttccataatatatacttctatcaatgatggtatggtgtatgtatagtaccaatgcaaacaaa

SEQ ID NO: 4503 - DNA, 3825 bp, Sorghum bicolor
cgcgagcgacgcgcgacgacgccattagcattagcgcagcggtgatgatgatttggtggcgctaatcgtacgagaacgcccatcattaggagcgttgatggagggattagtagtattatagtcatagtagtagtagttaacaaacgcgccgcaaatatcatgtcatatatctgcagggtggctctggtttggacgggtatgtgtgtgcatcatctttgccgctgggttagtttggcttttaatttgaagcttcgtggctgtgagatgcggcaatcataagcgttatatatatatatgcatgtatctctccgcgggcgggacggaatggaattcataagaaaaactgcgtcgccgcatggccattatgcggtttggcgccgcgccgccggccacccccgttcccctttggcctttgccgtgcactggccactcggagatgccgtgactgtcacgaggtactgggcggcgtgagttatggggcctgtacgcagtacgcgtttcattgattggacgcacccgcggcaccaccagcaactgtagtagtacatgtatactgcctacagcgtcgcatctccagttgtgatccacgcatggttacttcagattcaggttcaggtatttgacaaaagatggtccttgctgctaggatctaggtaccgtcggtagtattgttatcctatagcatcggtacgatgagaagcaattcatgattcatccaccccaaacacggtgcgttttacgagcgatcgtttatactgtctgcatcaactaaacgcgtgggatagagacgctaatcatagttgtaggctgcagctttgtagtgccagccacggtagtggagcagcccattgcagcaagaatctcaaagccgttacatccgcaaacagctgttcgctggagtggttctgtatctctctgttttcttcattttttttcccctagcgtctcctagaaatgcagaggcctgtccggctccggcccggagagaacaagacgatcacattcacagccagcggtgtacaaaactacaaatcccattgaacaaatctaggcaagatcatgcacggcagaagcatggaatttactagcctaggtggctaggtgcgtgcatgccagccttgccttggctctgcacgtacgtacgtctcatggatggtacaccaaaaccgtgcgcatttgcctttttcccccccttccttctccagttgctgcctgcagatacagagtacataagtcaatcatgtcaactgttaagatctgctctgaataccctctaatcaagacatgttcttattatgatggccatatacttatataatactaagacgagctcctgaaaattacatatactagtagaacaaagcgtacttggctcatttcataatgacgcactttggcatagagcaattctctcctatatgctatgcaacaatacaaaagtactcttttgattggatcggcctaagctaatggtgatggatgatcatatgaactacctagcttttatttttattttttagaaaaaattaatctatgtagcttcaaagagaaaccagtagtgtagatcatataattttaagaaagtatattcataaaaaagagcaaggaccacaaaagggactctcatatgattagttctcccaaatccgaataatttagccgctaaacactacaccaacacatgaaccgaacaccacgctgatctcgatgtcaccgcaaacgtgtccaagcagcataccactgtttatacactactacccagcatggcaactaacacacacatcatttttgtctacacgtcagcatcacgacgagattatgcagctgtgagtgactgagtgcatgttggcataagctttctctccatgatgacgcttagtttttttaagcgctgccaccaactgaaagctggaggccgcctgctttttaacaaacacctagtataaacagatcatcatcactctctctctctcacacacacgcaagtcacacacagcaccatgcttcacaggaggagccgcacgctgggagggagcgccgatcgagctgctgcgcgccgagctgtcgcgacgatgaagggcgggaggggcagcaatggcgcggtcacggacctgctcgtctgcttcccgtcgcgggcgcacctcgcgctcatgccgcccaaggccatctgcagcccgtcgcggccgtccgcgtccgagccggtggtgaagcgccgccacagcaccagccgggcggggccgatgccgcccagcgggctctacaagtcggccacggccaggaacccgagccggcgcggcgcgggagatgtccccgtggacgacgagccgacgtcgcccaaggtgacgtgcgtggggcagatcaaggcacgcccggccaagcccaagggccccggcggcggaagcggtggcggtggcggtggcggtgggaagaagaccaagaaggccacgtggctgcaggctctggggatcaagaaggacgccatggcgctcttggacgccctgcacggcgctttcaggttcaacgtcgccggctgcttcggcagcttccccggcgccgtgggcgtggggtacacttccggggaggacgaggacgaggatgaagacgatgcgccgcgcaccgagaaggaaacagagcacggcgcggcgttggcccggtggttcatggtgttggaggaaggcaagaaagtgtctgccaagaagctgcagggacaagacccggaacagagccaggaggacgacaaggaggaagaagcggtcccgccggcgaacgcgctgatgctgatgcggtgccggtcggcgccggcaaagggattagcgaggaggctagaggcagaggagtgcgaggatgtgaagagcgccaagaagactccagaggaagagaaggagaaggagagccttgtgctcatgacatactcgccggacttcttcaaggtatcccttgacattgccaaggagacttggatcgtcggcggtgatgacgcagtcctgcgctgccggagctggaagcgatgatcgcagtgatcatttcaacaaggaatgtatgtgccttttgtttaccttttactccttcgcttgttttttttttcttctcctttttttcgaccctgttgagaattctactactctttgcataaggctcgtgtgaagggtatgatcagcacacagcagaattggtttagccaaggccactgtattggcctctctgcaaaacatttctgctctgtaaatagtgctgtaatgtcccttgttaaatgttacccaggtatacttggccggtgatatgccagactgaatagtgcttgcctgtatgatgaacttgacagctcatcctttcgtgctagtaaagtttctctttggcattcagataaaattccctagatgctttactctgtactaatgatggaccagaatctccatgatgaacttttcagaatatctcgtttttcttcctggaaaccgaatgctttgttggcatggttcattggctttcctctgttcagctcatttgagctgtgaggaaacggcaagatcaggcccttttacggacagatcctacagtgatgtcggtctgtcggaatttagctgtagctttcattttttggacaaaccaactactccccaacaaggccatatgctccatgttccaacaagaagtgtactagtagcctttgcccaccggcaatcactgtctcagctatcatctgatgggcctaacagagagaataaacaggttgattaaaggaggctttaagtctgagatccatgttgatgaaactgatagcttactcgcaaagtttgcattactcctagtcctagtagctagggc

SEQ ID NO: 4504 - DNA, 4908 bp, Sorghum bicolor
gtccgagttcgagttgcccgacgtcccgctcgaagtctgactggcttgaggcgtccatcctcgcccttgaagcttaggtcctttctgctgcctctctctccatctgtatcattctctgattgaatgtttgaaatttgaatgaatggtgaatactgcatacctggatttcagagttcatatttgaatgaatatacactacatacctggattccagaatcgtattgtgtgcatgtcttgttggcattgtgcataatttgaagacactcgtatagctttagtttcatgtcattcgcacggtttatagagggttttttttttttttgaagttaaggcttcgctggagcgttcaagaaagaaattaattgaaattggtttcaaatagggaaagtggtggaaattaggaaaacgcaaccataaatttcacatgaaccgtgtaggaatttcatgtagagaaactgtgtccaattctcaatagactatactgcagtgctcctatggaacatagaaattttacatgaatcatgtagtgtaggaatttcacaggaatccctttatttttgtagaaaaaataggaaacttaaaaaaaaacagtattccaaaggggggccttaaatggttggatttgatgcaatccctgtggctgtgattacacacttaagcagggagatgaatgtacagtaatcagaatgttcacacaagtaattcaatcccataatcaaccaaaacgcccaagattctacttggacatcccagacttgcaatcaaaatttacaacttctctagaggctgcagaatttgccaatttgattaatctgatctgaaatggtttttcatctttgcagctgctactgtctgacgcaatggcatgaatcaagcgggaatgtcggtcctgtccccttcatacctgcagatcaatggtggtggctccaaatctccaatacatatgaacggacattctttttttgcgtttctgttttccttctttttctttttggcgggaacctgtgtaattctttctccttttttctgtggttgacagacactgtaatatgtttaaaacactcactcatctatatatagctgtgcacctcttctctcaatcatatacccgcggataaagtcgcggagatttgtatgtccaccgggaagtaagatcatgtcgcattctgcttgctctcccttgccgagaagtacatcttctgaggtgtagtagttcacttgtgcactcagctgcacttgctgctgcggtgctgccctgttgcacaggatttcaagagagcatcacagatctcaaggccggcagcagagctttgtgctgaggcatgccgcttgccgcctctccgatcagtcttgcttcgacccatggtccgggtgtcatcttttgccacagtccgacggcgagggcgtgcagtaaacaaactagtgatgcgtacctgatcgctgccgacgaaccaaccacagtaagactacatggcacgaatccagcgtcatcgctttagggtctttttggctgcattaagggcttataacatataagatatcataacattgttgtggctttcttacacctaggatccgtggcgcaatggtagcgcgtctgactccagatcagaaggttgcgtgttcgattcacgtcgggttcaaatccccgatccaaacggatctcctttttgctaatttatccttctgctaatttttttggtaattcgtctaatctccaccactcatctataccactaaaaccattcccaacagccgatcctctttttttttggctaatttttcagtaattcgtcttttttttcctgctaaaatttttgcaattcgcctaatctccacggctccacccggctacccctggccctatccccttcctctcccctacccaggcgacagcggctgagcgcctccctcccagcgctgccatcgcaattctccattgccagccacagcgcagtccaatgcagcactagaccctagcattcctttggtccaacccgatgcttgcctgctcaagcacatcaacaccatggccgcagcggcagccgccgtccccgtgcccagtcgcgggcggcgccgccccgcgccatgtggcactcgcggccaggggcaagcggcggggtgcgggcgccgccggagaggagggggtggacgaggcggcggaggcagcggagctggtgcgctcggtgctgcggaggacggccggcggcaaggagcggctggtgccggtgctggaccgccacgtgcggggggtccgcaccgagcactgcttcctcctcttcgaggagctcggccgccgcgatgcctggctccagtgccttgaggtgcgctcctgattcccagcatactactccttgacttaggattggtgtggagtggacaatggagactgcatgctttgcgcattgcaaaacctttggttaacaacttattaggccagtctcaatgcatgtttcatgagagtgtcatgcatattaaatagggtgccatataagcaaaattgctgacttggcagggtcattaaatgaaggagtttcatcagatgagagaggagtttcatccccatgaaactcatgtggctcggttactagtttatagctgagtcatgaaactatgcattgagactggcctaggattggtataatatatgtaaattatgagccattccctgcatgtgtgataaataactttgagctggtgctagttgagtccaatgttttcgttctccaaaacaataaagaatgaactactcaaaatctagctactgacactgattattgaatcttatcatgcattgcattttctatatcctcagcagcctctctgtgaaaaaagaaaagaaaaaaaggtaccaccacacttcattcagagtaaagtgtagctgtggttcttcgagatctcagggcaactttagtgtctagcacacaccagaatggcagaacatgtccaaatcataaagcatagctaagcaaaatttactccaacaagcaattgtcagcacccaaacatgaggctcactaaatttcagcatgttggtatttttatttttctgttcattccatgtcttcatgttctgctaggttttcagatggatgcagaaacaacggtggtatgttgctgacaacggcatctactccaagttaatatctgtgatgggaaggaaaggccagatacggatggcaatgtggttgttctctcagatgcggaacagcgggtgcaagccggacacttctgtatataactctcttatcggcgcacatctgcattcacgggacaagagtaaggctttggccaaagctcttggatattttgagaagatgaagtgtatagcgagatgccaaccgactattgtgacctacaacattcttctaagggcttttgcacaggctggtgacacaaagcaggtagacatcttgttcaaggatctggatgaaagtgtagtctcccctgacatatatacttacaatggagtgcttgacgcatacgggaagaatggcatgatcaaagagatggaatctgtgttgctgcggatgaaaagcaagcaatgccgtccagatgtgatcacattcaatatactcatagattcatatgggcgaaagcagatatttgataagatggagcaggtgttcaagagcctactgcgatcaaaggagaggcctacacacccgacgtttaattccatgataacaaattatgggaaagcaaggctcagagagaaagcagagtatgtggttaagaagatggaagaattgggatacaaaccaaactatgtgacacaagaatgcctcatcatgatgtatgctcattgtgattgtgtctcaaaggcccggcaagtgtttgatgagcttgtgagctcacaaaacaaagtgcaactttcttcgttgaactcgatgcttgatgcctactgcatgaacggcttgcacacagaagcagatcagctgctggatactgcactgcagaaatgtgttgtgcccaatggttcgacctacaagctgctctacaaggcctacaccagggcaaacgataaggtactagtgcagaagttgctcaagagaatgaataaacaggggattgtcccgaataaaaagttcttcctggatgctttggaagcatttggcacctctgagaggaaacccaggacatcaccagccataaactctgcaagcaaactaggtgcagattctgctggtgattcagaatcaggtacttctaacaagccagaggtaagcgtttggcaagtagctgctacataaggctgttggtttgaacaagctcgtcaaattacctgacatcaggaagaatacatttgatctgcaccagaaccgttaatatagtgtacttggagctacagcagttcctctactcccaacaggaacaggacgctcctttccctactgaagaatgctgagaccttttgtgcttcggcaaaatctgcttgtacatgtactctgttattagaagtaggtatttttgtttctagtcatcgttgggcatcacaaagttccggctctctgtactcttcgattattatgataggtctgtcatctcccagtactgggaactggaatgacatgcatgccgcagcatattgtttcagaaaatgtttgcttttgcaaaacacgaagcaacataaggccatgtttgaatatattagttagctagctattagctgctaactatttagctagctaatattagcaaaaggctgttcggatccaccgaccagcaacaggttatatgagtgtcatgtagggctatctatactaaaagttaatactattgaagaagttgacttagagctagcaattaactctaaccattgcaggtgccctaataggtggctgaatagttggctagaggtgcaaatgaactataagtatcccttcaccagctaatgaactattgttg

SEQ ID NO: 4505 - DNA, 5241 bp, Sorghum bicolor
cccatttcttgacggagcgatcccttgactgtcctctcaggtctgtgcagcttcgtcttttccacacacacactggctagccggatcccttgaccggtgtgaagtcacgcatgcaagtcgaaaatgttcataccgctccaaacatgtgcgcagatgaatatatctttgccaaagtgatgacggtcattccattttacccagtgacagcaacgggctgcagtaactatccttcaagactttccctgcaactgcaaggatcaaagataaaggagattcgccgaaaccactcgcggtcatgctcgttatcaaatcaaagtctgcggccagatttaggccttgtttagatgcgaaaagattttggatttcgctactgtagcacttttgtttgtttgtgacaaatattgtccaatcatgaactaattatgattaaaagattcgtctcgcgatttacagataaactgtgcaattagtttttattttcgtctatatttaatgcttcatgcatatgccgaaagattagatgtgacggagaatcttgaaaattttttagtttttgggtgaactaaacaagaccttatctatttttcaaccatttggctgctgcctctgcctgaatggctggtgagttatagcacctccatcccgtttatccctggttctttacagtgttcaacgcaattgtttggttggtggcgaccggcgtgcgtgatgccgtgatgggatggcattgtcactctgaagagttggttctgaccaggccaaaagcaagcaaacactcactatttttttagttgtgcggttggtgggcggtggcttaggatcatatttcggctggtcgtctaaattagcaggagttgtgtggttggtggcttaagaccatgtatcggctggtcgtttaagttagcaggaaacaagatttacaagttactatcacgttgcattttgtttagacttttctccacagtgcaacaatcacatggaatatactccgtatgttgttagtgtttcccgtttctcctatgctcctcgtgatttctttaactagaatatatttaatgatgccgcagattcgacgaagacggtctctaatgctcctgtctcaaaacaacagaatttcccaatctttatctcgaaaggaaaagggcagattttttttttatttcccggtaatatattttgaggggcttatacttcaaaaaatagaactgggaagacgtgaatttactgtcttatttcccctgaaaactttgctttagaaaactatacaagaagtaaattcccagtcccaacaagcggatatatatatatcaaaaagtacgggacacccatgatcttctccagcatgttggatcgattccgcatcagtccaccgcacgattctgccgagatacccccttcccaccagccacatctgcctgacgtggaggcacccagcggtaggtgactctgactcagctacgtacccctgtactagctagatccccaaccaacccaacgtgcatccttgactaaaatacccagctgaaccggataaactgaggaattccagccttcatatgcaattatataaatatttttcaccaatactacttacacgccccattcatttcaacgctgcattttagaagacgaggatccttgaaatgctaggtggcaatacctatcttcttatgccaacccttgtgtcataacataactctgaaaaatctagatcgatatatctctttttatatatttataattaaaaaataattaataccagtgacatgtaactgtacaagaacaatcaatcaatcaattaaatataaatgaagctaaatgctttttcatcacaatataaacgtgtggctctagcgcagcgcagggcaccaactacacctaagccatcactcgaaacaaaacaacaaacaaaagcaaatgccaagggcaaaaaggggaattcgagctcgaaattacgcaactactcggcagcgtctggtgcccgatgcgcccccgtcactattttactgtccccacatggccacatttccgccaccgccaccggctaccacctgccgcctgcgccctctgcttctttagacctccggatcgcgccgagattgagccgtagccgactggtcgccgcgtcccctctccccgcacagcagcagcagcagcagaggatggaggcgggcctggcgctgcagacgcgggccgcgggcttcggctccggacggcgccggggcggcctacagtcgcccatcgggagcctgagagtcgctgatccggcgggagctgcggttgccgcgggcttcggctccggacggcgccggggcggcctacagtcgcccatcgggagcctgagagtcgctgatccggcgggagctgcggttgccgtgcgggctcgcgggtccaagcccgtcgcaccgctccgtgccaagaaatcgttcggaggtacagccccttcgcctctctgttttttacattacgcatattgtggtcagattggcgtgattcggttttttttttggtcttccctgtcgctttttttatcccgttcgttgcgaattcggttcgctctaatcgaaccaatgttattggggcgtatttggattcgtcattactgttgactttaatggaattgacgtgtgatttggctgtaggattttacgaagtatatagtttggttccatgggttccgattccgagtgatttctggagttttgttttcctcttctaaggggttcggggaggatctataccttctgagtggtttgatttgtcagaaattgataaatcaatcgggttttggattataggaaaaatgcaaaataggaagatggagccccatgcttgtatccctatggttgacaatttttttaatgatcttattcctgtgcaggtcatgaaaacttgcataactccgttgacgaagctctcctgttgaaggtatttgaccaagatcttggattcctaaaagatcatatcaataattactatggagagcgcatgtgtttttgcaccggcctaatgttattgtgctatgatttcagaggaaatccgaagaagttctgttctacttgaacgggaggtgtatttacttagtaggttagtttccgtcctcctatattgcgattgctataaagaacgtcaacttttagatgaaactaccatgtttgaatttatgattgatgagtgagtgtttgtgtgcaggaatgatgggttctggaaaaagtacagtggggaagattatgtctgaagtcttgggttattcgttctttgacaggtctgtgtctttttgtgcaagtagcaatctgttgaaggttcctatggatgttctgatgcacaggtactgacgatgagatttgttgctctaaattatgttttacagtgacaaattagtggagcaagctgttggaatgccttcagttgctcaaatattcaaggttcatagcgaagccttctttcgggataatgaggtaatggttactgaatttctctggtactgacatcctcatgtactctctctgatttatgatgtttgttttttattccttaatgcccagatttggaagctttggcttatgatttaccttcctttgtgtttcatgccttgcagagtagtgtcttgagagatttgtcctccatgcaacgattagttgttgccaccggcggtggtgctgttatccgaccagttaactggtatctagagttcactttattttttcctttaaatgggtcactttattttctttgaatcaatagtaatgtgacctgcggtgcattatcaggaaatatatgaagaagggcctatctgtttggttagatgtgcccttggatgctcttgctaggcgtattgctaaagtgggaactgcctctcgtcctctcctggaccaaccatctggtgatccatacacaatggtagctacttgttccttcattttcgttcatgctggtgaaacagaattgtcttgtcattctatttggacaaagaactgctcatagatccacttaaaccttgaagctctatcctggattccaggcctttacttgtggtatctgtaggcatgctcacactttttttgccagttctaatacggatcactcactgggttccttctatgttaggccttctctaagctcagcatgcttgcagagcaaaggggtgacgcttatgcaaatgcagatgtaagggtttctctagaaggtaagattcccatccagataatctggcaaattatatgatcagatgatccttcataagacttgattatagttttgttccaagttccagtggattaacacacctgtgcctggcatttgcagagattgcatctaagcaaggtcaccatgatgtctctaagctgacacccactgatatcgcaattgaggtaagcttaccgcgaatatcgtttctctttctacgtaccaattatcatcagacagctttttaaaagataacactctttaacatctttgcagtcacttcataagatcgagagcttcgtcagcgagcacactcctgataatccagctagcgactcgcaagctgagtcgcagatccaaaggatacagaccttgtagaaccttgatccttttgtttgtaccgtagtgtaccacctagagcatcgttgagttatttgttcgttgcattgtcacgagggaggagaaaacctgaagcatttcttgttataagctgtaaaggaatggaataagggagataaatccgaagtgtaccgttggctgaaacatcactttcttcactcctgggtctgcttttgtttgccgaacggatgtagtagatgaatcgaggcatgaactggcatgacggcggcggcaacgaacagatgacctcgccactgcttgtggctttttaacctgggagacacgagttgagggaaagttggatgcgattacgggcttacggccgaggaggcgggatcgtatctgaaataggccggtatccaattacgccgtgatgaatcacggatagactcgaaacaaacatgcgtaacagttcctcttatctcttcgctatatgtttagatgaatcaaacggcaaacgccatcgcagttctcaccgcagtttgatagtttggtgaacatctatggtggacatctcatctcagcaaacataaacatcgcgacggaaaaagaaaacaaatccattcgcgatgctccactgtcgacggaaaaagaaaaagcaattcattcgcgatgcagccgatgcttcactgtcgacggttgggaagtcgccgtctg

SEQ ID NO: 4506 - DNA, 6381 bp, Sorghum bicolor
aggaggggtcgaatcaaaaccagctaaactcgactgagctgaggatacaagactgattagtacatgcatgcatagtttctgattcttgttttgacttgtccaatactggccttgtggtactgctgactgcacaaattatgtaaaactcgccctgtttcataacttcatatagtgaggctgtttttgttctctacatttttttgggtttgtatttttggggtgttctatcttgtaacaaaatacagtgagtaaagtattgtaatgtaccaaagaatactcaacaccacttagatttgtgtcctgtggattgatctgttcttccatccgtcgtgttgttaacaaagaaagttgatattggcacatgacacttcatatagcctttgctcatccctcctttatttaagaaagttgatattggcacatccgcacatgacacttaggtttttttaattttttttttaccaaacactcattttcaaaacaattttacgctcctttcacaaaaacatgagttatgataaaattgaaaagtagcttatcctagttctctctctcatttctttctcttatctatatatgaaattgttggtgaagctattttatcaaataacttatccaaaatagctcaacttcacctaaaaagttgttcataaagttgtttttccaaaaaaaaaaactttactaatgaagttaagctgtgccaaacaagatcttaatatggcctttactcattccctcttaacttgtggtgcattttgtcattgatttgctaattgaccccagcagattattgcgttctattggtttgctttaatttagtcttctgaagttctttttgtcaggttatgacttatatgtcgctgccggaggtttgatatacactgaattttccattaaaagcaactggcaataagtttgtggggttgtactaataatgttaatagagaggaatatatttacagcaacaaggtaacaaggatatgaataaaggttgaaatggatttaaatccaaattaaaagagagaagtctaattaaaatctaatgaaataaataacatccaatctaaatccaattccacatgactaatgttcaatccaatttgttttgatgtccaaatccatccaggaggatccaaataatagcaaaagtactatgcctacatgttcaattgtcacttttacacattaaagatttaatgaaattgactaaaatttgtttaagattacttatatgcaaatgggtgtgggtgtgggttccacgtttaaagttgaaccctataattaaaaccttattcacatcttgaaaatttgacaaaattgactgaaattggtataatatttgacaaaactgtgtaaattggtgttgctatatatacatgtgggcctcacataataagttggattctgcgattaaagatcttacgtttacacattaaaattttagtgaaatgaattaaaatttactccctccgtccctgaaagaatcaatttctagagttgtcctaagtcaaactttttaaactttgaccaaatttctagaaaaaaatgctaagacttatagtatcaaattagtattattatattcatcataaaatatattttcatataatgtgtattttatattatagatgttgttactcttttctataaagttaatcaaactttaaaaagtttgactggcacggatcctaggaattgattctttcagggacggagggagtattagagatgatgtgatatggcagtcggctactgtgtatattattttagagacggagagtacattctaaaatcaattcaaggcaaatacacaaaaatacacatgtaaagtggcattacacgaaatttatatagcaaggtgatcaagaaatttcgcatttcacacaccgaaataatataaggccaaaaacacaagtagggacaaattttcgcccgctttctctcgctggtcgctgcgacccacctctgcgcctcggcggagcgcgcgcgctgcacggggcatgccggagctccgcctaccgataatcgccccggcagcggccgggtcccgtcgccattcccggaggctacggcgccgctgccgcctaatcctcctccctgtcctctccctcgccctcctctccctcgcctacctctccttttcttcccatgccaacctcccaatccacggtaagcgttcaaataaccaggtactttttccatccagaactatcattttgctttggagtagcaatttagttgcaactggcaaaggcgaccacaatctgttttctgtatgtgcgcgcgggcagtgggctggtggcctccgcgtactgccatttactatcatcgcgtaaaatttcttcagggtgcacaaatcttcagatgtgtcctggtgattatttcctattacgtaaattctacagttccaattgttagggatacaagcatcagcattttttttgaacattaaatacagcaggggaggcccccactgtagagattttgtacaagcatcagcattgtcaccagaagtgagtgagtagggcctaaaatgtgtgttagaggttctgttttgttttcaattgaatggaatttactttcaggtgggctccttgcccccaattggtttgttgggaaaaaaaaattgtgtgttccagaggtgtttggtcacaagaactgaatcacttccttttgtcacgagttaaaaagatttatttactttgttgattatgttctttatattttctctggatgactccaaagaaaatactctctatccgcagaaaaaaactctgatatttgatgttatgctttgcagcaatgcatcatggcctatctaataaggagaaccttttgaagtggaatggtcagggatacagccctgatgttacaaatatctctatgtgagttcaaattcatatgtataaattcagttgtttgtgttaaagtcatcagatttacttcttctgccaggactaaagctgagttggaaacccccaaaagtcgaaagaaaccacacaagcgctgtaagagatcttctctttacactctgcaaagggtgcacttttcaaagatggaccttttttattcaaatgcaacaaataacttttattagatttttttaccctaaatgcattagaacaaaaggtgggtcgttttttttatgaagtgtgatataatcttctagctgatatcccccctcttttctggagagagtaacaaatgtattttattataagctagtatcaaacaatctgattacgccttgtatatgctacatgaatcattgcacacaaaaagtgttgtttattacgaattactattaaaaaatccgatagggccctactttatatattttataggaatcattgcacaaaaacatatgttacagaggtttctgtttacttaccaaatacaacattgcagatgcaccatgcgaaattcagtttttgccatcagttgatgatcttgtggagcctgctcactatgggaattttacacagttctctttgagctatatattgaaggaaaaagtattgctcggtaatggcttcttcgaaccagtatttggtggacaccagagtcttggggatagagaagagacataccatgctaaagaccaaaccctccactgcggttttgttagaggaccagatgattaccctagtaccggatttgatttggatgaaaatgatagaaggtatatggctacctgccatgttgctgtatcatcatgtatttttggaagctctgattacttgaggagaccaactaaaagcagggtgattttctaatctcttctgaatggatgagcttgattgtccgtgtgctcaaatagctttttttccagtagcgaagtggcttaagtataaggtttatacttctagttgattttatgttatgtcatgatggtaaattattcattggcctttactccttatcaatcttttatttcatgaatatttcttgttttttgtaagttctatagtaattgtacaatgtgccataaactctcacagattggctcttacgctaagaagaatgtgtgcttcgtcatgttcatggatgagctaacaatggcaaccctttcctctgaaggacacatgcctgatggaaatggattcataggcttatggagaagtgttgtagttaagaacttaccatataaagatatgcgaagagctgggaaggtgccaaaatttctagctcatcgactcttcccatctgccatgtaagtcttaggtgccaaaatttctagctcatcgactcttcccatttgccatgtaagtctttaaggaagtgtgtgtgtcatcgtacttaattgcacagtgaatttgtttattgccagcaatgtctttgctctaacaataaattctattaaatcaaaaaattcctacaagtactgcctactaactggttagtgcgtatcatcccaccagctctgattgtaacttgggcttcttactttgctttatgttgcagcaaattttatttttcctattttgttagtaataatgtgtatgccctggacactgcgatcacaaaagagtgttgtttggacatattgtccaaaatgcaaccttgaacattaatttctgtagtaatgtagttatgaactcttgatcaaagttataaagccttgtaaaattgtagtatttctgaagtatttttcaaaacctacaaacgtaatctttataagtttaatgctattattcatataggcatcagtagcctaaaaaggagtgctctatcacaaaatggcattgttttgtggctagagaaattttctcttttttctcttgtgaaatgagttagtatattctcacctgggttaactgaaggtatttttctttctaggtattctatatggttggatagcaaactgcgcctccatgctgatccaatgcttatcattgagtatttcttatggagaaagaaagcagaatatgccatctcaatgcactatgatcgctcttgtgtatgggaggaagtactccaaaacaagcggctgaacaagtacaatcatactgctattgatgagcaatttcacttttaccggtctgatggtcttgtcaagtttaataactctggccaactgcctgttcttccaagctgtatgtatcctatcatattgtttagttaatggcttagaagtatatatttcttgattggcccaagagttgaccctgtacatgaacttttgcagatgtacctgaaggatcattcattgtgcgtgctcatacaccaatatctaacttgttttcatgcctttggtttaacgaagtaaaccgttttacctcacgtgatcaattgagttttacatacacttatttgaagctcaggagaacgaatccagggaaaccttttcacctaaatatgtttaaggtaatagcaacaatcattgcatttcagcatgtacagagaccgagtcaataagtctaaatagttgaggacattcggacctatgtatctaaactatatgacaccatatggctacccagcaccatcaaattaggggtctagtgtgtatgtaagagttactggcgaagccctgtttcttttcctgaattccttctctgtaggcaataactgggtgcaataaaccatgctattgcatattgaattgctaggaccatatatagtagacaattaccgtttacttcttagggtccccaaaagccaattctgaagaaacaagtaattaccatcgcatttattagcaggtttgcatagactatctaatactatggatgtcgatttgttatcgaaacaggactgcgaaagaagagcgatagctaaactgttccatcaccgaactaacgagactacagatccaccaccagctaatcttcgtttggacacgattcgtcattcatacaaggctgagactgccatttgaggatcaacagcaatgtgacttcaatttaccgtgtgtaccattcatccagctcttgcattcagagtacatgttgatcttctccttgctgcatccaatcatgcaggacagtcagccaaagtgatatcgtcttctattgtttatagaggtccagaacagcgccaatgtgcctaagatgcttgtttgtagagaagagaaatgaagtaacgtttttcacagccgttggcagtagacatgtagaaatgccactggtctcacttcgttagaaaattcatttcgagtgcagctttgtattgtaaaaatgttcattgaacaaattgaagtgttagaatgatgatactccattccaaattataagatgttttgacttttttctaaatacattgtttctattataaacaatgtatatctaaataaatagcaaaagctatgtattagaaaagccaaaacgtcttaatttgaaatagagggagttcctttttaagctcatcgaacgtgtacca

SEQ ID NO: 4507 - DNA, 5683 bp, Sorghum bicolor
ctgaatcacttatatgattccaacagaaacattatgataccaaatgagaacaaatttcaatatacttaccttagcgtggtgagcgggaacctatgtatagttgccccccgcccaccattgtcgcattgacatgcaaactcagtagggtgacccttaaattgttaccaatgtaacttgtttctcttgcttacatatgaattattagtttgatgcccactctacaacaacacaaagagataactaagacaagcaatagagagaagagaatcaaataattaacggcattacctgcttgctaggcttaggcctttagcatgagtttgttatgttgactaggaaactaagtaaggtgtaatccgtatagttgatgataaaacttttgcaacacacgagaaataggaaaatcgacaaagtcattagtccacaaagcaggatatgagtgaattgtacaaacaatatgtggtactaaattaaacgaagttcaagtcccatgtattgatatattatagctcaagagtcaagattgtgatatgaaccaaagcaataaagcaagatgtagcgtgtggttcgtttatggtggagcaactatttctaactacaataaacataaacaatgattactaatgaagtaatttttttatcacactcctcggctctatggccttgtattaatcaacgatagctcaactgcactgtgaactacatcaacatttacacgactaggaaatgcatccgtccatacatgcacctagcctggaccccatactctagccaactgagcagcctcatgcgcagacgagtaatttgaaagcacacaagacgggagatgtagggcatgtttagattcatagagctaatggttagctaccatatataataattagatcctttggatccaaatgagttcaactaacaattaagctagtctaattgttagttgaatatcatctaacaactattctactagttggataaaaccagctaatagcaattaatagttagctagctaatattagttataaatagctagctaactattagtagctaatagattccaatagagcatagcacaagaatttaacaggacactatatccacgtaaatgcgtggaccatcttgctaatttgaaacattaatcgtgtgatctcagccgccaccgattctcccggcgtccccgaagcaaagcatatatgcaccctagccatcaacgccagagattttctacgatggcacatatggacgtgctccaataattggcacacactcaaagatgcgcatatataaaccaaaaaaaagtacaaaggtgccgagtgtggctgctacgattacgagtagttaagcatctatccatcgctgcaattaatttgatgcaccaaacacgttgctgcgaacgtcactggaattgcgcgtagctactatcctacaggctgtcacatgcaattcatcaactgcatgcaagcggacccagcaaatgcttgggcctccctagctcggtcgacactcgacacagtcagcctcagccgagccaaccaaccgcactgtccattggatgcggtcattttggctctgtgctccgctgcgcaaaacactgcccagagcgtccaaaagctacactagtctatccccgcaggcctcacatggcaacgtgtgacgagaaaaccttgttaccctttctcgtgcgcatggaaccagagcaggaatacgtcaaatactccataggttcgcgatcgcgcagatgctgacaaactgacagaggctaacaaccactgcagtgtgccggctggatgcgagcgagagaccagagtcgtgtgtgccctagtagatctgactcagacggcgcctatttagtcaatccgatcttgcagtaactcgatcggcaagtctcccactctgtggcctctctctctatctccatgccacaaccaccaccgttgcctttgcctcctcaaacgagcagcgcctgaactcaagtgcgacgacgccgctggacgccagcagccatggaaggtacgtacactcactcagcttctttcttgctgccaggacgaggagcaatcagttccttctgctaaatgggctatacgtctttaatctcttcccgctggcgcgccggtggcaatgcagcaggtggccacgcgttgcgcgccgtcggtgacgtcgtcttcttgggcgcgtacggccgccggttgtcgttgtcagcgacgatcgccgccttcgtggagtcgctgctccaggggtgggcggaggtcagggccgggctgctggtgccgctgctccgggccgcggtgctgctgtgcacggccatgtcggtgatcgtgctggccgagaaggtgttcctgggcgcggtcagctccgtgatgaagctgcggcgccggcggccgtcgcgggtgtacaggtgcgaccccatcgcgcggcccgacaaggacgaggaggcagctgcttatcccatggtgctcgtccagatccccatgtacaacgagaaggaggtaatgtaccgtactacgtttgtctctggcgtctctgtgttcttccggactctgctgctctcggtgaactcagacggtcagtcagactgtcagagtaagctaattgctgaagtgctgatcctcaagcgcttaaagagcagcatctgatctctttaattagtctctaagagtttgcatcgaaccaattaactttgcattactactacacgtactccactggtcatagttctgttaagggtaaaagtggatcagaatgcagagcaagggatgttttgtcttcaaattttcagagtaatcatggatgggcacatctctgacaggagcctgaaacgcttactacgcaggtgtaccagctatcaataggggcagcttgcaggctcacatggccggtagatcgactgatagtgcaggtgctggacgactccaccgacgccgtcatcaaggtgagtgagatcgggaggacttcgttttcacctgccactgtcacttcggaatgcctggcaattgccacgggagaaacatgcatgcatcacaaaaaccgggagccagacaacaacaaaaaaaaagttgccattttcttccctttctttcgagattgaagcgtaaacccacaatttggttgggcaggagctggtgaagggcgagtgcgagcggtgggccgcggaggggatcaacgtcaagtacgagacgcgcaaggacagggccgggtacaaggccggcaacctcaaggaagggatgcgccacgcctacgtgcgcggctgcgagttcgtcgccatgttcgacgccgacttccagccggcgccggacttcctcgtcaagaccgtcccgttcctcgtccacaacccaagcctcgcgctcgtgcagacgcgctggaagttcggtgagtctctctctctctctctctctctctctctctctctagcgcgcaccgccagccgacaacgattgtcaattgccattgttttcctttttttttttgggggggggggggggggggtaagtgaacagaagcaagttgcctgcagctgagcttgctggctctgccctgtcgagtggtgacgaagtactacttcggtgtgtttgggcttcaagcaggccactgaaaaccatttgcaatattgggcctattttctgagctttcggcctcatctagttagtgaaagcaaagtagatccacaaggcccaattatctacgttcatcagtcagttcaattccagcttgcgtcctgctttatcccatgtcaagatgtagttccatccgctgacagagcttttgtttaagctgccctgtagtgaatgccaacgactgcttgctgacgagaatgcaagagatgtccatggactaccatttcaaggtggagcaggaagctggatcttcactctgcaacttctttggctacaacggtatccttgatcgcaattgctcatgcacgctatcaacttcagctgtgttcgataaatgagaatgctatctattcatgcactcaaggaactgctggagtatggagaacgcaagcgattgtcgagtccgggggttgggaggaccgaactactgctgaggacatggacttggcactcagagcagggctcttgggctgggaattcgtttacgttgggagcataaaggttcacagctctgacaaattgatccaagatactatcatgtcagacaaaacttttatcaaactgatccgagattgcaatttgctttcaggtcaagaatgagctgccaagtactctcaaggcgtaccggtcccagcagcatcgctggtcatgtggacctgcgctcctgttcaagaaaatgttctgggaaattcttgctgccaaggttagtcttgtacaccaacctactccctgacatgcagtgacatgaaaatgttgtcatacgattgtttatctgtatgttctgttgttttcctgtgcagaaagtgtcggtttggaagaagttgtatatcatctatgacttcttcattgcccggaggatcataggcaccttcttcaccttcttctttttcagcgtcctgattcctctttacattctattaccagaagcgcagattcctgtgtgggagctgatctacatccctacagctatcactcttctcaactctgttgggactccaaggttagctcggtgttacctttcttaagttttataactacaaaacgttactcgagaatatactatatcctgaattcctaatgtcttgcaggtctatccatctgattatactgtgggtcttatttgagaatgtaatggcgttgcatcggtttaaagccatcttgatagggtttttcgaagctgacagggccaatgaatggattgttacacaaaagctggggaacttgcagaagctgaaatcgattgccagtcttacagggaactatcgtttcaaagacaggtattttctagaggataacatattcagcagatctgtacacctcattgtatcatagctttgggccttggtgctaatttgctatcctgattcgtgtcaggttccatttcttggaggtatttatcggactattccttttggcctcggcatgcttcgactacttctacagagatgactatttttacctctttgttcttcctcaatcgatcatgtattttgcaattggatttcagttcattggtctcagtgtctcccaagactgaccaattgcaagacacaatcgaaatttttggttgcaatatcatgattgctcagatgaaggtcttgtattaatgatctacaaaagggcaggtattgtgtgcaatgaagtagagatgttttatacttcaagataggataagcacatcggaggttgagacaaatctattaatctactcggtgcagaaaattgcatctgaaacctgttgatttacctgttgatatatctgaaacacaaccagtgtatttagatataagagttgtgtacagacgatcagatcttgccggcatgcttgaagtgaaaatatccaatacaaccatatcttcgatagaatcataaaaaccttctagaaaaacatacttaacagaatttagaatttttgagatgatgtacatctatagtacatcgtcataaaacttgagattcaaacgtgatctaaaaaaccatatgaaaatggtaaaattcatgtgcatacgcactagaagagataattcatgagtggctacaattgctgctcacaagacattgaaggattttga

SEQ ID NO: 4508 - DNA, 11128 bp, Sorghum bicolor
ttaaaatgtaggaatagataaaggacgtgatttgagagcctatatgaaattgaaatccaacaaataatttggaatgcatggaggtaaaaagaaagaagcagcatttggatggtatagagagaaaaaaaataggaatcctaagacaggaaagaaaacacatgggcactggacctataataataccgatttcatattccgaagtctcccatagattttttttatacgaatcgaatccactaaaacccatctatttctcctataatccaaaatagacaattttcaaaaaaaaaaatccaaagtagaccaatatgaacatgacattttgaatagatggccttgtttaaatccagggtgtaaagttttgggagtgtcacgtcggttgccatatcgagcaccatatgagagtgtttggatggtaaccataaaacaaattgtagaaatcctcagtactccgtgaactgaattgattaagcataattaatatgttattagcacatgtttagtgtagctttacatagcatcatattgtcaaattatggactaattagatttaaagattcatctcataaaatagtcacagtctgtgtaattagttattttttagtctatatttaatactccatatatgtattcaaacatccgacggaatatggagtaaactttagggggagaatgtaaacaaggcgctaggcctaactaaggcacaaggcttgaatcatacagctacttatgaatttgaaactagatcctagcatggttccatttatattccatttcagtgattcactgtcacgtgaaagctaggctcaaacaaaccataaaaatcaggccttgtttagttcatccaaaaaaccattttttttaaagattttctgtcaaatcgaatcttacaatatatgtataaagcattaaatatatatgaaaacaaaaactaattgtatagtttatctataaatcgcgagatggattttttaagtctagttagttcatgattgaataataattatgaaataaaaatgaaagtgctatagtacctaaaacctaaaaattttcgaaactgaacgaggtctgagatgactaggctttagactccaaaatcagcatatgaaaactagcaatatattacggcccagttgtgcccatctccagcaattaggggtgtgaccctacagctaggtcaatgttaagttgttgatccaatctccttaataataacaaagattgttaatccagtttaggcttcgagattcccttccaacagggcactgcccaacaaaaagagccgttctcatggctagaatcgtcatttcctgtcgtttgaattcgaaaccgcatccagaacgtggagttgtctgcatcgctgcatctggggccaccagcccaccaccaccctctccaacgcccatagaccacgctctcagacaacgtgttaacacaccccgcaaaggaacggttgatttagcaatggatttgtaaatcgacggggcagatgcaccatgcgcatagaccaggttcgtcgagtcttcacagctcgttgcggccccgtttcttgtcacctggcacaaaacttctatacacttagtccatacaggcatacaccgccggataccggtcccgtgttcacacacacacggccgtataactccattcagtatcggtccatagacacggtctacgttaagttaaagaagagtattataggcagccgccgcagctcacgcgacgccctagttttcgaaatcctccgagcgggcgcttctcgctctcacccgttcgccatttcgctcgtctctctctctcctcgaggggcgatcgatccccaactcgccgcatcccgaacccgcaatccacgcgcagcttgccgttgtatgttgcagggcgtcgccaatccggtccgatccgccggtttgaggtgagtttttccccgcattttgggggcgattttaggttattcgctgatgattgcctgatcagcctgggaattcgtggttagggttccgatggagacctcggaggcggcggccgcgcatccgcagaaggatagcgtgaaggtggccgtcaacataaggccgctcatcacggctgagctgcaggagggctgcacggattgcgtcaccgtcacgcccggcgaaccgcaggtaccgattgttgtgtctgattggtttggtctgcttgtggaaaacttgatgtttccgggacttggaatcgatgcgttcatcagcatcgcttgtataaaaaattgggtgggctgatccacaaagggacataggtgctgaagatctccagtggaggatgctcaggaccatcgtatttgctgatttcgtgactcttatatagtattatataatttcgcagtagtaatttcaatatacttgttgaatcagattttgaacgtataaaagctcagcacatgcctctttgcagggtacacattttcgaaatggtttgtaagttcagacatatgatcatttgtttctgttctgtttcaggttcaaattgggccccatgtcttcacctttgaccacgtctatggcagctcgggtccttcatcatcattaatatttgagcaatgcgtgcacccgttgattgatgcattgttcagcggatacaacgccactgtcctagcatatggccaggtgcatttcttttgtacgatgaagttgccaatgttttgttagatgactgtctttttgatgattatttggctaattatgttgtttttctttgataactgtagactggttctggcaagacatacacaatgggtactgactacagttgtgaaggcaactctggagggataattcctcaagttatggatacaatatttagaaaagttgatacctcaaaggatggctccgagtttttaattagagtgtcttttattgaggtaagatacctagtggcacttgtttctttcttatttgtaccagcggctcttagcttgttatcattgtgtgctgtgctgctatgaatttcagatattcaaggaagatgtttttgatttgcttgatgcaaatcaagctgctgcaagacctgatgcaggttctatggcaaaagcatcagcacctggcagagtgccgattcaaattcgagagactgcaactggaggcataacccttgctggtgtcacagaggctgaggtgaagtcaaaagaagaaatggcatcatatttgacacgtgggtcctcgtcacgtgcaacagcaagcacaaacatgaataggcagtcgaggtacgctgtacgaacatcatacacatgttttctttctgcaaggaccattagtgcagagtacattgctgttttgtttgttcactatatttgctgtgcattccaataaagtaataatgttcttatttggatggtgctgcttatttgtagtcgctctcatgccatctttacaatatgcgtcgaacaaaagagaatatctggtacatctgacaagtcagccagcagtgattatgacataatatcatcgaagtttcaccttgttgatcttgctggttctgaaagggctaaacgtactggagcagatggacttaggcttaaagaaggtgattaaggctcaccgaacgtttgtacatgttggtttagtccattgggtaattgtgcaactggttataagattgttgtctatttcatgtccacagggatacacataaataaaggccttctagctcttggcaatgttataagtgcactaggcgatgaaaagaaaaggaaagaaggagcatttgtaccataccgggatagcaaattaacccgtcttttacaggtgagaactcttatgctcatagtaatgtaatgtaatgcaatgtttcagcacttatttccatgccaatttagtattatatgtacaccacatcatttgaatttccttatggtatttagtgccagattcatggacctatgggctgtattaggcttacaaattcctttgtttgttggatttgcatttggacctgtctcaaaacataaatcgtttttgcaggattctctaggaggaaatagcaaaactgtcatgattggtaggtctattttttttcccaagacatatgtcctagtcctagtgtttgaggcacttaaatcatgctttgctactcttttcatgcagcatgcattagccctgctgatataaatgcagaagaaaccataaatacactcaaatatgccaatcgcgcacggaacattcaaaacaaagcagtggtaaaccgtgatccagctacagcagagatgcaaaaattgaggagccagctggagcagctgcaaactgagcttttgttttcccgcagtgggagtgcagcgttagaagaacttcaggtgggtttgtcttgactggctggtccaaccagttgattttgtgacctaatttttttcctttgtctttcagttgctgcagaaaaaggtctctcttcttgagctaaagaattctgagcttaacaatgaactcaaggaaagggaattgtcatgtgagcagttggcagagcgggcacgggctgctcaggtatctatgaatctataacttttttgttctgttcgaatgtgctggatttgtgatgtaacatttttgtttctcttcctttcaaaataaaaaaaaacattttcatttctcttagctgggtatatcagtatatgcctatgatctcagtcttcttgtgtaaaatttctctatggtaatcatatgcagttaatttatagcgcaggagccaaccagttagacatgaaaatcgcttctgacatatcaccttagaatgataaatttattaaggacctccatttattcaactttgatacagttggaaagggatcagttgatgctgaagattgaatccgcgaggaatggaaaatcatgggatgatattgaaaatgctgataatgaccaagtgagtgtaactacatctgtatgccgtaaacagatttatactcacccttttatgccatctcaccacaacctcttttgttcttatcaggacatggacctcttgaagggctacatatcgaaagtacagcagttggagagtgaactgatgcggcaaaacttctccaatgcttgcagacatggcttaaatgatcaacttgccatggagcgggacattttactaaatgaattgggttctggatgtgaagtaggaacacctgatgcttcaagtaagccactgagccatttcctcaaatcatttatagtgagaagtagctttctttccaacagtcgacccttttcagaattattcgagtatgcttacaatatgtttttattgtttttccacatgatgattaatttagatttcgcttctgaagttgaacctttacttgggaatataggttgtgctgtagcttgctattaagattgatgttactacataaaacacttgaaagaaaaacatattctagttgattatttgtttaaccatttcctggaaagatgttagaaatcagcaatgaacattaccttttttgtatcacattcttattcaccaaacttgttcctaaaactgtcaaatatttttccagcctagaccaccagtgtcctttcgaaactatcaataactgtactatcttcaggtgaagttgatgaagaagaaaaggagagagaacattcatccatgcaagaccaacttgacaaagagctgcaggaactagataaacgtcttcagcaaaaggaggtactagtccgctgtctctactattttgacctttgtttgttaagccctgctaacactatccctgctgatgtagttatgtatcctcaatctggtagtccattattttgtgccttgattcaccttgtagagtataattatacctccttttcatgtttcaaaaggaagagatgaaacaatttgccaagagtgatacttctgttctcaagcaacattatgaaaagaagttaaatgagttggagcaagaaaagaaagctcttcaggtttttactagcttaccttgctgacactatgctcttattttttttcctgacatggttgtaacaatattcttgtttgtagaaagaaatagagaatcttcgccatgctttaaccaatatatcttcttctacggatgacaatgctcaaaaactgaaagaaaactatcttcagaagctgaatgcacttgaatcccaggtttgtacttcagctaaatgcttgtttcattgcattcctcatcaattctaacaacagaccgttttcaggtccatgagctcaagaaaaagcaggaagctcaacaacagcttctaaggcagaaacagaaaagtgacgaggcagcaaaacgtttacaagaagatattcatcgtataaaatctcagaaggtgttttatcgtccaaatgtttctgagtgtggtttaagtttttttcctgacatatattcctttcattccatgtaggttcaacttcaacaaaagatcaagcaagaatctgaacaatttaggtcttggaaggctgcccgtgaaaaggaagtacttcaggtaattgttcttacaggttgttgatcgatgttttcaggtcggctggtcgaacctggtcgacgtgggaccgaccagacgattaatcgtgattaatcgtcgaccaggtcgattattcgacccttgtcgaccctggtcgtccatgtatatcaggacatatacctatatatatatacctctctctatatactatatcatacacaataaagcaagcatcaagactgcattagtgtttagctgctgacttatgtatgagagttgtcttcctctcttttctgcactgcccagaggtccatattcatgtcccaaactccatttctttgctggcttgctgctggaagcctggaatacaataattagcaagcagcaacactaatgcagtcttgatcttgacacaccttaacagtagcactgttgcaaacatttagcagaccataacagccacacagccagcatattacataaccaaagtctatgtcctggttaaacacgcccaaaaacagagtaaccaaactggtcgtccatgtcctggttggacgactaatcgcgattagtcgtcgactaatcagacgaccagctttctggtcgagctggtcgagtcatacctcctaatcgaacacttgggactgaccaggacgactaatcgtgattaatcggacgacctgaaaacactgttcatgtttacgaacttctttctcaaagatcttgttctgatagtgctgtatatccattaattagctcaagaaggaagggagacgaaatgaatatgagatgcacaagctcttggccttaaatcagaggcagaaaatggtaagtttcttattttttttcctctttcagctttaaaataacacgatcgcctacaccattcggcttgaaatttgtaggtcctacagaggaaaactgaggaagcagcagctgctacaaaaagattgaaggagttactggaagcaaagaagtcatcacgtgaaacatatggtaggatgccatggccaatggcttcatattctttaccattaggttttatgtgtgctcattctttagctgactacttttactacttgttttgtcttcctgttttttcaggaggtgcaaatggttctgggatgcaggtatacttcaagaaacctttgttagggaatgaaaaaactattccccatctgcattttatactgtatctgaaacattctttttatgtgtcactaggccttaatacgagctattgatgatgaactggaagtcactgtaagagcacacgaattacgctcatattacgagcgacaaatgcaggagtaagtctttgttttgcattgataatttgtacatcctgaccttctagtgcttttgttaatctgtggtgcgctatatgcatatatgtgcattgtttttggattttttttttgtgatgagacagatggattcatagttatgcaatgtaaatatgaacccaaaacaatttgctattgtgctcccttgtggttagaccactagagaattagctttgggccaatccataggacagtgcatataaatgttgaatagttatattacaattctatcgatttcctaacacataattatgtggagaaataatgggctactagtaagattttgcactgaccataatatgtttaaattcctgctgaaactgtggcatcattaactgtctccaaaattccttatgattacctatatcgattattcactccttttctttctaatctcagcagcatagtatatgaactgtaattgaaatgtggttaatctgagcagcataatacatgaactgcaattgaaatatggtggattctgtatacattttgcacagcattacctttggacaactgcccccttttgaaattactttccccccttaaaacaggagagcagcaatatccaaggaaatagcaaagctgaaggaggaatcaaagcacaagatgaggtttggtgatttacatctcttttgttttgatgaggggttaattgatctgtttcagtgtctctgaattgtcgcttactagttgttatttttgtagtgattgtcctcaagctatgtctcctagtgctagaagttctaggatatcagcattagagaacatgttatcctcatcatctagtgccatggtgtctatggcttctcaactgtcagaagcagaggagcgggagcgtgtattcaatggtaaaggtagatggtaccatgtcaggtccctcccagaggcaaagaacataatgaactaccttttccagtcagcatcatccgcaaggtatgctgtagtttgcattctttcaaaggattttatgatgtatgctatgtatgcacattcctgatttgcagattcttttatctgtattttgcttctaggtgtcaagtactggataaagaggtgatttgtaatgaaaaagaacacaccattagtgaattgaaggaaaaggtggttgtgcttaatagtggaatgaggcagttagaaacacaactgatggatctaaggagccaaaatacacaggtaaagattctcccagatttgtactgtgcaaatttgatgacaccgaagtataaaatgattgtgtattacgattgtggttgtgatcgtgcacttgctaacactttctagtttctactaatcggcagcttttcactgcattgaataatgcaaagaaatctgctaggtcaaatggcactggatttgctcagcgtaaggtatttttctttgtgagtgccttcaagtttttctttgtgagtgcactctttgctgttttttcatgttaatatgtctgaacatccctcctacacgcagagcgttcgatcttcccagcattttggttgtagtaaggacaacttcatcaattgggtggacgatatggacatttcagatggtgagcactcagacgagttagagagtatgagtgatggatctgattcagactgggtacagtcgaacaggaaagcgaaaaaacatcagagaagagtgtctagcaattcaaatcataagctggattgtcaaaatacacaagacaatgcagaaccagagaagccctcagatgaaaagtgcattctgccaaaaaatcttccatcagacggctgttcatgctcaaaatcctcatcatgcaagaccaacaagtgcgagtgcagaggctcaggtgcacaatgtggtgcaggctgtggttgtaaggactccaaatgttctaacagggattcttcttctactaaagaaaaggccaatcagggagccatgcttcttcagaacgcgttttctgagaaggaagcccaagatgcaaagccaagaaagcctttggctaacattggtaataatgtggtaagtactgtgctttatattttggtgttatagctaaccactgcatccatcattccatctgcacaactatagttaatacagaataattcatagcaactccgtgtgcaactggttgtgttctcaggttaaccaaactgccgagacagagaagaagcccaggaaaaactggcgcaagtcgacagttcaactcgtcccagggcctctcctgccgtcggagccagagaccaccgaagctgctcctcgggacagagccgatattcctctcaagctaccgagagccatgtcctcagggactcctgcggagagcaaccctccccccctcacggaccgcaatgctgccaagccccaccaatccgtgagcacaggcaacaaggatagcaccggaactgccgccacgaggccaccgtctcagctgagaaaaaacgcagccaccgagaaggagaaccagttgcgataattcaattgctgagtatccgtgtcggggaagtcttttgtcttaacagcggtggaggctgcctcggcgtcctatggagaggcaggtagaccctggaagggctcgcgctctctcgggttcctgagggatgatgactgcgaaggcaatggcgtgttctgttgcaatgttgtgccttgtaccgttgtacgcgccgccttagctctgctttggctggaacgcaaccatcttgtagtgaacaaaacatggtggattaagttatatatcagtctcgttaatggtctccgttccttttgaacatacttaggaaatcaatctgccaatctgtatgcttagacaatagatactgactgctagagatgctattggttaaggcgtcatctgtgcaaccgtatcttatttcaccaattcaaggactgtcagaagggctcgcttggtttcgaattctggtgtcacaaaggcatattttgtgcatgtcccaatttatgtttgttattacagtatatatagagtatttacgctgtgaaacattcaagaataatgccatgttcatgcaacaagctcagaatctcaccaataatcagcaggcgaggcacgtgatcaggatcgaaaatggcaattaccagggtttcaagtccatactggccttcgttgcacatcgcagcattcaacacaagttttgggtatagaggataagctcaggcgcataagctgcattagctaccactaccaatagtgcaatgaatacaagcatccaaccattcagttatacaaatgatggtggcctgatgggtgaccaattctgccccctacagcccaattccgttcaccttctatgctggacaagccctttctctttcaagtagtccacaaattcatcgattaggtagggccaagcaccttcttcgtca

SEQ ID NO: 4509 - DNA, 5275 bp, Sorghum bicolor
ctaattagtcaagccagagccatatagcttggagctgcactgtaagtcccagggggccgctccctgactaagtccttacggagagcagagacgggtacgcccggcaatccggaccaccaacggtacccgctccccctttcaccaccatcatcacgatgctcgtaagcatccaacatcgccatcaccgcagtgaccaaaggttcagcacagtttaagcatcaagttaagtagagagtgattcttgtttaagcatgtgtataagatgagtagagcagctaagcaaacctagtatagcctagtctacccaaatacataaccccaggtgagcaaggaataataagtaaagctagtcatgtccttagggtttgcattcattggacacatgcatataaagtaaatgaccttaatgagtaggttcagaatgatcaaacggtgtctgcacttgccttgatcgaagtcgggttgctcgaactcagcgggatcctgaacctcttccttcacgaacgtctcgttggctatacgcgacaataatcaatcataggaacaatacatgcaagcaaacaaacttaatcagaaacagtacaccaaagcatgcgaaaacagaaagcaactgcactactgtaatctattcgacgaaacgaaaccatagcgaccagaatcacctaaatcggagttacgatgcaaaagttatggctaaaacaagttgaatggcatttctgcagataaactgaactatttttcgtaattaaaactaattaaaactgaattaaaactcattttggattaaataaataaattctaaccgagccaggggttagactgcaaaaactaagggcataaacttaaatatttttgaaagaactggactgcgggttaattttgaataagcccgagggcttttctgcaaagcggcaggggcgcgcgggggccgtggccgtcctggccacgtggcggccggcggttggcccggtccatggcgacgctgtggaccgggggggctcgggggtccaccggtccatggtggaccggggagaggtgcgggggcggcgtggacccggtccagtggaccgggcgtgcgggcggcagagccgcggtccatggtggaccgcgcgcgtgcaggcgagcggcggggccgcgtctggcaggccggtccgcggcggcgctccatggccgtccgcggcgagcttgctgcggcggcgctgcggggcacggccggccgagccgatggtgctggcggggttggcacgacgaggcggatccagggggatgctcaccttggagaacggacggcggcgacgagaagctcgacggcggcgagggaggctcgacggcggcggctcgaactcggcgagagcggcggcggcgcgagctagggtttagggttttaggtggctcggggtgcgaaggggcccgcgagggcgagtggcggcgctatttatagggcgcagcgaacttcggttcgcgtgcgggcgcggaaaccggagcggaggcggcgcggcgctcccccatccgattcggacgggaggttgaagacgcccccctgacgggtggaccccacctgcgggtcccactggtcagcggctgcgggcggcaggggggcgctgctgcgcggacgagctgggccgcggcccactcgggcaagaggagaggggcgcggggtgctgggccgggagtcggcccaggcgggggctctcctcttttttttttaaaaaacagaaacagtttcttctaaattttctttcttgcaacaaaataaagcaaaacaagcaccagcaaaacaaacaaaaaaaatgcagcggcatgaatgcattcgaacaagttttctaccttatatttaattttatttaattttgtaaattatttaatatttcccaaaattcaaactgagccaaaattaaatcaaatttaaactaaatttgaatttcaaaaaaattggagtgttatagtccccctcttccgtcgccgaggtagcggtggccgcttctgcggcggcggctgcgatggcgtcagctttgccgcaggagaaagagcagcagcaggcgcggcggccgatgcacgcgggggtcggcggcgctggcgccaatggccgccaccacgcgtacagccgcaaggacaagtctctcggcctcctctgctccaagtgagcctctcgcagcctcgacgcgtctggagatttgtagctactgagttccctttgctgttctgagttctgacccaattctccgtgctgcttttagcttcgtggttctctacaaccgcgacgacgtggagtccatcgggctggacgaagcggccaaatgcctcggcgtggagaggcgccggatctacgacattgtcaacgtgctcgagagcgtcggggttagttctttctttcttctcctgcctttccgggacacaattcttgatttcttgtgcggtctgtttgggtatcaagtatgatttctagttctgtttcaattcccccttgtgagaagattcttgtgaggaaagccaagaatcgctacacctggataggtttcggcggagtcccaatggccttgcgagaactcaaggtctgcgtctaatcccctgcgtgatatttcgatcaagagctgtagatcccatccatctaacccgtcatttctctcgtcttctcaggaaagggcgctaagagagaagtctggcttggctcctctgcaaaacgagcagcaatttgctggcattgtacgacttcttatctttcccttccatttgaagtgatgtatctgattctggtccacaacaatctgtactgccttcgtcctaaaaaaaacgatgcagttctaggtctgcctctactcaaactatccaaaatttgaccaaagataggtaaactatgacacaatataggtataatacgaaaatacgttctatgattgaatctaacgacacttatttggtatcataaacattgatgttttttttgtatacatttggtcaaatttaaaatggtttgacttggtaatgtactagaattgtgttctttttttggacatactagtgattagttcctgctgaagtgtttcttctcctgtgttcttttgcgaagatttctgatgatgaagatgatgacacaatgggcaatcctggtgctgataacgagaacgagaaattgagtcagactatggacaatccttctaacaaacctggtgcaccccgttgtcgccttcgatctggtacattgctatttgcttcattttgatttagcatgtgttacatgtgctgttccatttgtctgcgaagctcagaattttggttgttacattttagatcataggaaggaaaagtcacttgggttgctcacacagaatttcgtgaagctcttcctcaccatggaggtgagaaattcttaaactctatttctgcctgaagatttgtgcctgatcagtccattgatatgaaatctatacctagagcaggttgacacgatctcacttgatgaagctgcaaagctgctccttggagaaggccacgaggagaccaatatgagaagtcagtactttcattttgtctttctctaaacgtgaagcaatagcactatcaggactaaaaaacttaattagttcttgatatttattggtaatgcagctaaagtccggaggttatatgatattgctaatgtcctgtcttcattgaatctaattgagaaggtagacttttgatgcttgctggcgattaagttgcaatctggtagtagcatgtttcttaacatacattcttgaattgtggattccagatacatcaaggggacacgagaaagcctgcttttcgttggttgggtagggccacaacgccgaacacagaaaacggtgtcacagttgctgtacccccaccagggaagaccacatcgaacaaaagagcatttggaactgaactcactaacattgacatacatagaagtaatctagattcaaaagttcagaagaaagcaaaactggcacagagtggtagtgatgtcttgacaaattgcaaattagctttgcggagtcagcttgggcagggtaaacaaagtggctttgtttatggtcatttccaccctgctggtgcgaggaaacatgaacttgatggtggcaataaacctgggcaaagggagagggctcaggactgggagagcctttctgcttcctttcgaccacagtaccagaaccaaggtgggttcaatactttaatcctgttttgtttcttaggacaatgctagaatttttctacttaagcattagaagtatgtgtatagcgtgtctctctagctgtagttttatataattaggctaagctaatagtagcatctgatggtcttcagatggaatccttgtttcttcatgatagctttggcagccccagttgcaaccagtcagctagaaagtctgaaaatgaaatataacctcaggaacattgcaacacatctcctagtgtaacatcattatcttcaatttgttcaaagttaatatgagatttgttgatttttataagcgggacactagccaatgcccaatagttcattatggccattttatatttattatcacgtctatgcaaactctttaattgggtgtttgaagtaggactggcataattgctagatatagaatgtgctcagctatatgttacactaaagcattccctcttttctgaatgcagcactcagtgatctttttgcccattatgtcgaagcatggaagacatggtattctgaatttgctcaaggtagcaacatcatgcaacaacactttggccattctgttaaccattttttgtaggcaaattatagggtcaagcattgcagttcttagtgcacgcttgtgtattttacctgtacaatctgttaaaaggggaggaaacaaagacaagattgggcctagggttcattgtatttactcaatgcaggatgtctttaggctatttcaggtggagaactaagagtctaagagttgaactattagagagatacccttaggggtgtaagctgtttcccaacgtctctaatagaaacatcattatcatctcgcctctgtgggttctttattgttaattgttgtttttgtgcttacctatgtgggtgctataactttctgtctgtcactggccacgctgatgaaacttctcatgatgatgaagtataacttgcacatgcctatcacgacaaaaagaaaatcaagaagtgtattcaaattacaatttagatacaatcacacaaacgttattcattctttcctttttgttgtgatcataattcttgctacagttcagagtttcagac

SEQ ID NO: 4510 - DNA, 7022 bp, Sorghum bicolor
gttcaaagttaatatgagatttgttgatttttataagcgggacactagccaatgcccaatagttcattatggccattttatatttattatcacgtctatgcaaactctttaattgggtgtttgaagtaggactggcataattgctagatatagaatgtgctcagctatatgttacactaaagcattccctcttttctgaatgcagcactcagtgatctttttgcccattatgtcgaagcatggaagacatggtattctgaatttgctcaaggtagcaacatcatgcaacaacactttggccattctgttaaccattttttgtaggcaaattatagggtcaagcattgcagttcttagtgcacgcttgtgtattttacctgtacaatctgttaaaaggggaggaaacaaagacaagattgggcctagggttcattgtatttactcaatgcaggatgtctttaggctatttcaggtggagaactaagagtctaagagttgaactattagagagatacccttaggggtgtaagctgtttcccaacgtctctaatagaaacatcattatcatctcgcctctgtgggttctttattgttaattgttgtttttgtgcttacctatgtgggtgctataactttctgtctgtcactggccacgctgatgaaacttctcatgatgatgaagtataacttgcacatgcctatcacgacaaaaagaaaatcaagaagtgtattcaaattacaatttagatacaatcacacaaacgttattcattctttcctttttgttgtgatcataattcttgctacagttcagagtttcagacgctacaaaacagcctgtattcagattatgcaaagacagcccaatagtcttgcctcaattgtatatgtatgatgtaagggattagtttctggggactacgtttctggagtttttaaattgatggtgaccagttacgcaaaaaaagaaaagttctgaccaaaaagtattccaacgctctatcacatcatgcgctaggatgctttgacccaccgagcgctatacaacgcttgaaaaggatggttgattgagacattgttccaagtgattggctcctcgccgctgcttgggttgttttgaataaagaagtttagttggctacttgtgttttggtttgtctacctaataatcactttaatcgattattcccccaacgtcttcgacaggaacacataatccaccaaccattcatgatttttgcttggattttttttttttgaaacgatctcacagaagtggagatagaagtattgttaggctaggaggaaatagcgccaagcattcagggccgaagcatcctgatcgtttctaaggcgtttttgccagattacaaagtcgctgtgttatttctagagtctgatgatttttacttcgattatggagagcatctcaactacaaagctgttctctttggctacaacttttgatacaaattgattcggtttggctcttagtaatttcagcactatgggttctcccgtagttgtgttgtgtatgctgttctttcgggagtctttcttctcaacgtaatacgtgtgaagtcattgtttccgaaaaagatctcagtgcaaataaaaaaaattctaatctacttgcagatacacttggactactaattttccatgagtgaatggaaaaaaaccattttttttgtgaccaataaaaataaaatccatgagagaaaagaaaaaaagaaaacggtacatagtcctgcttcaaacataattttgccaaccaggcaattgttttataatcgagaaaacttgtgaagatcagataccgcacgaaattgatattaaaaaaggtcaatcagatgcccttgtcctccaaataaaatcctattgtcaattatcgtaggcgtttattgttttatttaataatatataatactttgtcagctataaacgttgaaccaattaaattacaggcacgactgcacgggggcaatcgcggtctgcgcagcctaccaagcccggcggcggcaggccaaacacccttcttaagaatgcaacaactacgcgaataaaaatctcgcgtctatcttcttgcttgcttccttccttgcctccgtccccacgcccaccgccccgcatccgccccgaaaccctagcggatcgtcgccatggccgcggccgccctccttcgccgcatccccgccgcgcgggccccggccacggccttcatggcggcgcgcccgatctccgattccacggcggcgctcaccatcgagacatctgtccctttcacctcccacctcgtcgacccaccctcgcgcgatgtcaccaccacccccgccgagctcgtcaccttcttccgcgacatgtccctcatgcgccgcatggagatcgccgccgactccctctacaaggccaagctcatccgcgggttctgccacctctacgacggccaggaggccgtcgccgtcggcatggaggccgccatcacccgctccgattccatcatcaccgcctaccgcgaccactgtacctacctcgcccgcggaggggacctcgtctccgccttctccgagctgatgggccgcgagggcggctgctcccgcgggaagggcggatccatgcatttctataagaaggatgccaatttctacggcggccacggcatcgtcggcgcgcaggtgcccctaggatgcggcctcgccttcgctcaaaagtacaagaaggaggacacggccacgttcgcgctctatggagacggtgcggctaaccagggacagctctttgaggctctcaacatttcggccctctggaagctgcctgccatattggtgtgcgagaacaaccattgtgagttcgtgcatcaattccgggaatcggggttagatcgtgataaatctgattgttcatcgtgagaaatatgacgtgatctgggtttgatttctgttgtatagatgggatgggaacagcagagtggagggcagccaagagccctgcctactacaagcgtggcgactatgtgcctggattgaaggtaattattctttgggtttgctggtattgtgtctgaattcacgatagctggctggtatgataaatttggtttctgtttgtggtatgtttgattgtttattatgtttgtgatatgtttgattgtttggggttgttttataactctatgtgttgcacccttttgctctatagccatagagctgagtgaggatgacatgcagttgagttgaaaaaaaagcatcttgtattgatttgcgattatataagaatgatgtatgcattctcaaaccatcctgttcccccgtattgagttaactccagctttgactgttaagggaattgcttaagcttggatttcatgttggcattagttttagcgtttgctacagatataactaaattgtatttcgtgcaggttgatggaatggatgttcttgctgtgaaacaagcatgcaaatttgcaaaagatcatgctgttgcaaatggcccaattgtgagtactatgcatctttgctgacttctgttatttggatgcatcccatgctggagaactactattaggggtctggggttggcttggctgttgtgatgttgctagattcagtagttaaattcgcatgaagaactggatgcatagaccaaaatttaacatactagtattgcacttgccattttatgctggggaaacataacatataattctaatggaatttccattgtcaaaaacttacacaatttgttagcattgttacagctaattaagtcttcaatagtgattctaaatttctaattgtcgaactagctacatggctgcatatgttatttgtccgctagatccaatattagctctgtttgggactgcggtctgtggctgtgcggtgcgaaaagccgaactgtggtttcatggctgctgtatcaggaatccccagtgcagttcaatcttgcggtcttagtctcttgtgcggtcggaagaatcacagacactgcgaacgttttggcgggattcttcacttcttttggctgccaccacgagaaaacgctgtccgccggtcccaaacagggccattgtaggattagattagcattttttttaaaagaaagaggtggtgcaattaaaatgacaattttcgcaggctgtctgcaaaagagtgggacattttttgatcaatgcagctctacaattgagctatgtcagctactgttattgatccttgtccacttgtgaaatatgaaattaactatacagtgatgctaactatgaagtcgatgcatgattgaatcatatgcatatgctagtgctttgtgtttgttgccctagacatccgtatagtccagaacccgccgtggcacatcctaggtgttttgtcctgtctagcctgctaggcactggtctgccttgctactagaggaacaccctgttatgcttagtaacttaacatgtgctactgctgctattttgttaccaaaggtacattaggtggttgaacataagtgcatatgctcaaatgttatttctgataacttgcttgctctatttgttggttcataattattttatgtcatgtgcttaatggttactaagaccctcacgttctatgtatctaggtccttgagatggatacctacaggtaccatggccactctatgtcagatccaggaagcacttaccgcaccagagatgagatttctggtgttaggcaggtaaggtcgttttaatctttcagtttgaaatttaaatcatgctatgagtgttttaattaattgtgttacaatatcatcaggaacgggacccaattgaaagggttagaaaattgcttttgactcacgacctggcaactgctgctgagctcaaggtacaggattattttggaaatacataaagagcgtataaatatatatgtacaattgaagcataaagaatgtttataagggaaattgttatcaaaatattatttctttcagttcatattctaacaagcttattatcatctcaggatatggagaaagaaatcaggaaacaagtagatgacgccattgctaaagcaaaggtctcattaaatttagatatgtttttttagttcttctgcttcaaattagttatgcttaccacttcatgtgctcctgttcatctgcaggaaagttctatgcctgatacttctgagctcttcacaaatgtttataagaagggcttcggtgtggaggtaagttgtcaaaaaaaaaaaaagaattatgttagctgtgtgcataacgccttacttgcatttgcaacatgaaatttttgtcccaagcaagttggagcaggctatgacacccaactttcatttctcggcctgaaattagttgcattctcttaattatgtgacattagtttcatttctgatatcttggcactagtagatagggttgtacataagaagttgaacttctcacagtctgtagtacatatgttttacatatgctcaactattcagatggtagtttccatgactcagtcttgaattacaactttcgtcattacttttgattgcggtgttactatgaaagtgcttaatatttccattataaatctttgaaagctatatcaatagccgaaacttaaaaaaaaaaattggtaaaggtatgcccaagttttgtagtttctatagccagaaagtgtaccgtagtccccattataatggcagtttttatttccctttttttacaagaatctagtgtaacaagtgaggacgggtggtttgcttcatttgttgatgtcatcatctaatatactgcaactacaaattgtgcattttgatcgtatgggcatgggtgctacttctgacttgactcgctgattgtgcagtcatttgggccagacaggaaggagttgagagcttcccttccttaggttggcagcatgatgggcagtcctcgtaatatgatatgatagccaggagaaataaacattaatgaagccctcagacattgctggaattttttgttggcaaatgaacctgtatagagatgcgttgtcaggaggatcagcttctttgtttcgcttttctttttcccccatttctacaattcagttttaactgctgctggctggcttcttattgaagctaatatcgtctgcaattgcttcggtccaagaaaaccgaagctggagattataaatttgctcacgcctatcgtctagacctgctcactctattgctctatggtgattgctcgatcagtttctacctagttgtgcgtcatttacacttctactggtggattaattttttctaccaaaagtggtgcatggatctgacagtgtaactcagattatcgtacatgcagttgtcaaaatctctccggacgattgcctttaagcattttagatggaaccattcaagcaaaacagggagcaggattacaatcaacagatgctaggactacaatctctggtcaacgaatgctgtattcatctgatacctacttagccaagacatgagctacttgattggtgtgcaaaaaaaacagcactcgactctttaatttctctgatctggtgattgatgaaatgcatgatctttgaaagttccgcatccccaaggccctcaccaaactcttggctgtccgtttcaactagtagactccggatacctttatggttacaagattcactccatctttgcaggcgagagtctatcgtgagcgcataaaggccatgggccatggctgtgccatcttgctcggcctccctcaaaaattcctgctacctttactttaaaaaaaaaatcctgctgcctgctggaccccgaagaactacaccggtggccccctgtccagattccgggtaaagcaccatctgtgttaacatttgaccccaccctcctgtggcgcgcgccaaaaacttctggtgttggcagcgggcttcagcttgtgatctgccaagtgggccaacagttgaaagtggccttttctgaaagaatttgtgtagagtccgcccgaacgtgggctcttgcctgtggcctgtgggttgtatcgat

SEQ ID NO: 4511 - DNA, 6666 bp, Sorghum bicolor; identical to SEQ ID NO: 3593

SEQ ID NO: 4512 - DNA, 3980 bp, Sorghum bicolor
gcggaatttcgacgaccccctcgttggctacttggcttgcgggttgcgcgcggcggtgaaagtttggcgagccgcggtgattttttttcccccctgcacgggacgtgcaatttggcggatacggaagccacgggacaaagtggtcgcatcaccggaaatggtgaaaagatcttcgtgttggtagtagcagaggtaaaaaggatactccttcgtctgcatctcggcaacctcaggatagagttgctagtcttttgtaaaagctcaagcaacttgctcgcagaagcagctgcattaccggtcttcgatcgctcgccggcggaggcgcaggggcagagctgcgtctagtacgaaatgttcgcgtggtttgtggtcagcaatgtgcccagaacttgacgtgctcatcattcgaatccgcagcggaatgccagaaatcgtcgttggtctgtctctggcggaaccgagcctgttcaacttcaagcaaaggcagctagagctgggcatgcatcggtgtgtcgtttgttccggacgacgtgggccagtttgggtggtcttggtcctagtctactgcatgcctactggccgtggccgggcagccgcaggcccggccacttgacaagttcaagctactacaggacaagaagagtaggacggcgtcctgggcaacggcggcggcgcggttggtgcgcgagcaatagcgatgggcccggacacggctggaggaagccactggagtttggaccaaatcgctgcctacggccctactaccctttttttttctctcgagtggaacggccttactacctagtaggggttgtggtatgggccttcgccttgtgtattttcttgtgggatgtgggctgtggcctgtgggctgtgggagttcgagcgggttggcccttggccggcctcttctcgtgcgggaaccagaatcggaacgggctccgtgggttgatgcaattcggccctcttcgcggtgcttttgaccagcttcagtttcggtttctccataattttcaggtgaagccctgtcaaacggctccgcgagaaatcacccatgaaagtgaaacaccagaaaactgaaggttttttttttttaaaaaaaaaaactttcgcagggattgaatgtgacctatccagcttggtgctttggctggctcacgcagtgaagctgcattttggcttctcgtacaaaacaggacgaactgttctaacaacgtacaagtactcgctccatttcaaattataaattattctattttttgataaattaaaaaaaatttggtcaaactaagtttaattttgggatggaggaattacatgccatgctcgggctgttctatcggttggtgttctatccagcccggaacagaggtgacttgtcgagcctatccaggccgcacgcgaacagtgcccgcctgcacacgaaatgcgcggcatccgcgttgcatttgctgagacgcaagaaaaaaccatcaccaaaccgtggaaagcagtggcacacgaataagaactgaacagcagcccatctcggcaacggtcatggcccgtgtcgcaggaacaagccacctctgctgttcctcctcggcacaacacagctggtgttgcttctctttcccaggagtggttggttgatcttctcaaccaactctagctagcagcagttacggtacggcaccgcaccgcacccaaaatctgtgcaaatccggtccgtggtggatggtttccgccaggcttgtttacacggaaaaaactaatttcgccaacccacccatgcattggcataagccagtcaataatccagcaatgagatgctagtaataagtgacaggatatcttgcattcttggatgttgctgcgaggatacgatcgatttgatgatactttcacactcatgtttaataatggccaaataaaacttgtccagctaaccttatttggcccggtgcggaagcccgtcctataaactgaggcgcgccgcagcttcaacgtaacgcacccctcctggctcctacacctcacgcacaccacacctgacaggcatcaggagacggagagggccaaaccagcggtcgtgcgccggactgccggaggcatggacgcccgacgacaacgacggtcgccgtcgtgctcgtgctcgtgggcggccgccgcgcctctcctgctgctcctggcggtgtccttgggtaagcgcgcgctacggccatgccgccgggaggcttcgttattattcgttagcgtcctttgttttattcattgttgttgcgtttgtttgtggattttccgatcgagaagggggtggccaccacgcggctgcagcgtcggacggagccgtcgtcggcggcgccccagccccaggcgccgccggcatgacggagctgcagaagcacgtggcgttcttcgaccgcgaccacgacggcatcgtcaccttcgacgagacctaccaaggtgagcgcccgcccgcccgcccgcccggcgaccctccccccgcgttgacggcgcgtgagcggcctgccacatttcgctcgttttgtcgtttgtgccacgccgttcgttgcgatcgatcgaaagcctgctaatttcggcaaaccagcaggctgtacttgtttgggttgctggtttgttctgactgctgacgcgcgtgttttggatggtggtcgtgtgactgatggcatcggcatgcatgcaggtctggtggacgtcggagttggcgaagtcacggccaaagccagcgccgctctgatcaacggcgccctcggcgccaagaccagaccagtactgtacctcgctcacgcgcacgccggctcattggaacagtacactacgttgaatgaccgttttttgtcgctaacacatgttgatgactctattcaaatgcgttcatgcaggacaatgccaacacctcgcgcatggatatctacatagagaacatccaaaagggtaaacatggaagcgacacaggcgcctacgacgctcaaggaaggcacgtgtgcatatatgccgctcctcgaactaatagcagttggccattattgcagtgtgtgatttacagtagttgatttcctaacatttcacctctacaggtttgttcccgccaagttcgatgagatattcaccaagcacgccaagaccgtgccgaattccctgtcaaaagacgagctcgacgagatgctcaaggacaaccaggagaagaatgacttcgcaggatggtaataaatcctcgcctgatttttttttcttactgaaaaaattgggatatgcattaatgcatgcagtccccctgggttggcattgacaccgtctctgataataattcttgggcttgtgccttgcacaaatcacaggttggcagccaagtcagagtgggagatgctgtacaaggtcgccaacaaggacgggcgcctgcccaaggacactgtgagggccgtgtacgatggaaccctcttttaccagctggcggcgcatcaggagaagaaggcctgattcatttatgttttctgtaatgcaagcagcatttttcatttttcaatggttgcctttgtaagaatataatgatagcgatggagtcaatggcaggcaacagttttttattttaacccgtcggttctaccccatgtatattaataattgggttctatcgatctaaaaaaaagttcagactacttgccaccgaatccactccaccgttcgcacgacgacggaacgacggacgcgaggccacgagggtttcggtttcgggcactgtgtcagtagccatagccacgcagcgccgcttgcccgttcggggttctattctatcgtgtggaaagaggttttcgaaatgggaatccacattccaactatgagcatctccaagggttatgcatttagattttacatttactaatttgtaaaaaaaaatttaaaatatgatatccaatggttttacatttagactttgcaatttgcataacttgacatatatgccaagccctccaggcttt

SEQ ID NO: 4513 - DNA, 5862 bp, Sorghum bicolor
gctccggtgttgtgtccgtgggtggtggggtgctagccgcgggggtcgcagttggggcaggaggagctggggagcggcgtcggccgaagatgtcgccgcaggaggcggtggcggagacgacgatacccattgccgccgcgtgacggcgtcggcgtgggatggtttcgctcgttttggtgagcagggttttgggctgttggcctattcgggatttgagagggttttggctctgtttctctatatataataacttgctagattattcgattggaaataggatcgaaaaaatatatccaaaataaaagtttctttcttagaagattaacttgcaacgtcggtatttcctttcacgatcgtcgagagtttttgtcccgttacggggcttttctttttgaaataggtgtttctatatagaacttgccggatcattcaaatggaaattggatcaaaagccagtcccaaagttttcgtagagcaactttgacaacatccatataaagatattttgcctatttaccgattattagccccgtctcatcaaaactttataagagcaaggtcaataatagagccaagtactttattataaatcgagtgattagagccaagttatttatacaataagttatctcatatttgtctgtaaaacacattctttttcctattccttctcacaacacttattatgtgggcccaccactatctatgtactcgtgcccagtttggtgcttgcatgagagccaaactatcatctctcttctctcatccacatcagcattagcttagctataagctcattattgtatctgctcttaaaggctttggacaagcaagcggtaattagcgaactattcgactgcccatgaatcaactatgcaaggcatattgagaagaaacgacaaggcatcgtcaaaatggaggagttgatattgagcttagagtctaataacctgttttgtagagtttcgtacttcttagctctagctccatgattcttttatagagtgattctagtgatcgagcaaatgagaattggtcctgtagtgatttttctgaggattgaatagggagcaatcaggaatatattttaggttcccaatataaatgaaaaggtgattctacttgaatctccactaaagtatgagtggtattttactatttggctgagaagatttgctccaaggagccttgccgaatggctcctatgacaatgtctgatgttagtacatcttccttatcatctatcccctccatcctaaaaacttgttgatgaaatatcctagcaaacttgaagtttaagttactgaacgatatatttggctcacgttggcttgagattgtggcatacggagtaaatgttttcatgcttccaatgagcggctttgttttgtaattagcaaagttcaaattcagtaaatataggtaattccgtcgatcactaatctatcataaaaatcctagaacatgttttttagacaaaatgagtaccttttgttacggtgcattaaatgagctacatgatcgataataaaaaaacaaatgaagactcaaaccgtgttggaaggtacatcttacatgatctaaattcttttgtactggattccatttttcttatggctataaagtcgaatctatcttttgaaatacatgaagtactatatagttattagtataaagtaatcttaaacactctagatttgcaaaagggaggagaacaacttcaagggacgctttatagaaagagatattagtaaaaaacatacaatacgacggccactttattggatgtctaaatataaaacattttattatagtttaattttttttctcattagctattgataaagttttgagggtgcgcgtataagatataaaaaagttgttagagagtaaaaatatataatttttatttgaataatatttataaagactcttgaaaatttttacttgaagttcattttgttaaactaaaatcaaggtttggactgaccacctgcccttatcgtaggtgcagtggtgcggagtgcgtccctagttgcccgctccgcatccaaccagccaacgcgtccccatggcggccgccgccgcgggggctacaccggcgactgcgaggaagactctcttcaccactacagtcaccctcctctcatcctcactcacacgtagcagcagcagcagcagccgcagccgcagcctctcctgctctgccgcgtccgccgccgccccgcgcctcgcgccgcagccgccggaccttgtccggtgggtgcagcgcgagggtggattcgtccaccctgccctccgcgtcgcgaatcacccggaacacgggctcggggtctctgccgccgcgcctgacggcgacatcccccctggggacgtcctcatcgcgctcccgggccggctccctttacgactacggcgccccaccggtgccgcggatgacgtgcttgtgcagctcgcccaacaagtcccgggtaatgtccattctgattcagttgcttgtccggcaacgtatgtagctctgagcctctgaatgcatcaaacgtttggtaaattagtggttgctgatgctttgagcctctataatgattttgaagtgactgaaattaagctttaatgctaatttatactcttggtcacgattgaatctctcacttggtcaattctgcacttggcagcagtgaacagttctttctgttagtatgataatgttgttgtgatataagaatgtcaatttgaacatgtcatccagggtttgtcctgaattgtttttgtttacctgtttggtgttggaagccatcaactgtggaatcaatccccatgcttataacaatgttatgtggcctggagatatgttaaaatgttgaagtcgacccaaaattgtctcagaattaggcccccagtaagtatatgagtaggtgtagtttatatctgtagtgtgtactcttttccatgaatcaactcagttttaatacttagaaagtggttgaggataaacattatatttccattgctcaaaatggaacatttattagtttgatatttctttatccatatattttccagggatattttattgattcgaacaagattgttttgaggttttcctgttattgttcgctcgataatctctgtgtataattgatgctaaatgttgttgtgtttacgcatgctgaaatgtgccattttttaccacaaacccccttttagatatatgaggggatttctacttgtaaattcaaacaatgaataagttcaatcattttcacagaggaactatgggctatgaagctgggcttgaggttgcttcaagaaagggccaaatctgattcattttggtggccgtatattgccaatttgccagagacatttactgttccaatcttctttcctggggaagacataaaaaacttgcagtatgctcctctcctccaccaggttgttaaatacatatggttgtatctagagggaggcctatcattttgcccttacttttctaactgtttctatttcaggttaataaaagatgtcgttttctccttgagtttgagaaagagatacagcagaagcttcatactgtgccctcggtagatcatcctttctatggacaagatgtaaattcatcttcccttggatgggctatgtcagctgcctcttctcgtgcattccgattgcatggtgaaatcccaatgttgttgcctcttattgatatgtgcaaccatagtttcaaccccaatgctaggatcgttcaggaaggaagtgtaaacagcttagatatgtcagtaaaggtaagtatcctgtgatgttcttgcactcccaaattttccatctatacactcctgaaatttttttccagaatcaagctatctttttcctctttctcatatccacttttcaaatggggatggtattgtattgttcttattactatgaaaatatttgcatttcacaaaatttctacttcgatctctacttgtcatttgatacactcattccctgcatctctgtgcacaattgtaaaatccatcatccacgtatcagtcgtgttcttccctactctttttcatatacaatttcatttcttatgttggaacgcacttgttagccatgcaacacttcaatcaacttatcaccccactttaagctatctctgtaccattgctatccactgttcgtctagtgagcaatgccatactgtaataaagactttgccatatctgaacctatatgtgactaatgttctcgattagtaccaaaaaatgcaaagttgtggcacgttaaagtgcatttagtcaattgatttaccgggagcatattgcttttagtccataatttccttgtttgtgtaatatgcaagataagtctattgacttcatcttcacatttatattgctttatataggttgtcgctgagaagaagattgagcaaaatgcatcaataacactgaactatggctgccacccaaatgatttctttcttcttgattatggatttgtgataacaccgaatccttacgatcaagtggaactaagttatgatggaacccttcttgatgctgcaagcatggcagcaggagtctcttctcccaacttttcagcgccagccaagtggcaacaagatatattgtcacagctaaatctgcatggagagggtgccattttaaaggtacatgctgagtccacgtctacttaatattgaatgcagtattcatgttaagtctcacacatgctatgggcaatacatgtgatttctttcaggtaagcttaggaggcccagacattgttgatggacgcttgttagctgctctaagggtgcttcttgcggatgatccagaggctttgcacaagcatgacctgaaaacactgatgtcccttgatgtgcaagctcctttaggccccgctattgaagcatcagcactccgaacagttcttgccctttgtgcgattgctctccaacacttccacacaaagataatggacgacgaggccattctaagaggggggccacctcttaccacggagctggctgtccagtttagattgcagaagaagttcatgatcgttgacgtgatgcagaatgtcagcaggagaatcaagatgctatcgccgcagaaatccaccgcgtagttctttaatttgtcatcagacaatcagttaccactctgtactggctactgcagataacacaagccccagttttgattatgtagcatattcttgtcatcctacttccaatgcctgatattgaaaagttacatctgcatgaatctaagggtgtgcagtgttttcatggaacaatcaattactttactctactgattactgcgtataataataagccccaattttgacgcttgtaccatattattttcttcctacttcctgtgcgccgaacatgttcctacttgctgtgtgttttgactctttgtacaattttattttcttcctacttcgtgtgtgacgaagatggatttgttttcctacttcccgtgtgccgaacatggattagtttcatcttcttggctcaaagggtgtttctctgaaagggtagtaataaataaagtcttaaaagagccgaaaatgaagcagaaaccatgttcttgattctgaaactcttttcttcctattaactggggtgcttcaaatagaagcaaatgttctcacgggatgaccagagaaaactgtaattacccagctaccgcaaaaaaatgcttccaagaaaacagaaacaattgccctcaaagaagaaatcattccatattttctccccgaaacctaattaaatagagaagacttgttcatcacccctgtagatcgatcgaatgatgaaaaaaaaggtatttacatgattgatccattatatca

SEQ ID NO: 4514 - DNA, 4023 bp, Sorghum bicolor
tttcatcttaacaaggccttagtcactttaacaactaaactttcaaacacactgactaaaaataagctaaaatagtttaatcacattaatcaaccaaaactagctaaaataattttaactagttaaaatttagcaaaaagagccaaacagactgatatgcttagaatatccgtcgtgagtgaccaccgaaccagttcgaaacacgttttaaaaaaacatcggcatttgcattattgagtataacattggctgaaaattcgctacctccaatccttgtgtctgatctcctctccacgatcaaccaatggcaatcagattgatgaatgacgagccagagttcacatcctcgtggggagtgtacaggagcacctctctctttttctcctttgcagttagattagaaattgatctcctgcccatgaaatcaacgcctgcaacactatcttgttgtggcagtcatcgaaatcatcccaggtaataaggttctgataaaaaatcatctaatcttgtcgatagattttatttgactaaatcctaagcagactaaatttaaaaactattgtaaaaaagatataggtcgtctctcgtgtatgttgtcaccgacaaattaaccagagaggaagaagaagagtgctagacggcagagtgacgatggcggtggctgctccggcggcgtttcctacactgaacccctactacattccttttttttttttcaaatcagagtatccctgtttatattagtcaaaacggaaataaaggttatcatagactgttacagaagaactagaaaaaacggaccagattgagcagactcacaaccatcatctactcttaagtttttgaccttggcaagcgatagcaaccaaaagactttgacactaacaccaaacgaaccgctcagactcaacaaaaagtctacagacaaatagagaccaacaaacagcgaatgacaaagacagaatcaacatcttgaaaagcttcttacccttttcttcttttcatccctgtgtatccctactacattcctacacataccaatacctctcttgtctgtcttcttaattcgcaaaaggaaaataaaaaggagagatactgcttgccaatgaattaggccttgttttttttggtttttggctactctagcatgtttgtttaaaatcttgaaatttttagaactaaacaaaggccttatccaactgagaggtacgtttaaagattccatgaaatcgctcgacataatcgtcacctattcatcaaatcatattacattactctcagtctcgagtctcagctgtagtcaaatcctggtctgacgactatataatggaatggagagacgttgcattcgcatcgcatcatcggtcaaatatcgaaaacagagagggcgtagagagagcgtgcgctccaacggtcttgtagcccgtaacgctatagtaccagagtatggtccagtacagtagtgaaaagcgcggtacactgacacggagcagctgcggctgctggtgtccacggtgcaccactgtgccatgccccccggggccacggcagaccgcaggcacaagggtcgcctcgcctcgccgcctctccgtccccgtccttctccccgcacggcgctggatcgcctcgagcacgcgcgcatggcgcatccgaggctccgatcggtcggtgaaaaaccaaaccaatcgcgagtggccccgcgtcggtgatcccacccacggacgtgaggattcccgggcagagaaaaaaaccataaataaaagtagacgcgcgctttaacgaaccccaacgtcctcctcgcccctcactcccttctccccttcccttccctcctcacgtcctccccgtcctcctcacccgaaaaaacaaaaacaaaagccgcccgagccgctgcgcagcacggcgctagaggaaaacgcacttccattccatccaggtcaaaactttcggcgcgccgcgaagggacaagggagtcgggcgcggtgggaaggtagctaagcatgagggagcagcagggttccggcgacgtggcggcggggcggcggggcggggtcatcaggtcgctgctgggcgtcgagcgccggctcggggaaggcgacgcggacgccgccgagggggcggtcggagtctcctcggggaagcagccggccgccgcggacagccgtggcgaggagaggaaggccgtggtgagggtggtggcggccgacatgccgcccgcgctgcagcgccgcgcgttccgctgcgcccgcgacgagctcgccgccatgccgcacttcccgcgccggctcgagcccaagcgcctcgcgctcgcgctaaaaaaggtactggtaaatgttttttttcttcgattgattatgcggaaaagacccgtagctaccctaccaatgctgggactagttgcgaattagagtctctgagatgctgcttagaattcagtgaggacatcgtcttgcattctagattgttactattactaaagatttgcttcatcgaccctaagaatcaaggattattggagcggcattgctgctatagtgtgattgcacttgttttttataccctcatcatgcactagcgtcttctcacgggaatgcagtcataactggtatatgatctgtcccttgtggtgccttaccatgagtccatgacgtcgattgcacggtgcattcatatccattctgatttgattgcccttggagtaatcttggactgtctccatgcgtccgaatccaaaatagtccctgtagttctttgcctttcagctcatttggaaggttctcccatcattggcagttcaagcatcagtttctgaacaaccaggcgatggggtcaggttgaatcatcgtaactgttctaagccgatacttgtgcaatctatggtagctaaccaccaatactagcaattaatacactgcacaatcataaagtcgtgccatcatatgctcaggtggttgtcatttcacaaaatggtactcatatccaagtttgactgatcatgcggcaactttgaacagattattgatcttgcatttgtgtttttgtatttattggttttaatgtaccattttccaactttaatctatcatttcgaaatcttcattttgtactacccaacatgggttcatgcttaatgcttacataatgtaaagactgtatggatcttttctcagttacatgaatctgacaaaatctccaagcaaccgaacagccgaacctaggaccacctcgcctgattcatcgccatacgtgatcatataacgtattctaattatttgtccgcaatttcctcattttgtccgtccttctgtttcagagtgcaatcctgtaccactgtacgttctgataaggtcatccgttttgctgacaggagttcgatactgcatacgggccagcttggcactgcatcgtggggacgagtttcggttcatatgtcacgcacgctcgcggtggattcttgtatttttccgtcgataaggtctacatcctgctcttcaggacagccgtggagccctcatctcattgacggccaccagcctaccagcaatggacaaatggttcataaaaatgcgcagttcttgggacagctcacaccaaattcagttgttcagtcagctaggccgaggccttgtaacttgtaaattccattgtttcttcgaaggcaaatggaaactcttcatgtttctggtaaaatttcgatttgttggtgtcatctgttccaactgaatctgttcaagagtcaagactactaatgggttttgttttcgtgccacatagtgtacaatagacgatcttatccaacagaaagtatcaaatgagcttgaacttacatctgttggtttgcaaggcaggagttactgcctgcggtcatcaagaggtagatgcaacacagtataacacatttgtttctaaagaaatacgtagaaatatcgatgtggatcgaaacaaagaaaacctaattaattatctcgtctaagttctgatatatatacacatcgactaacagattcaacatatgtcaagcca

SEQ ID NO: 4515 - DNA, 5567 bp, Sorghum bicolor
taggaagggagagggtagtgggcccgggttggtggtggtggttttggagctcggcgcgcggtgattggcccattgactttgacgtagtctcgagtctcaactctcaaggggtagaaccgggagtttcggcggggctgtttttgtttcttcgacgcgccgcgagtgaataacgttagccagtagccacaaggataggcttaggcttgaaaacaacctttggcggaggaaatcccatggagcaattgatagtataatgcgattgtataattgtgcggagcttcgtgtagcgtaaggccgtgcagacattcaagaagcgcgatctcatcagatctggggtgtttcgacaagccgtgtacacctaacctgacgacatcttcagaaatcagaaccaacgtgtactgtgtactctttccgtaccaaaacaaatcagttccttgtcactataaattaaattagcttaaatttaactaagttcaaagaaaaaaaatctgtgacactaatttcatatcataaatatcaatattttttgcaataagtttagttaaaaatgaattttgatttagaacaggtctagacgctgatttaatttaagacagagggacaatacaaggctttaggtcattggctacctggatggcaatgagaaacaagaatggttgaattaggttctataatttagggctagttgacaattttagcatgagaattgtcgactcacatattgagttttgtgttgtctcaatcacctatataagataaacacaaatattgaaaacgagctgttgtattttcttaacttttttggatagatttatataataatgtactgtagtccttctcgacaaaaccaaaattgttcgctcactctcgtaactcgttttctactcactagttgcacaaagtcatcttgcgatctcaagcaaaacatgaaaagtatattatatctttctcaactatcatcatatttttttccttatccatggaccatgggacttccaaactgttcaaattaccaccttgtctttgatttggagtggtttcaaaggcaattttatcctttttagttattttttggtaaatagtttacaaggttttctaaatcacattaaatatctctaagctttaattttttttaaaaaaaatagatatatcgagggtacaaaaaatccaaattaaatatttagaggtcatgaaaagatctttaaatcttcaagaaatagttttagctctaggaaaatggggaaaactacaagaaaaaactagaaaattcctaaagcattctaaacaatgtataaacatatttttaaaactatgcataataaaaatataagatgcaaccatctcgagagcaacataattaatgttgaatgcaatcatgtcggttgcatattatgttatcgttagtttaaaaacacgactacatattaattaaacattttcataattttatagtttttttggacagtttcattttcctgagataaatctatttttaaaaacatataggtatatttttatgaaccctaaatattttatttgtattttttgtatcctagtgcatctctagaactttttataatttctaaagcatgcagacaaattttttttttgtggtaaaccaggacaagaaagttcaggggtaagattctgactttaaagttcaaaggagaaaagtcagataattgagaggggtggagtggactttttcgaataaaacaagtagcccacatatgatttgaccgttcagccgatgaagcaccggcccactgggccgatattacttgaggcccacataactacggcaccacaaactagcacggcaggatatttctcccacgggccacggcgcccgtcatggttgtcttctccacctcaccgctaaccggcgcccggcggtaagccactcccgcgaggccgcgagctcgcatctgcctcgttcccacttccatcccacccgctggtccgtaccacggtaccacacacaagccgccgcgccagccatggacgccgtgctaccttccctcctcatcggcggcggactctccgtgtccgtctccattcccaccgccaccaaagccggcagccaatccatttcagtcccccacctctcgacctccgccctccgttcaacccctcgccgtcggggccgacggcgtttgaccctcctcgcctcatcttcgcagttgcctcccacgccactttccgccgcttcgactgagagccagtcgcgttcctccaggtgggtggttgtgatggatacgccctctgccgccgcgggaggcagcagggtgtcccgcgcagacgccgtggattactacgcagccacactggcccaggtcgtgggaaggtgagtagtttggcattctgtagcaaacgagaacaattggctttgttttgctttcaacgtttttttcatactgaaaatattgtgcgtaattacggcagtgagaaggaggcgcagatgcgcatatatgaggcttcgtgggatggggcctacgagttccgctgcgagatcgacgaagatgcatcgaaggagcttgcaagtatgacctccaatccctcggtgaagtactgtggaaaaaactgatgtgcctcggtgctccgcattagtataattttgtgaggaagtgtcacattacccatttaagtttaatcctgtacagtgagaaatgtgtaactgggaacaattatgcaagtttgtcgataactgcagacagctgtctttcttatcatgccattctctgaatcattctagttatctccttattcagtgccaaggtataattaaattgctttgttggtttaggaattgcaccacccgctggactgatttctaatgcatttgataactagaacctcattgacaaagtgaaaacacttggagaggtacatactgaaactcatacatatttgcttcttttgctcttcctaatttacagagatgcctggagtgctatctgttcagccagatatggataacaaatcagagaagggtaatcacagcttgagtctctcgacatctaaccttgtaagcattagtgatagtgcttctacatcttcaagtgggaaaaatgagttttggcttgtccgaatggagaagcccggagttgaagtcgtgacgaaggcccaaatggtggatcactatacccaaatccttatgaaagtgttggggaagtatgtagtcttacgtcaacctagctactactttactagtatctgtctgttctctgttgcgcatgataaaattttgtcatctctcaatttttcagcgaacaggatgcccaagttagcatatatcacatttcatgggagagggattatggtttctgctgtcatatagatgaagaatgcgcaaaagagttagctggtgagcaacttgggctttgatatcctttatatacagatctgattattttcctgtcgtcgaatgcactaagccactgacaaagtaacttctcataccagatgttcctggagtgttatctgttcaacctgatatgaactttggatcagacaacaaagagtacaaaggttttcttatttcttctgcttctgatgaatatcaactcatttcttaatgccgttatcttaagtcccattccggccattctattctgtgcatcattggcagccaaaattcctttcttcctgttcaagaccttttatggtgtatttcaaagcaggaaaccgccaatgctgctataaaaatcctgtgcctgggtttggccttgttttccattctaacacgatatctgtatttaatcatttggaaatttggattagtcaaccattagcagttcctctgaacaaagttgaaaaccagacagtttctagaagactagaacaagcaaggttctgatgttttaccccaaaagcccaaactaaaatcatatttcttcccctacacatcattgtatttttttgctggtcctatttgaggtttatttctatggcctgatcaataataagatgatgacatctatataccaattttgttattaatccttggaggtcttaatttgctacatttgattctcttacactttatactcattaaacttgtacctagtatgcctggggtgcgttatacgacttgaatgtccatgcttctaagagagcttgtataaatcacccagattttagtaaatacttttgatagtttcaggtgatgatggcttgaaatcatctgaagggactgtagcagccgatatcaaaactaaaaggctctttgttacaggtgaagcacagcatgtactttatttgcatttcagctcatttgtttattcatgtatcattagcatgcaggtgatgaatcatcagcatttcgttattcagatctatttctatcttgattgtccctaacttttgtgtacaatgtatgacagggctttcattttatacatctgagaaaactttgcgggcagcatttgagcctttcggtgagctcgtcgaaggtttgtgatagggcagcaagaatgtacccatccgtttatcttttgtgtctgacttgctgattcattgaactgctttgttacatacagtgaagataattatggacaggatatcaaaaagatcaaaaggttatgccttcatagaatacactactgaggaagctggaggtgctgctctaaaagcaatgaatggacaggtaggttgattagaattcttaccacgactagcattgttacagttgtaggatgtttataaacctcttgaaactcacggttatacttttatctgcagataataaacggctggatgatagttgttgatgttgctaaaactagatcgagagaccgtctatctggtggatctaatcaagcatttcgaccacactatcaggctagatgactgtttaatgtataaaacttacagctgtagagtagagataagcacgggagcgaggaattgcttgggggatgtcgttgtctgattgtagttcagtgcccttgtctgctaattgctagagaatactcccagcacaatatgtaaatgcagctaaagtgtacgattacttactaacatatacttcaattaagtcattctcagatacggcgttgttcctgctcataagtttgaatatatatatatatatttaatatttatgatgtttttttattaacaagtgataatctttctccaaagaaatttattgcaattgttcataaagagcgaacggttcatgttcatatgcagctgatgtcaaattatgtttcaaatcctccaacatctgataaatatcctcgctttccatatgcagcttgtctgcagtggcaaaggaatgtacacctccatctacctctatccagctgagcccaggtttcttggttactccatgttcctccatcctcctccgcgtcctcctcaagtcctcccattgtttcgctcgtgcatatgtgttcgatagcagaacatatgaactgccatgacttggttttgcgtctgccaactttgacgcagtgagctctgccatctcgacatcgccatggctatggcaggctgctagtagcgagctccagattacaaaaccaggatcttcaggtagattgctggcaagattgaaggcc

SEQ ID NO: 4516 - DNA, 5043 bp, Sorghum bicolor
ggatccgaaaggccatatgcaattaatacagaaaaacttgcaaaaacaagtcactgtccattaatgtacatgcaaaacagcaaaagtatgataagcatacctgtagctcttaagagattgatctgataacagctcgtcaaccaatgttgccttgcgttccctatttttcagcctacttgagtagaactcagatgcaggctcaacaaccgtaccgacctaaagccaacattgaaatattcagtacacatcagctacaaaagagatagataaagcttccaacagattaggacgataaaaaaatttgctgaataagtctgcttgatggtaattaggctactcacttggaagtacttgggaagggccttggacttccctgcccgcttgaagtgcctttttgggtcaattacatgcctcagctgcaaaaacagatggcaaacatattatgacatgagcatcccaaaggacaaacgagaatcactaaacacacaataccaattgagttgagacaggcacatccaactctctgcattacaattaacatggtatctttaatctcaagtaaaacaattctgatcctttttttgtaaaaagtaaaatagcttcaatcagatggtaacaccatcagattgttgcagtaaactgctctctatgttcgctctactacatgcttattatccaatggcagttgctttatcatacgttggtccccaaattcttgacagcatatatccgttatataacaggctacaacggcatccaaatgctagtaaggttactgaatcagaagtaacaaccacacctgcaaaatctcgagatccttcttcaactcaggagtgatggtcggcgctggcatgtcaaacctgagaaatgcagcaacaacgcataagcgcacgcacataagccctaccatgcgccagcaatcaatcaagagagctaggttggattccaaagtaaactcaccagcccttgccggtggtgtccttgacgttcttcttggccagcttattcagctgcctagggtccctcgggggcacgaacagcccgtccacgagctcgctcgagggcttccagagcgacccctgcgcggtgctcggattcggcgcgtggtcgctcttgctgctgccgctggtcgttgcaaaggaaggaagcttgggcgcccatgacaggccgatcggcgccgccgtctccgacatcgttggcctaggtctgcgacctcagaaaacctatcacgtctcccgcccaggtgttggattaatcctccgaggcggcagggttggaggtgggaagggaaagagaaggagcagcacggccgcgcggcgcggcggctgtgggacggtgggaggagagagagagaggagaggagaggagcactagggcagcaggtttagcaggctcgggcattctgggccgtcattcagaggtttccacggaatttcacaggccttaatgggctaactctatttccttttctattaggcccatcgctattttttttgcatgatcccgagtcccgcccgtcgccgtcgtgggcacacgccgacggactccgtcaccacggcttcgccaatcagagttcaagagcacaaagacggcagcctccatgtcacgaattcttcctgtgtggactgtggagggagggacgcaacgttcgctctagtccgcgcctcgccatcgctggctgctcggctgctcgctgctcgcgaggacgacgaagcaaccgccaccaccgtccgattcctacggctacggttcggaaacggaaacgcacgcgacaacccgaccaagaccaggagtcccagaccggaaacgaaacaaacttccgataaaacaggagctcccgagcaccccaactcccttcctccgatcgatgcgcgcggatcgcatcgaatcataccggacctaaccgcgcgccgcgtaggcgcgtgcgtacgtcgtcgtcgcgaggccgaagaaatttaagccacgctcggcgccggcgggatctcttaattgtcgaggcaatgggggcgctgccggtgggcctgccgccaatgccgccgcagctggggactctgcgatcgacgctggaccaccgcggcggggcgcgggagccgctgctcgcgttcgactggggcgtccccgacggtgagcacgcggcgtggggtgtggaggacggttccgcgaggggcgtcgtggggcgcctgcggcgggtggcccaggcggtgcgcgcgctcgccgtggagatgtgggcgttcgcgcgcaaggacccgcggaagcccgtgttcgcggcgaaggtggccgtggcgctcgcgctcatcacgctgctcgtcttcctccgcgagcccagcgatatcgccagccattctgtgtgggccatactcaccgtcgtcgtcgtcttcgagttcagcatcggtacgttgctgcacccttgcatcgtatgtttcttctctctcttttttttcaaaacgttagtcgtcgccgtcaatttgaaatctcggtgaggagccatatcaaattccctccatgaaggtctttcaaaaaaaattccctccatgaggaaagcgatagaaatgtctttttattcatattctggccgatgaaatatgagatgtttgctaacctatgcagctatgcttgatagaattagatgctgctaggacatattttgtttgcacccttccttaccagatgctaacaaactgaacaaccctcacatgaacgatgtcatattttatttatttatttttaccaggcctgctcatggatcatcatacatattcaatctctaactaggtttttaaacgttaaacaggtgcaactttgagcaaaggattcaacagaggattgggtactcttattgcaggggggcttgctctagctgtcgccgagttagcagcacaaatgggaaaatatgacatggtggtactcatcataagcacttttgtagttggtgagtactggaaattgctgaaatcattcaatgtataataatattatgatattataccacatctaacaatattctgattttctgattaccagcattctgtgccaccttgacgaagctgcacccgaagatgaaaccatatgagtatggatttcgtgtgttcttgctgactttctgctatgtcacggtctctgggtacaacacgggagaattcaccgctacggctataagtagatttctgttgatcgctcttggtgctgctgtcagtctcggcatcaacataggcatacacccaatctgggcaggagaggatctgcacacgttggtggccaaaaattttgctggtgttgcaaaatctttagaaggtacgatcatctaagaaatggatgactaaaagagtatgtggttctggctccataatttgttctagtatatattactaatacatcaaattcaattatgttctccattataggatgtgttgatggatatctgacctgcatggagtatgaaaggattccttccaagatactcacatacgaagcatctgatgatgatcctgtctatagcgggtacagggcagctgttgaggcatcaacacaggaggaagccttggtcagttatttctccaaatccataatctacgactttttttttgttttttttaacaagtgtgatgtcctgtgtttgcagttaggatgtgctatatgggagccgccgcatggaccttataagatgatgaaatatccatggaagagctacaccaaagttggtggtgcgttgaggcattgctcattctctgtcatggcattgcatgggtgcatactttcagagattcaggtttgtgcatctcattctcatccagcaatagatgacccactgaacacacgtacttccttgctaagtttctcttccaaatttcaggcaccaccggagagcagaaaggttttctgcgcagagcttcatagagtgggccatgaaggtgctaaagtgctgcgcgaacttgggcagagagtcaagacgatgacgaaactgagctctcgaaacattctttcagaagtgcactttgcagctgaagagctgcaaaagaagattgatgagaattcttaccttctcgtcaatacagaaagatgggaagtcattccgaggcatgccagaactgcacaaactcatgatggtgccaatgatgctgctgacaaggatgaatcacccgagaacaccactgtcgattcactgcacatatcaaacagcttcgcttcaaacccgtttctgagcagatattcttcaaatccgttcctcggcagatatgattcaggatcaatgatggtcggttcattgaaggcgcaatcatcatggcctgttcgacaatcttttcatccaagctttccatttgaaagtggggaatcaagaacttatgagagcgcaagtgccttgtcgctggccacattcgcatcgctcctcattgagtttgttgcccggctccagaatcttgttgatgcatttgaggagttgagcgacaaagctaacttcaaggaccctgtggaggaaccttcgacaatcagcagggagcctcctggggttttagctagaatacatgacttttttcggttgaagtgacacagatgattaaaaaagaaaaaaaaaaaccctggtcaaatatgtacagtagtcaacttaggtcgaaaatgttcataatgtaactaatttacaaaaactccatgtagaggagacagtgtatattatacataatactacaagtgtacaacacagtatacacattacagacgagtacaacacagagtgggggatttctgacagttcccatggaacgatataccgtacacaagggcaggttctacttaatagcaaattctagaataccagtggcattcactatttaagctttacacatgtattattgctagcgatgcttgtcagaggaagaaggggaagcccttttgtgattgtggtttggtgcagtctgaatttgtccatccaatctgcctccgttgattgtcatacacaactaacttgccgcgcagagaaacatctacagaaaacagaaatgtatcggttgaagtttggcaaaatcaactttttttcgctatattgcaggg

SEQ ID NO: 4517 - DNA, 6487 bp, Sorghum bicolor
agtatcatcaacatagggctctgtttatagatctaattgaaggaacacaaaaggtttaaaatatttacaaattagatagatacatgatttagtaaaatttttggcttaaatattaataatgatccgaaaggagatacatatatctagctagacagctagtggcagacacatcggcgtttgttgcccatgaagcgcgtccaagagccgagaaccaaaatttcagccgtccttcgttccaccggatgggtagggtgatttttttgtgagtagtgctaattattaagctccatctaaactgaatcaaaataactggacagaggcacagggccaaattttaattggcatgttatttgtttgcatcccaactactccagcgagccaagccaatatttgacgatgctaaaacgcagacagcactattttttgatctagcatgttcggtattaatgcagataaaagttagctatgcaaaaacttggatatctggttcgaggatatcccaatttttgtgcaagccttataattctaaccaccactataaagttttatctcgacatacaaattctctacctcaacagtcaaattaccaaatacaactacattctgttagcatctacaatcatgatatcacttcagagactaagacgcaaccacaaacatgcattttgttctccatactgtataagtaattatagtagtcttatttcattccaaattattcacaattttcacaataacacatatttataaaatatttttttttataaacataggcgatgaatatcatatatatgaaatagataaaaaaatttgatgcatgttctataaactattgtcttccaaagttgacaatacgaaattcaacaattcgagagtcaatctccaactgacgcgttatccatgctatgtacaactccggtagctaaactccggccaccatttcccttgcccaaaagaagataggcttagtcaaatattacttccaccgtttcaaaattttagtttactttaacttttatattaagttaaaatacaattactcgacatgtgcaattaaaacatatgataatttgtattaagttaatctcaacaaataaactatgagatattttctatattaccaagttgtgtagatatgcaaatcatatttcaataaatggtctcttcaaaataagttttttgttttctaccacatatcttttctatctattatatctccttctctatctgttatatttctatatatcttagttctcatatagacataattatttaaaatgatattttattttcatcttctaattttatataatatcaccactctacttagtttgcactctaattaatgacaatagaaactatctcagtttctagtctgggactgttcttaccaatgttcctatctaggattaagaaacccgcttaaatcttaagctactttcagaattttttagatgaagcctttttacattaatttattagcaaacacctttaaaatcaaaaaggcttttctatccctccactactcatgacgaaagggccgtgccactcgaaacctcgatgacgagggaacatccccctgcatcaccctctgcacgtgacccgctccactcccctgcacagcagtgcacggcgcgcacactctttcatcagtcgtcgccaacccgaccaccgtcacgcggacggacctccctcccctctaaaaccccacgaagtcgccgaaagcgagtagcggccgcagcccgcagcgaacacagcggcttgtctctttcccccccacttgttcaatctctctcctctctccccttctcccctcccggagcgcaagaaaagctcggattcctggtggtttctcccatcctccgtcctcgatctgagcgttgcctgcttccctgcctccccccgcttgcccagatggccgccttccgtgtcctctaaatcttccgccgcagcaagcttcccccacctgtcggctgtccgctgtcctgctgctcttgccaatggcgaccaagggagggaacgcgaggggcgtcccggtgggggcgctgctggtggccgcgcttctccttagctccttggctcccgcctccgcgtcctcgtaccccgcaagtgagtgaggcggccgagctcgccgctcctggtttcgcctctcgcccgagggtggtttctcgtgtttgattttgacgggtgtggttcgttgccatcgcaggggtggtgagcgggttcctctccaatgcggcgtcggcggtggtgaagcggatgtggtcgctcaaatccaccaccaagacaggtgactgccgaaatctctctgccgttttgttccttctccggttccgatttgagttttttttttccctgagacgtgtttgctcctggtgttgtagcagcgagcgggggcaagtcgatggtgaagtacgagggcgggtacaccgtggagacggtcttcgacggcagcaagctggggatcgagccctactccgtggaggtcacccagggcggcgagctgctcgtcatggactccatgaacagcaacatctacaggatggcgctgccgctctcccgatgtgagtgcgtcctggctgacctcttcctcctagcaccccctgaatccggcatgttttggtgttactccccagtggggctctccgctaattatatgctgctatgtgtttggtggagttggtgctgccgaagctgtggattggttggtgccatcaattccggcatggtcattcttttgatggcgatgtctttgttagcttggcagcctgcacagggctacgtaatgcttttcagttgctttcagtgtgtgtgttcacttgtagaaatgtggtctgaaaaaaaaggtgtcaatccaatctatgctacttttatggttattatatatgctatggtatcaaatttcgtcaatgtgttgctataactgtttagcactaagaagtgctgtcatggcacgctgatcccctctctgtgacataaacatttgacccaaacagttatactgattactggcgatctgcatcttttctatcatgtttttccatatgcctgtccatgtttcatttactagcagatgcttttgagcacacaagatttatctcatctcctgaatctgggctgaacaatgcagatagcaggccgaagcttgttgctggttcccctgaaggatttcctggtcatgttgatgggaagctgcgagaggcgaggatgaaccatccaaagggatttacagtggatgacaggggtaacatctatgtggctgatgcaatgaacatggccattagaaagatcagtgatacaggtaagctaaaatgtcctgcggtagggtagatgcacatggttttgtctgttccttgagtatccaatggttgccttttggtgtttgctggtcttgtccgtcacttattcagcacctggatcggaaactgcatttaggaagaggatgcgctgttaggcaatgaccattttgtgctcagtttgagtaataaatatgcttaatctagtctctgaactgcattgtgatatgtccagatgaaatttatttcagtgctaattgccgaaagcttcttttccttttcccaatcatttttttgggaacctgtcgttccattttatagaatggaagagacaaaaatgatttgctgaaagtttttcagaatggagtctctttgtcattaaagaggcatcagtgaataacaaaattgcagttttgaattcagacttagcgattcgtggaagattgtgttctaaaatcacataggaaatttgttaactgatattttctaattttctagcctaatttgtacttttttacttaatatatacgtatatattgttgacttgtttaggctcgtgtcgttttgctccaaagctatttctacatggataaattttattgtattcttcaagttcaaataagctagaggcatgatcctaactgggcttgagttttagtaaggtctgtatttagatgtttctgcaatcttatgcatacttcccttgtctaatctctagtaaagaacaagttcttgtctgcttgacacattgtgttctgattcttaggggttacaactattgctgggggaaaatcaggcagaggagggcatgttgacggaccaagtgacgaggcaaaattttctaccgattttgaagtccgctacgttggcagtagctgctcccttctggtgattgacagaggaaaccaagcaattcgggagattcagctccactttgatgactgtgtgtaccagtatgaagctggttttcctctaggtatgttatatattgctccatttcctgcaatcattgctggacctgaaaaacctatggttaaagcttaccacctaaacatgccgtttaaactctatgatatatctgatcatagtaatttctctgtctgcaggagtcgcactgctgcttgctgccgctttctttggctacatgcttgcactgcttcaacgacgagttttagggatgtattcaaatggagatgtaagtatcaagtgccttacactgtctttattttgtgagggaaaaaaaatatgtaccttccttggcagattgacagggttagcaaatatggctaggactacagtggtccgcaagcctgctgtaatgcagcaggccagcacatgaattttgttgttatcagtgttttgtctctccttgtattggtgtctatcatccattggcctcggtctgggtcctccccacccccaaatgcctcaagccagccaagaattgctacgagctttatgtgcaaaacaattttctgcttaatccgagttagaatagagtactaaaacaacttatcttcttgttagctatattgtgcattttgaaagtcatgcacacatctagttgtttgtttatgatggaaggttcgtcgagcattatccaaaaaagaaaacacagggaaccacacaattgttcagttttagtttacccttatttggattgcccagttcaaaattcagtagtggttgagacttgccatcctacttgttttcttcttgcagtatattgttctgagtgcaaattttacaatgcaggagcaggaacatgagagtccagtaaaagctaaattatctagcattccacctccataccagaagccactgaagccttctcttcgccccccgctaattccaactgatgatgaacctgtgaaacaagaggaggaagaagggctcttcacgtcaatcggcaaacttgtgggtggagcaaaatcatcaattgcagagataatcggcgccgcattctccagaaagaagcgagtaaacattcatcaccatcaactgggtaggccaacctcctggccagtacaagaaagctatgccatcccgcgggacgagaccccaccaccactggacacaagagccccgacccctcgtaagaactacgccttcatgtccaaggagccagagaagatccaccacatacggcacggccggcctcagttacatggctggaccggagaagcagcacctcagcagcagcagcagcagcagccaccgtcgcagccgcaacaggtgcatcaccagcagtacctgcagcaccacaggcagtactcggcggggccgcagaccttctacgagccgagctgcgatgcgaccaaggagatcgtcttcggagccgtgcaggagggggacaccagccgccgtcccgtggagatcaaggccgtgaaccatggggacgcggcgtcgtacgagcagaacgggctgcgattccgcagcagttacagcatgggctacaatggcaacaactagtcgaggaagatttgcctccgtcctagtagtgttttggcgtcctccgttgtactagtagctgtaaggaaaagagaggagcgatagagataactcgaggagagtatcaatcccctcattgacaagtgcaacggaaaagctggagttttggtaggagagagcttggtgataatggttattggactctttactggctgtgacatatatatatgtatgtatgtagtaagtgaaatgcggttattgatctcagtcgacgtgaattccttggactctttactggcggtgactacagctgctgggtgctggccctgtagtaggacatgtgcgatgtttcggctcacgtgtggtgtggctgtggcaggctggacgggctggctggtgtggtggacgaaggctagagtagcagcgtgatagtgttttgacaatttttttactcccgccagtcacgtgggtcatatatgatgtgtggccatgatttcgccttttgaatgcgccgccggacaccggtagtgcggtagtgcctgaggcggtgacccactggacgagtgaaccgtaaaaaatccgaaaagattcaattctatctctatccttattcgaatgatttaattaactgaagttacagagaatagtatccatatttatcatatgaagtgcagtaaaattgtatgtttttgtagactagacgaatcagtagtgctctactactctccatttccgtgggt

SEQ ID NO: 4518 - DNA, 6953 bp, Sorghum bicolor
agatggctataatctatgttcaatgtttgaaacaattgttgaattgttaaataaacaaatgatacacgaacagttattgaaccgttggatgtttgaacggatataaacattcatcgtagcaatgagattgattgaatgaactttcagtaattgatttggaagtatgttctcatagagtcatgtgcatgtatttgaatatttttgtacatgaagttttcttaaataaggaaaaaaaagaattttcatgttctcataaaagaattttatttggtgacacagatattggtaatatttttttacagatctagtcaaatttagtaaagtttgaccgcacgcaccctatagtgacatttacatggacagagagagtatttctagaactaatagagagagtatttctagagctaacgagtgggctccatgtgtcaatgaggtgacagagagaggaggtaggggcaattttgtccatataaaaagaaaaaaaaaagtctacatgactctttttcctcctccaactatttagagtggattacttcaacaccaccccaagaaaactatgaaaactggattttctactccagaattttctaaaaccagtcaaataaacccctaaggaggatggttttgctacagtgattgtctttttcttatttatctatttatgctgaatccttaaaaaattatagtaaatcatagaaaaaacataaaaaggaaaatctaattttgttggactccacatgagtagatatacacaatgaacatatgatatggtatgctttagtataaagttttttctataactttggatttatgtttttctctaattaaatagaataattcatagctgcaacttttatgatccaattataatgattttttatgatgaactaattattgtatgcttaacctatagtaaaaatttatattctcacttgatcatgtataaattgagttttcgttttcagctcatttgtagattccgtcttgttcgtttggttaaaagatgacagaaaatactattcactgatttattatgagaaaaaaatactgttaaatgtctaatagattcggccgataagcttaaacaaacaggctaagcttaactagcaccgtcttgtcttcgttaaaaaaagttagcatgttttcccatcagatgcctgcatataatttcgaagcttcgtccggacagcatgatgtattcctatctaacccgtataatttcactgctggcagccattaaaaagtgcacccaaaaaaggagtggaacaagaaaaggcactcaattagggcctaaaaggcactaaaaccggcaaaacgtacaacgacgtatcaagcccgttacgacaagcaagtagtaagagctagcggctccacgcgtcccgttccgttcgatagccccacgcaagcttccactccccctggccggcgcgccacctcccgcagtcccgcggctacaagaacggaacctgcgtgcttcgcttcacttgactcgacagtcgactccacttcgcccaggggagaaaaaaaagagagagagagagaaaaggcagggtggtttggaatccagaaccgtagggcgagcggcacggcagcggagaggaacccacggcaaacggcatccctatcttcctctctcttcgccagagacctctccgcccctttggcctttgcttgccgacttgtcgtggcgctctcgtacgcgtccagcgaggggagttaccgcccggtttcgcttcgtacgggcggttgatactttgatagcgagttaaagaggcgcggcgggcgtgggggcgagagcgagcgagcgagcttgcgcgaggtggttctttgcgggaagctactagaaggagggggtgggacggggaggagtgcggagtgtgccttgctttgcctcgcttgtcctggttggttggcctcccgctcgctacaggccaagcccgacggacaaatcttggttcttggacgcgccgccgcggttggattcggtgcccccccgattccttgtttccttccgacgattcttcctcgaggttcgctgccatggagccagcaggcgtggcgtgacgcattgaggttgagggcgcgcgtgcggggctggggagtgacatggatctggaggccgcgggcggcggggaggcggcgcaacgcaaggtgagtccgtcgtgagtttgtggtttgggtccttggatttggagcggtttcctctgttgggggctgctggggcttgctcctccattttcctgactgtactgcttgctgcgtctcctgcagcggcggaatggggagtcatggcgcgcgacgctgctgctcgcgtaccagagcctcggggtggtgtacggcgacgtggccacgtcgccgctctacgtctacaagagcgccttcgccggcaatgacatccagcactcggagggcaacgaggagatctacggcgtgctctcattcgtgttctggacgctgaccctcatcaccctcgtcaagtacgtgctcatcgtgctccgtgccgacgtcggcggggagggcggcaccttcgcgctctactccctcatctgccgtcacgtccgcgccggcctcctgcccggcggcggcaccagagacgagctcatggaggaagacaaggtcaccgggcgtcgtggcgagcggcccgtgtccagggtcagggcggtgctggagaagtacagagtgctgcagcggctgttgctgctcttcgcactgctcgggacatgtatggtcatcggggacggcgtgctcacccctgcagtctcaggtttgccgtcttggtgttggatggttgctcctcatcgcattatatttgtttctgatgcgactgatgttgctccatttgcagtgttttctgcggtatctgggcttgagttgtcgttggaaaaggaacagcacaaatgtaggttaaatcctttctgtgattgcttgcgtttattgctatactgcacatgttagaatacacataggccaatgtttcattagttcaattgtgttagttttagtcacctttatgtattatgttcgattataccatgcttatgagatgtttactgcaacttgtttatgtgcagatatagaacttccagtggcttgtgccatacttatatgcttgtttgcactgcaacactacggcacacacaaagttgggtttctttttgcaccaatcgtatgcatttggcttctctgcataagtgcaataggcctctacaatatcatccactgggaccaccatgtttatcgagccctctcgccatactacatgtatcaattcctccggaagactcaaactggtggctggatgtcactgggtggaatccttctttgtgtgacaggtacagataaactaggctgctgttgcttaatatttgactgcggcaatacctgaattctagtgacagaagtctgacactcttttttttcctattattggtaaaacttttaggctctgaagctatgtatgcagatcttggacatttttcacaatcatcaatccaggtatagacgagtttgttacaacttacaacggcaagtactgttatgtgttatatttacagaattttactgatccccaatgttcacctttttcttgttaataaaatcatatctactttacctcaggttcttaatctttgtacagtaaaattaacaagagacattacaactcctattttcatggtatttgcatatctccgtcacagtttagacttctacaaatgtagaaaatttgtaacacgctaatagtctttagtataatttttctaattatccttaacatttaaactacttttttattcacatagtttttttcccttaggaattttgtgctgagtcggttccttccctgaaagcatctgcctcttgactgaaatcttttaatttactgattcctttgaaaggtcaaccaagtatctgtactcgatgtgtgtttgtatctgtacttgatgcgtgtttaagttttgtcatcatttctgtagttctttatattcatactcagtatcctagagatatcgacattatcctggtttccgaaatttccattgtcctactcaccacacttgaaaaaggaaaatgtaaatattgaactgtcttgagattcttaacgattttttaaaaatcctgacagattgcattcatatccttggtttatcctgcacttgtattggcttatatgggacaagcagcttttatttcacaacatcacaacattgagagcagttatcatattggcttttatgtgtcagtaccaggtaatttctttaacttcccttgtctttttttctttaaaaatgttattattaaagtagtaatttgtttttacagaattccatttaaaaaatacctgcatgttttgaattactgacgtatgcaactttgtttgtagaaacactcagatggcctgttctggtgattgcgatactagcagctgtagttgggagtcaggcaattattactggaaccttttcaatcatcaagcagtgctcttcattaagttgtttccctggagtgaagattgtgcacacatcctcgacagtgcatggtcagatatacataccagaaatcaattggatgctgatgatactctgcctggctgttactattggcttcagagacacaaagcacttggcaaatgcacaaggtaaaaaaaaaactcagattcatatagtcctgaatacattgaaattgaagtgaacctcatatatatttgttatggtttcacccaattttcttgatacagggttggcagtaataactgtcatgcttgttaccacttgcttaatgtcactcgttattgtgctttgctggaacaagagtatcttccttgcccttggtttcctgcttttctttggcacgatcgaagtaatctacttctcagctgcccttgtcaagtttcacgaaggtgcttgggttcctattactctctccttcatatttatggtggtcacgtgtgtctggcactatggcacaataaagaagtacgagttcgatgtgcaaaacaaggtttcagtaaactggctcttaaaccttggtccttcactgggcattgttcgtgttcgaggcattgggctaatacatacagaactaatgtctggaattccagctatcttctcccacttcgtcaccaatctgcctgcgtttcaccaggtaatttatcacttcatagttcataaacatatcaagcaacagtttttctgaatgcacaaagccctgagatctgaataagcagcattagtgcatgagtcagttcatggatgtaacttgtagggttctcacaattgtttttcatcaggtactggtattcctctgtgtcaaatcagttcctgtgccgcatgtggaacctgaggaacgatttctggtgggtcgcattggtccaaaagagtataggttatacagggtcattgtcagatatggttatcgcgatgtgcagaaggatgatctagagttcgagaaggagctagtcagcaacattgcagagttcatccgcagcagtggggagtatgacaagaatggcttcgtcgaggacacagataagccctccgagaagctgtccaccatcagtactggaattaatatgtgggaagaggatggagaacttgatgcatctggaacccctcataaggagatagacccacacaatgcagtacccaagcaaaagaaagcaaggttcatgataccgaagagtgctcaggtggacagtgaggtgcgccgtgagctgcaggagctcatggacgctagggaggcaggcatgtccttcatcctggggcactcgtacatgaaggcaaagagcgggtcaagtttcataaagcgaattgtgataaacttcttctacgagttcttgaggaagaacagccgtggccctgcatacgctgcgaacataccacatgcctccactctggaggtaggaatggtctaccaggtctgataacagttagcagctgtgtaaaggtagagatgagacgaagcctcttggccccacctgtatatatccacttgttgctgccgataccgttaacacaattacacgataacacgagtagagacccttgagcacagcattggctgagaaagcagctgaagatcatctgtggagagcccaaccagaagtatgcttttttgtttgtagagccttttgttgtgcgggtagttgtttagtttcgtgatatgttttctgctgttgttgactcgctgagtctcagtacttgtgagctgtaattgtctgtaagagtactggcaaaatagcttttttggcgtttagcgacctctgtagttgtcacttgtctgtagttgaagactgtataggtagcaactaaacattcataggggtttgtgtcgttgggtccacctgtattatagactgggccgtaaagcagctcttccttttgggcttttggcccaagaacgtctaaaaattaccagacaaacgaaaattctcttgtaccttttgattatcgtggttatatttttctcgagcttcataactagacatcttatattctttaagtctcaaaatcattagattatctccttgtacagatttttaatcttttgtatttaaaaaaatttggtaaatactcgataaggtcttttaaaaccatgaaaatgtctcttaagatttcaaatatttcaagaataatactagagaaatttgtgatatgacaagctcaataaagtatttagaaaccatgaaagtatctctaaagacttaggggctgtttggattgttccatcgcctggggattggggaacctcgcccaggcatgtcgatctagcccctggcgctggaaatcaacagcttgagagagctcaggcatcttcttcacctgatccaaacaagcccttaactacaagaatacaacatatatttatgatgactgcattcatgttggttgcgtctcatatttctttttgcataaacaatttcaaaacatgtttagacatcaattagaatgttttaa

SEQ ID NO: 4519 - DNA, 3535 bp, Sorghum bicolor
tcccactggagctaacgacttccattaacaaagttagtggtaggagacgatctggacatcaacttttcatgggtgttctttctatgtttcatgatgtaaacctttgaacaatgttggaattggtgtgatgtttggatacctacaggaaaacaatttcatgcaattgggattgcggcagtatgttgggctatctggaaaccccgaaatagaacatgttttgagggaaaactcctatcaaacccagtctttattatttgtcatgcttgtgctttaatgaaatactgggcaggtcttttcaaggaagtagacaaggaagccttatagaatggagtaaacacgatgctcaagatcgctacctctcttcttgctaagaggaacagagagggagagttgctggtgaaagacaatgacgacaacagccaagaagagtagaagatctcctgtcaagtgcccgaagaaagcgcccagttgtgatgcgatttgggtttatcttgctttagtgttttgtaatctgatctgttttctaacatgtcacagtcagatcaatggagagataggtctcaatagttttatctctatgttagcttttgtagtcgtaaggtttctctgggttctgtccactctgtctttctatattgcttcctaaagactttgtatttccgttagtgataataaaaatggggtttacctcagtttaaaaaaaatgatgtaaaccttctagccactgcgtcttattttgtttcaaattaataaaattacagtagggccggggggaaacccctcctgattcccttaaaaatacaggactgcaacgtcatattgctttcagtattttccttcaaaagaattagttccattattaattacagagagtagagtgagagagtggatgagaagaatgagaggagagccaattatgggcagggcccccaccgtgtcaaataacgaatgtattgatagagttcgtagtatacttttttagtataaggccttcaataatggtgagaacaacctccggttgactctgcgttctagaagacggctacatactgatgcgattgctctacatctcatcatacttcacatataatgtatcgttcacatattatttctttgttctaaattataagttattttaatttatctaggtatataaatttttttatgtatcacatatatacattatatatatacatagcatgtatctataaaatctagagcgacctataactttgaatgaagtgactatgtcgcagcgaatccttatatcttttaggttttatttggatgttctcgaattcacctcaataatccacacgtgctgagatgagatggattgtgatgaaattttgtttgaattttactctaagctatctcaacatatgtagattgatatgaaaccgactatatccaaacaaggtcttaggatgatttgatatgaaacatatatttcatcatgaccgagggagtatatggttttcaattctcagcgaaaaatagcaaagcttctgctaaattttggaagcactgaccattgctcggccttgcgggtcctgccttgtgccacgcccatttcacacgtatatttcatcatgagtcattacttcttcttgcagcccagcccagcccaacccaacccggtggacaccccgcgcgcccacctgccagcggaaccagctcgctcttgcgctggtttcccgaaacaactgcagaacgaactcaaaaaaggcgaaacgtcgtttaaaatttgatcaattttaggcaacgtttgcatgcaaaacatgccattaataggtatataagatacgcgtaggaggctgctgttgcgctccgccttcgccgctgcctcctcttgtttgtggttttggccaatccttcccctccctctcatcccgggccccgggtgaaaattttgccccacaaactctagcgcgtcggatcacaagcaagggcaaaattttctgtgactccggctgaaggaccctgcgacacccaaaactatgtcggtgagtgcaaatctccagcgccttattacagtcgatcacatcgttgctgtctttttttcttccttttataatgcctgcattatattcgtctatcttggcttgaaatcaaagactgttctgatgcatcacgcatgatgaaaacacatgcttgtcgcattggattggcatgaaattttgtcttagcgatttggcacctagatgcagggatgaatatctagctatcaattacgatgatatggatccatatccatcagtttggcaaaatgggaaactgatagctattgacaacgcctgttcatttataggccaatcgatcaataaacatgaatgaaatcaaattggaaagcatttgatgatcaacaaactgtggttcctgatccttcacttttaaattgttgagcgatcgatcccactgacaaatcatgcgtacggatcagatgtgaaacggatgttcacatcgaggtcaggatgtggtcatctggtatctggttttctacaaatctagccttgaacagtaatggttcccccggggcaaggcatgcaatgatgaatgaatttaacgctctaatcaggaggaaaaggaagtaacattatattatgcattcacattaatgattaatgcctaatagcatatagctgttgttgtgctgatcaggtggcgaaggacgacactggccgcactatacccaagttcggcgaatgggacgtcaacaacccggcctctgccgacgggttcacggttatcttcagcaaagccagggatgagaagaaagccccgacgaccaaaccacaaccaggccacatcacccaaaggtcggcgtcggctgacagcaaggactccaggaccgacaagatgacctcctacaactccaggaccaacgcatcggtacgcgtccgtccgtccatctcgtagatttatttggctaactagtcaccgatattcataatcatgcatgcgttgtgattgatctctccaacttgcagaagaaatggttctgctgtgtctcgcccagtcctacacaatcttgaggaagcaaaagaggaacgcaatgctgcagtctggtgctattctgtgatggttatgtgtagctctgtcgctggcagactggccatgagtgacctcttcgaactcgatcctactacttgccagtgacaggggcactatgtatagccgttgcaaaatgagaaaattactctgatgggtgtctgcttatagctccttagctctgtataccatcagttcaagttgatgtctgcttgtaagtttctttttctcgccccttctctatgtggtgtaacccttcctcaacgttatcagtgaatccgagttactccccaataatcctcctgctgcattttgctgtaacttcgccgaggataaattttgtttcggctctgaccaaaccaggtcaacgaattcttagattgcagtgactgaacaaagttatgcgccaccaacctgacaaacaaaatgcggcaacgttttctgatctgtagaggaacatgttacagctgtttaagttctcttg

SEQ ID NO: 4520 - DNA, 5600 bp, Sorghum bicolor
gctcttgtcttcaagtagtttttttttaagttccattgccggcttgtatatttatatataggtgcattctcgttgagagtagcaaaagtttaactaaatatataaaaaaatattaatatttatgatgtcaaataaatgtatgtatgtccaacaggccaggtcgtgcctctatggactttgtgtctagctttcggcccaaggtacgacccgtaggtcgattttcgtgtcgtgccagcccgcacacccatcaataaaccaacacaacaacttattttcacaagtgttgaaacatttcatcactttcatcagtatagcaattaacaacacatatatacaagtcataactgcatcaatattttatttttaccgagccgttatcggccaacgttggaacgggccgggccaccgggcggcacgggctgcacggccatatataaataaatgtactatgaaaatatgttttataataaattcaatggtacatagtacgataaatattaatgtttttttgagaggagcatcagattttattttttttctcttttgaagaatcgtcgccatttaatttaggctttgtttagttccaatttttttttgaaataagtactgtagcacttcatttgtatgtgacaaatattgtccaatcatagactaactaggttgaaaagattcgtctagcaaattacaggtaaattgtgtaattagtttttattttcgtctatatttaatatttcatatatgtgtctaaagattatacaaaatcttgattttttttggattttgatgatgaactaaacaaggccttaagaggagcatcatatcagatacacggagtatgtgggtactttgtattgtccgagcatttggccataggttctactcaaaatggcaatgggtatccgaaacccgagtacccgacgggttttacccgataaagacgcgggtatggaatggattttgtacccgcagatacgttgtcgggcgaaatcctttacccaacgggtatggcgggtacgggcgtggaatagtagtacccatacccgcgtacccgtgggtaagaaatacccgcaaaatgaataagcaacctaagcaatttagcccatatagcccatgaactgattgactgaacgtgggaagtgttgagcggctggtgtgctactagtgctgctattaatttgctggaagttgttatgtttaatttcctataagttgtgatatttaacttgctgaaagttgttatatttcttttgaactcgggtatattttcgggtatggaatacccgtcgggtgcgggtacggaatgaatttcttatcgcgggtaacccgatggaataggttttgatctggcgggtgcggatatgggtggcaagtacatcgggtacgtacccgttgccattcctaggccctacgacaaccttttggacaggtacggcccaaaacaaaacctaaccttggtttgtttagttcgcaaaaaatttcaagattccctgtcaaatcgaatctttggtcgcatgcatgaagcattaaatatagacgaaaataaaaactaattgcacggtttacctgtaatttgtgagataaatcttttgagcctagttactctatgattggataatatttgtcaaataaaaacgaaagtgctacagtagccaaaacctaaaaattttgcaaactaaacaaggcctgagcccaaaccattagtaaggcccaaaaacgcaacagcccaccgcacaaggccttctaacccagacagcaagaccccagtgcgccagccgcatcttccttctccgagcgcgcctgcttcgagcgagggtttttgagcgagctgagcacgcggcgcgaaggccgagggggttgtggccaacggccttctctctcagtcagcccatctgcctcttgctcacctcccccaccttcccatttcttcccctttttgactcacccccccttctccatccctcggcctacaaatgcggcgcaaccgcaggcgcagcagcagcagtcgggtacagtaggatacctcggtcgcatcgcgcacagtagacactcaaatccgattgccgagggtgcgaggagggttgcaacggctagttgcggcggcttgatggaccagtcgtaccatggcggcgccgccgccgccgccgccggtggaagcgatggccaaatgtgggtgagagggactcgggtcgtgtgtgttcgtcattccgtatctttcagggcttgtctcgtcttgcgtttgttgctgatccgtgttttgcggggacttggtgggggattggggtgtttggttttgggtcgggccgatgcgccgctgtcggatgatacgaggcctcgagcaggcttgccggccggccgattttggcggctgttggtcgcccatgtcgccgatctaacagtggagccttttttttttaaaaaaaacacaacagtagagaaatcctaacgcggcggcgatctgacctggtacttgttctacgttgaattgaatttgatccgcttattgggatttgctcttgcaatagtgcgcactctggaatgggcgcgtgcgtactgttcgctataatgcttgatcgctgataattaagttgttgggtcgtttgtaaatagctgctggcctttgattctctgtttcagtggccaatcgaccttacatgtcaaactaaaatcctatagcttcatgacctgtcttaagcttgcctgaatgcctggttcaacatgtacatttgctcagttgagagtgaggctgaggatatgggctcacaggggctggaacaggtgtgtgtaatgctgttcgttgcaatgcctgatttgtggcaattagtttgatgcatcacttatgggcgtctgattgttccttttagtagctaatcatccttacatggcaaactaaaatctcttcaaaatccacatacaccctacggccctaccagagaagcttcttggcttgtcttcagtttgcttgatttaacttatgccctctcaactcttcccctgtaccgaatgaatctaaattaaactgctattccagtgcactacctcggtggcaatctattatacttgtacctgatcttgtgatgcttttggcagtctctgggattggcaaacaggagagcactgcgaacctagcgatggaagtcatggtactttcagtcacatccataacctatgtcacaaattaactctagagtatcttcttggacttgctatcccattatgtctcaccctttttttacagcagatgctactaaattcttgtgggattgcctcaatcaagatgacaatgagctgctgggattgcttggaaatcgaaccccactgagagactgctgtgatttcttcgccgaccttggtggtatgaagccttttttttctgacaatcatcattgctgacactcttgaatgcatcgcttaagtgtctgttacttgagtagacatcacctgcaaggagaccctggacctggaggaatctcgggagtcaaagcggcggcgcatattggagtacccttcagagtctagtcagtcagaagttgcaagtcatgaaactggttctccttttgtcacatctgaggtttttcacttgctcctagtccttgctatgtttcaaatccctctcttttgctattctttgcatatcacagttacgcttgtttgttgatccatttttcaggtagcagaggtttcattgctctgcactgatgaaccagagagcttaaattgtgatatgcagtacacttcaaataatttaggttcgtattttcattatatatgcttaaatagtgtttctgtttgctaattaaaatttgacatcagatacgaattcaaatgaagcaccctatgagcaagaagataaccattttgaacattgctcttatggaaccccagtgtacatcgagcctgatcaagtgttagttcctctcttgttgcactttgaccactttactggggcctatgtttatttgtcaatcgtgattcatatcctatttgctgtaggccttgtagctgggagagcattgcaaatattgatgatcaagctggtatttcaggtcagtgggaagcatttttttctgtactatttgataatcaattttctatttagtttttcaagtcagcttccaacatatgtgcgagtttccagttccattatattcctaaacttatctgaaagagcagtttcccattttcctcttccacaattgtgtattggcagttgctgcaatactattatgaccagtagccacaccgttgagtgccttcctggcaccatgcttttgtgtttgtggtcagcaacttacctattatttatatgcccacaggaacaagcgagattgcaccgttgacagaaagtttcataatgcaggaaactaggaagctttctacactcaaagtctctaaaggtatttcagtttgacagtatattatttcttgaaatgcaaacctctagttttatcggtgttgtcatttggcttcttctggcttgataggtgcttcaacagttaaggtgaagcaaaacttaactacatcagtagcatacccttttactctcatcaaaccatcttgggaggaaggtgatgttactcttcaggatataaacaagcgaatccatgctcccccaaagaaggccccggagatcctgggaacttcagctttctctggcaagccagtgatcggcaagacaagaatcagaacagaaggggggagaggcagcatcacaattctaaggacaaagggctgaccggttctctggaagcctgagaatgcttttgatcccttatttatctgctactctccatttatcagaagtgaggggtgcagctccttggtagtcaattgtgcaggcctgagaacctgagggtgccattgatccacagctccttggtggtcaattgtgcaggcctgagaacctgtgggtgccattgatccacagttgaaggaacagagaggcctgagaaactatgattgccattgattctttgtaactttccaattattacttttattccttccagttttggtgttgaatcactgtagatgcaaactctttcttcaaaggttcagcattcttccggtgtatttatgacatgtggctaaatgataatatatacaaaaaaaaaaattaaaggagttagtgcattaaattccatttacttttctgtggttcaggcctgtgtcctggatagctggtatgcatcctgacaggcattctgtactgtggggtgttgcttgtatattaactgtggatatcacaaagtaggagtatgatgaatcttgatccataggaggatgtccaactagtggctaaccgtacatctagaattctgttaaaatttgggaacacttgtttaatgtttgggagcgggaggagaggcgaatatacctagccacgcccaacatctgaatttgagcatatactatctgggcatgacaacgccaccaccaccagcgaccccttcgttcggacttcgatccaaaagcacataaccttctcggctgtcggtctgttgtgttctcttggcatgacaacgccagcgcccagcggcgacacctaccatgggcgagccaagtgctgcatagggtggcgtgggccagcggcatcggcatag

SEQ ID NO: 4521 - DNA, 4274 bp, Sorghum bicolor
agtatggagtctctctggcggcatggatttcactttggtacagtctttaataagtatggagtctctctggcggcatggatttcactttgatgctgtcttgtaaccacatttgtacttcgtagaccatgccactgcatccccttgtatgatgtatctttacgactttacctaaagctccaactttcttcttgctgtttatcttactccatgtatcatgaagatactttaaatgattttattcaccatctttcagagcataattctttaatctttactacaaagtaacaatgtggttgtgggcaactgctagttcagaaatctggaattgtttaggctgcccttataatcttattcatttggcaggaaattgtgaaacaaaacatgctggcttcttaccactgtagtcaactggttttgactctttcagattatgaaatatgtgtggtctatgcttgtttagaatttcttattagcaatatttgaccctggcaacaatttttcaagaggctgtgatctgaaattcggaccactgctttattatcccagggactgctgctttgttttcacactgatatgtatcaacttctattaccttacagcttgtttagttcctaaaaattttcaagattccccattacatcgaatcttgcggcacatgaaggtgcattaaatatacaagaaaacaaaaactaattgcacagttcatctgtaaatcgtgagacgaatcttttaagcctagttactctatgattggacaatatttgtcaaataaaaatgaaagtgctacagtgtcgaaatcaaaaaaaatacaaactgaacaaggccttaaatgattggccactgttatcaacatttgtgaactggttttgtgcgataaacagttgtaaaataaagtaatttctgcggttgtaaattgtaactgtcaatgcttccttgctgcctttggctttcctttttttttttttgacaacatgctgcctttggctttggcggattattgcaatgactgaggctccctggtatgtgcagatgtgattaggttattgcctgaggctctctggtatctgctgatgtgatcagggtattgccgtttgcggtcttgagctttgaataaccttttattttctgattctgaagaccgggacgacgggactgaaacttggcttcgctgatatttttcagtagctataatatttttcagtagtcgttttgtctatcgaatattatcagttgctgttgcttgttacaatagttgttacatgacccaacactgccagggtgacagggtcacaacacactgcgctttctttttggcttcggaggagctgcaattcgattaggccctgtttggtaatcagggaatgataacctggaaaaaatccagttggaacagataatttgtataagcaggtaaacctggaatggttccaggttaccttaggctttgttcgtttgaagccaggaacagtctggtccgtctggaaccgacccggaacggttcgataattcgtactgacctggaactaatcctaacctggaatgacgcctaaccgaacagcgccttagtcagtttgcatttgtggttgctgatgattatagggcacaaaaatctggtcgtgttttgactattttgacttgtttagcactactttagtagtaccttttagcggacgaataattttttttcttttacaacaaatcagcatcagctaccgaaagtgctaaagtgttacacagttattgtgttaggttgatggcaacacggcagctatctggaactgaactgagctatcgaagtcaaactgaaaatctgaaatcaccatcaaccagccaagagaggcgattcgggaaaataaattaaaatagaagtcgagggtctgcctagatgggcctaattcagtacacatgggttgggcatgtatgttcgcggggaggcccaaaaccttaggtagccctaattcgcgccgctatataaggggtcgagtctggcggcagcggttagggtttatcttccgccgcaacctccctcgagcccgagcaaaggagaaaagcggacgcggcgccggcggcggagcggagatggcggagaggaagcgcggcgccggcacccgcaaggatgaggtggtaacccgcgagtacaccatcaacctccacaagcgcctccacggatggtattgcccccaaccgtctcttccattctctagctttcaggtatctgcaaagtagatccggtagatccacttgttggagagcatagcgtagttctatagctgctctaggcttgtatgtgagatgctggtgcggagggttgcggcctgtgagcactatgtgggcttgcgaatggttgatacacctgattggaacaagtatcctttaccagctagagtacagtcgggatcacctgaccgagcgggaatagcttctagttcatcttgctcttgtatctgatcccacattcatctcgcgtttgacttcttgatttgctgtgtgagttgtggcaagtcattttgttttgtgggtgccgttccattaggtgttactcgggtatagtcaggtgtctgccttatttctttggctgaacacagttacatgcccgggagatgtaatctgctcatcgttacacgtattgcttgttgttatgctactatgtgttccatttgggcagtatatttttcctcgcataataggtattccatttgtagtttcattgggctctagtatttattccaagatgtatgatacagtaatatgttttgcattgtccggtcatagtcaggtatctgtcttatacaatggttgatacagttacatgactggtacatagatgtcactcatcgttactcatgttgccttcctttgctatcatgtgttacatctgagtgctacatccatttataagtgctctatactgctctttatatttttgcccactatattttagaaatagtgaaagaccatgtgacccgataatatggctgcaatgtattgtccggacatagtcaggtatctgtcgaatgcaatgctgtggttgatacagttacatgtccggtagaaagatgtcattcatcgttacacatgttgccttgacatgctgtcatgtgttccatttgggtgctacatggatattggagaagtacaaatcttaatgttccattttattatttgttgaatctctttcagtcttttgaacactcaattttatcatatgctgtattgcaaatcaggcttaaattgatctgtcagtttaatgatcactaatcaatctacaattgtatacagcaccttcaagaagaaggccccaaatgccatcaaggagatcaggaagtttgctcagaaggccatgggtactacagatgtcaggattgatgtgaagctcaacaagcacatctggagcagtggtatccgtagtgtgccgaggcgagtccgtgtcagaattgcccgcaagaggaacgacgaggaagatgctaaggaggaactctactccctggtcacagttgctgagatccctccggagggtctcaaaggtttgggaactaaggttgttgaggatgaggattaagtcctcgatggttcaattgtctagcacttaatggataccatgagagcaaatttaagaatgctgcttcagattattgttatctactgccgatgacttatgtaatagaagattcgagactttgctcctttcaagtgcttgaaattttgactactttgctatgtctggtatctaccccgtacattgcattctaaatataccctgcctttctgtctgtcaatctctgcttgtacatggccatctgtgatttgaattcttggtgcacgaaagttagtttggctgcctgtttgtgcaatctgtgtttatgccattcttcctaaatcacctgtttgtcggaagcgtcactacttgttacaagcaaatagtaatgccataacaggtgtctcatgctatggccaagcattcctgtttgctggtctctaaagtcgtggcttaaaattatgttggttgatttattatgagaaaaacattattggtcggtagaaaaaaaacactattggttgacgtgaacggagaaataagaacatgttatgttctgatgattaattgccagacatgaacattgatctgatgatccacggccagacgaattaacatctgatctgatcctcgcaaaaacataataggaagacaaaaaaacatgaacatatatttgtccttgtataaagaattaatacagctgtaaggaagcttttaaattgtcaaaaaaaaaccgcca

SEQ ID NO: 4522 - DNA, 17174 bp, Sorghum bicolor
catacttcatttgttagcgtagagacatagtagatgaatagtattaaatatagcccatcagtttctttagttgttctgcatcatccatcttgaatatcactaaggcactggtcagtatatttgatctttggaactattgccttttagactgccaatggaaggcacaagcagggaggatttgtgtctagattcatagcttaaagtgtcgtctattttaagatggatcggagggagtgattctattgtctggtagcatgcactttttattaaaaacctgtgttgaaaactatagatatgcagaggttcattagaagtggatggtgcacttgaggtaggaaacacgacagccatcccacctcaatgaagagttgatgtgcgtaagtgcgttcattaatttatttttctatatttaattatttattcatactattttataggcatgcggtagacaatggataacaatttaagcatcataatttatctctttgactttgattatgagtttatttcaattaatatattatcttgttgttttaccgttggcacaggtacgctactattgaactaaataatagtcctcatctcattgagttactaaatgtagatactaatggaacaatatttcaaagcatcaaaggcatactaaactagatcataattcaatacttggggcgtataattgaagacatgttatattatctaaaatatgaagaaggttagcttggtataccagccttgtactcttgtacgaagcaattactgataattcaaagagatgtttagttctaaaaggttgaggaaataattaatcttgttatggtgatatgaacttttgtgtgtgtagccatgtgcaaaattcaatttataatattgatatttcgaacatcaggctcgctttatcattttttgtatcaatacaatgtgttcatgctcaagttatcggagaattatttgtgtttgttgcaatgcacggaaatgactatacaatagagttggtgagcttgcgacgacactctttgtgatagtgttaattttatgattttgctttttagattaaatgttactttagcattggtatttaattatataatattgttattttattgtgtgatacgtatttttttaagtacaaaaatttagttgtcccgtagcaatgcacgggcatcctacctagtatactataaaaggatacgcttggatgagaaaaaaattgaaaagaaaattatagaattagtaaaaccgagggaagaaaactatggttatggtttggattgaaggaaccaacggttcatagcgatgctcttttttatagaaagtcgaaaatccattccaatctttttggtttgatggtttctctttctattatgtataagtctgtcataaaaacacatgatgaagagagaaaatgagctaacacaaaggagattttctttatcatttctagttttaaaattcttattatgttaaattttttattatgttctaaatatctttgtctgttcatgtgtttttcaatcctcctttcgtattgtattccatttctcggttctagtcctaattaggtttttaaaccacacctagaacgatggccctgggcctaaatgtaccactgatactgtatcagaagtatattagtttatatggacagggcaagtaaattaataaaaataatcagaaaatcttggttagcgaccgacagggtcttaagccgcctaaacccctcccaaaaccctagcaggttagcaaaccaaatcccgtgccgaacccaagctccctccgagactacccaaactgcccctacgaacccagctcaccaaacgcagaaatatcacctccgtgcgtgcgcagcgacggagaaaaagaggaaaaagaaccaaatcagcaacgcgagcgcctcacccagactcccagaggccgcaccgcacgagagtagagattaggagggtttgccatccgtataaaaggagcggccggcgagggctgccgcgcctccctcctccgctttaccaaaacagcccctctcgcccaatcattccctctgtgcctcgtcctcgcgccgcctctcatcctccggaagccgaagcttccgcgccggcggcggcggcggtaggtcactctcactccccaaccaaatcccttttctgtacatactaattcgatcgaatccatatcgctcgggtgccccgctgaggtggaggggtctcgattggtgagagggtttagggttttgatcccacagcagatcgtgcgctcggctgctagtttgttccgttgtggtttcatagaacgggtgatgtttctcagcggctttagatagccgtggtgtgtgctgtcctgtgaattttgtattttttttgtttggcctaattagatttgttggtgtcggtttctggtccgagcaggaatatggcggggaaatccaagggtgggaagaacaaagggaaggcgcagggcgcgggtcagcccacctctgctgagccagaggtgctggcgactgacggagccgaagtggttaatccagagaatggggaagtgcacgaaacccctgccacggaggatggtgtggcagatgtggagaaacgagacggggatgccccggaggctgtgcagcctgcaagaaagccagctgaaggtgaggctatggcttctttacttattcactgatactgacatactgcagttgtattgtattgcttgaatagtacagtgaacacgatgggacattgtgttttacctgggtacaggtgtacaataatacttttgatctattatatgatttggcactatgttgaatgagtgacaagtttgctccttcgatgttttgtatggctgtgcttatatatgtattgaaaatactagtgctttgcagtgatctaatatttctggccaagctctgttagagtagtcatctacatcatgttacaaatttcagttagactgttggaactttcatctatggaatttagcatgttgtattgttgttgttttgcctgaaaaaccttgcctgcatgcttttaaatggagaaaattcctgtgaatgcactgctgctttaacgattaactatcaagcaggagagcttcatctctaccctgttcctgtcaggacacaatcaggtgaaaagctcgagctgcaggtaactgtaaaaaaaatgttctttcttttctatttgacttaactagttctgttgtttcatgatatgctgttatttacagctaagcccaggagattctgttattgacgttaagcaattcctcttggatgctcctgaaacatgcttctatacatgctatgatttgatattgcatactgaagatgggtcagctcatcagttagaagactacaatgaaatatctgaaatagcagatataacttctggtggatgttcactggagatggttgctggtatgtaacatgttctagtttcttctctatgtcctatgtcggtgcttatttcgtggagctgaagtaaatgttctttcagcaatatatgatgagaggtctattaggtcacatctccgacgtgtgagggagctactatccctgtctagtcttcatgtttccctatcaacatccttagctctgcagcatgagtctgctcagggaaaatctgcaggtacatcaggtccaatgtttttgatctgcacttgtacttataccttccatatttggtgtaaacgcctcaagtaatgtttatagtactatatgaattcatgcaagttttaaaccaacctgctattgattttgaccttacttgattctacccctgctcaacaggttctgaaaaaagccctattcaggagcttgatggtttaaattttatggaggatagtgctggtgctctcactaatttattggcttctgcaccaacagagataaaatgtgttgaaagcatagttttttcgtcgttcaatcctccgccgagttatcggaggtaatcctgccatcttgcattgacaccattgtcatattattcttgtgtatcttcagaaccattattataaaaatcagtctgctaggcctatattaataagcgtgacacaaggagtacatagcaccctgtttccattataaccagacacaaggagtacttagcaccctgtttccattataaccagtcaatgttgtctgatcgactataatcgggctgctatcaagacatatattgagccctgtttggcacagcttcagcattccagctccgagctccaccttagatcttgagtttgtatgctaaaatcaagaaccttaagacttctttgtctagaatagaaaaaacatttcaaacaaacgacttaggtgtatccacagctaaagctccacaaatttctagacagctccaaaaaatctgtagacttttttgttggagctggagctctcccgaacaaggccaaagctctgaaaggtaggctttaccttttctatagattgctggaacaagtatatttgattttttttcaagactgttgcattgcaaaaataaataaatataggtactgctctagtgatctatccttttgatgggatctgaacaaatcttgaagtgctggccatttttcctagaaaggtggttttacctgaagatatattgctttgcctatacttgggctatgttaatattttttatgttagtcataagctgtgatgttggaattctgtataattgcattattgtttttctgtgtatttctgattaagtatagatgtatatattccatataacggtcttgatgcccgagttctgtaacattgttgtgagcttgtcagttttgagttgggattttgtggaattaaaacttgatagtggtttcctcaggttacatggagatctcatctatattgatgttgccacattagaaggaaacaaatactgcattaccggaagctccaaatctttctatgttaacagtagcaatggaagtatatttgactcgagacctacaaaacaagcactggaggccagcactcttgtaggtctactacagaagatcagtgccaaatttaagaaaggtctgctattgatctaaattttattcttgttggtttgtactgcacatgtttaatctttgctgacatttggacaaatcttttgaaggttttcgtgaagtcttggatcgcagggcatcggctcatccatttgagaatgttcagtctttgcttccagtgacttcttggttaggagcttatcctgtgccaggtaatgttgtcagtgattcactccctgactatattatatattagaaatccaacaaaaaaggagctgttctgtggcatgttttttttggggtttccttttgtattctctaatatgtttttgaagtgctttggtgcaagtatgacttgaccatgctatatattactgcctaaaattagttttgctagttccattggaagaaaattgtcagatagacttaggtaatctctagctaaaactctagtctatattaagtgcgcatgatgctaaacagattataccaatatatttgtcttgtgtaaatttgtcctgttggcttcataagctacaaaggcattgcagcagtactgtttccttttcagtggctcggaacctcttacccttcttattttctttcttaatgatattcaataacgatatagtggatctctcaatcctggtataaacttaccattggtatgttatgagaactgaaggaactcccacattcttatatgtaacagcacatagaagggatgcagccagggctgaagactctgttgtgttgtcatatggcactgaattaattggcatgcagagagactggaatgaagaattgcagtcctgccgggagtttcctcatggcaatcctcaagaaaggttctttagttgttatcccacttctggattgcatgctttatacctgtagtaactcattatttttggccgcgcaggatattgcgtggcagagcgctctacaaagtaacatgtgattttgttgatgctgctgtaaaaggtgccgttggtgtcattaatagatgtatacccccaataaatccaactgacccagaatgttttcatatgtgagtaaatataatgtctatctttctgctttaaaatcagagtaaacaatttcaacaggttctatgttgtaggagtaatttagtaaggttatctccattgctgtggctatgtatgcttttttttcatatgatttttgaagctaatgtttttgggagtttgtttaaagttatgtttctttggagtttgtttaaggttgaagggatgacattgagaagttgtgtagagccttgggattttatcctaaactgatacatggttcaattttttactgtgaagagcctaaagactgacaaaaattaacacttttttaaaattgggcaaatattacttccaaaggagttatgttcattccaaattgttcatttcaaagtttcaaacctctgaacaatttatctctcaccaacctgtggttttaggtacatcatggaaactaaatttgtctgcagctgatttgaagtcagcatattattttcaaaatgctcatccatttctttgtcatgtccatttgaatctagaacatccaaatgtcgtcacatggatcacttcaaaactaattatatgacagtgataggttctgcacttactattagacaatatttacgaatctgtagttgaacctagttgccatgggaccaaccagatgaccaatcgtgaatagtcttcgaccagaccaattaatagagcctagtcggttctaattgtccatatagtcgtcctatatatttcaggatgtacacatactatatatgtacctatatgaactatatatagtgtacacaataaagcaagcatcaagactacattagtggttaatttgtgacttacctgtgaaagttgatttctgaactgttaagatctccatatccctgtcccagcaagtgagtatcagagggcagcacagcaagcaagcagactagcagagaggctgcagagtgagggaagatggaggagggaaagggcacacaccgtcgtcggaggagctcatcacgaagagtagcggtgacttgaactggcagagggcgctggtggcttgacaacttcattggagaggaggaagacacacaagagacagtgaatagtgtgcggggggaggaatcatgcgcgggagaggaatcgccgttgtgcgcgggtggagagggatcacgtgggaagaatagtagccacttggaaggaatttgcgcccaacaatggggaggattccaacgtgcctcctactgtgtgtttttgggcgctcctatgctaaccctaacaggctaaattgccagcccattagcccacatgtaagcccagttaagcaggcccatgaaaaacagagcgaccaacctagtcggatgactaatcatgattaaggaacgactaataggacgacttgtaaacactgagtattaaatcactatcacggtgcttacttataaagtatcctcagatgcttgagtgattgtaatacttatgttgaattattgatagtaaattaaaaactaatatcaatctactagattataagcattaccattttctattcaaagtacgtattttttcatgaacttgtacttcttggagttgtaagttgttccatgtgacattcaactaccatgcttctgtactattgttccaagttattttcattgtttctcagtttctttttatgggtactataattgattttttgtttgtcaacattcgcattattctgatattttttacttttctataaaggcatgatgaggtaatttgcacactgtcaattaaacttcaatctttaccctatctcttctacaacactgagtgtattcttatttgtgctcttgttctagctaagtgagccttttaatttaaaaggttttgctttgtcattttggtattagtgtaatgttaagtcatttcctttgtaatatggattgctatggctacaaaactgttaggagcttatcacttccttgcaatgtatacatgcttggtccagtcttatttgagtttcttgacaagtttgttttaatttcactccttccaaagcttaccccttgctattcctctatccctgccccaggtatgttcacaacaatattttctttagttttgctgtcgactccgactatgaacacatttcaaaggaccacaagccagattgccaaaatggctccagcagaagcaccaaggtttcctccccagatgtgatcactaagccagatacaaaccatactgaatctgctgaggtagctgactcaaaatccgaagaggcacaacttgcagatagtgagcaggcgacatatgcttctgcaaacaatgacttaaaaggaactaaggcttatcaagaagctgatgtttctggcctttacaatcttgcgatggcaataattgattacagaggtcacagggttgtagctcaggtctgtatagaaattacatttcctggtatatatagcttttagaatcttttgctgttcttattatgtgttctgtaatttgtatttttttcactcataacatctttctgtacattattatgtcaaatgtcacaaatggtaatctaaactccagcttactttccaattatactttttgtatattattatgtcaaatgtcataaatggtaagctaaactccaacttaatttccaattatactggacttgtagagcatcatacctggtattcttcaaggagacaagtcagattcccttctgtatggctctgttgataatggcaagaagatatcttggaatgaagccttccattcaaaggtcagttgtaataaatataaacaattattaccattcaaaggtatcttgtacgagtaataaagagagaacaattttttcttttgaaagaagtctgaaagttgtgttaatatttctttacagttggctagtctaaaccttgaaatttagtctagtttagaaattctattaactaattctgcaattccatcttgtttgaaactgaaaggttttggtgcaatgtgaagtatgatgattatttataggaattgttttaatgaggcaacttgaactggatgtaattctgcaattccatcttgtttgaaactgaaaggttttggtgcaatgtgaagtatgatgattatttataggaattgttttaatgaggcaacttgaactggatgctatgctaagtattccatactgaacaacattgttgttagtgcacactggatgtatgggttgactgactgatatttccgtcttactttcggagtgcttacatttccggttttgcctagcctttttattttttttgttgttgctttgaagttcttctgtcgccacattagtattttacgctatgtgtactcaacttttggcaataattatctgggccagagttttaatagaactcaaaaggtcaaaacaaatattaatgttattcaatcttcttttgcaatttagcttgttccacagtgtaactaacgttattgctgttctgtattgctgttttaggtagttgaggctgcaaagcggctccatttgaaggagcatgtggttttggatggttctggtaatcctgtaaaattagctgctacagtcgaatgcaagggcattgttgggagtgatgacaggtaatttgattcttgaagttacactctgggttctgttggtgtcttgtataagtaatgaaagcacttgctaccatttcattttcttttcttaaaagcttatcagttagtagtttacatttctctgtgcatgaaagcaatgagcatgttttgagaattattagtaagcatgtggtttaactgtgttgctgggttttgacaatcctgtaaagtttacatgaactgtaaaaagcccttagactttgtttttcttcctgagctatcctttttccttttatagcaataaccgagggttttgtatccgtgttggtatatttagcacagttgtttgttactatcatgtaggcattacattttggatctgatgagagtgactccgcgagattctaactacattggacaagagcaccgcttctgcgtgttgagacctgaacttatagcatcatttgttgaggtcagcttatcacattttttaaccctattcgccaaattgtaacatggtttattttttgggacatttaaattgcatattacggtatttaccatttatatttgtgcaggctgaatccattaaacaatcgtttaagcagaaggttccagatgctccagttgcaagtgcttctgatgctgaggtttgtgtcgatagcagtccctgtgttctttctgtttgttcagaagcattatacataaataagcaactaaccgttgattttttatgcctctttaataatgcaaaattgaacctgtaatctttttgtgtcattcttatcagcatttgttccctaacattcagttgcatgatctctaatttgattacctagagtagaggtctttaatcaagtggtatatatcagtttactgttgccaatttatccctcttaaatattagattaggccttgtttagatccaaaaactttttggattttgacactgtagcactttcgtttttatttgacaaacattatccaatcatggagtaactaggcttaaaagattcgtctcgtgatttacaggtaaactgtgcaattagttatcttttttatctatatttaatgttctatgcatgtgccgcaagattcgatgtgatggggaatcttgtaaagttttgggtttttgggtgcatctaaacaaggccttagtttgtacattcatagacaaatggtgctaacagaatggtatatatcaatttactgttgcctatttatccctcttgaatattagattagtttgtacgctcatagaccaatggtgctaactgctaacagaatgaatagtaagactgagtaaaagaaggtacggtgtttcgcatttgtaatctggaaaattatttctgttgttacaggctacctctgttgaaggagatgacaagtctgaagaaagctctgttcatacacacgaggaaaatgacaactcaacctctgagattcttttcaacccgaatgtgtttacggagtacaagcttgctggcagtccagaggtcttcaaaactactctttgtataattaatatccatatataccaatttgataacattgtactgttttctattcctaggaaatcactgctgatgaagtgttggtaaaaagggctggcacttatcttattgatatagtgatcccaaagtttgttcaggatctttgctcccttgatatctcccctatggatggacagactttaactgatgccttgcatctccatgggataaatattaggtacctgggcaaggtgagtctgagtctataggtggaccagctgaaattgacatttcatttcatctgttctgtttattatatgattcttgtttcagattgcaggcatggtcaaacatttaccacacttacgggatttgttttctgctgagataatagttagatctgcaaagcatgttatcaaggtagtataactttcttaattatgctagttactgagtctgttacttgattgtgggatttattgcaaatttatgaaaacctagtaactagtaatgtgtaaaagcttatattagagtgcagttagtgttttctgactaccaatctggaaatgtgtggtcttattcctgttgtgattttaatccaatctttttccacaactgtaaagccgaatttcattactgggcagcaatgaaatttcaacgagtttaacaagttttgcaacgcgtttgcgaccatagcaggtacttgcctgcacctctaaacacaaagggtttagcgggttaggcgatgctaccaacactaccccttaccgatgcaaaagtttagttttcagaaacagcttgaactaaagtactggctaaaaagttatttattagaagtaacttgaactaaagtactggctaaaaagttgcctactacaaggcacttgaaggctgacacagcacacaggctgaagcaagggtcgaaccaccgattccaaatcactacttgataattgccttggagatctctggtccaccattctcttagatggaaatgaagcgccatttcttgcatatcctctgcgcctttcttcacttgttgcacgaactagtggttatgaagctccctgcccagtatttcaggacagagcagattaaataaataatcctgggaggagatttgattcttttcccttcaaaatatgtagagtttcttattcttgtaatcattgagcgcaccgctgcaaggccaactttgttttctgtaaggcaggctccattttttccaaatcttggtgtgattttaatctattcaattcacgaccatatgttaaatagtattcatgtttggtttcttattctccaaatcgtccagcacactgctgcaaggccaagtttcttattctccaaatcgtccaagattttaatccattcaatttgcatcatcgtattattatatagttatttttgtttggttcgttcttgtatgttgaccaagttttttgttctcactcaaggatatactgaggcaaagtttggatcatgatattgggccagctattgctcatttcttaaactgtttcgtggggaaagttttaggtgcttccacaaagggtagtcttagcaatgcgcagtcaaaaactctgaaggtatgccttcccaagcttggtaatcttgtggttttgatatctgcagcaaatgctatgttgaattttgtaatgtcgcattttcatccctttttatttgatttttagggtcatgaaaatagccaaattcagaagtcctctaaaggccataaactgagcaatgctgctgcttcaagaaaaagcttatcagcttattcccatctaacctccgatggaatttggcttagcattaaggaatttgcaaaatcaaaatatcaggtactagtttctgctgtgtttctttgatgtcttcaattttctatttggagaacatcacaaatggattttttctttagtttgaagtgccagatgatgcaaggctttcagccaaaagggtagctgttctccgcaatctttgccaaaaggttagtaccattctgccttgcatgctacttgtagcatgattgttggtttatttgctaccaaaaatattggtagtttgtgtttggtccaagcaacttctactgtgcttattttttctaataatggcctgcatgtagtatacatgctctctgataggcccattgaaactatcaaatgccattgtttgtgcatctattaattcttttagtcactgtaccttgtacatgtaacaggtaggaataacaattgctgcacgcaaatatgatctggatgcttcgactccatttgaagcctcagatatgttaaatctccaaccagttgtcaagcattctgttccaacctgtacagacgcaaagaatcttatggaagcagggaaagtcaggatggctgaggtatacaattctgttatttttattctgacatagtattgtcgctgtgaggtcttatcctgttttctacagaccgacatatataatattccatggtattgttttttttttacaacacggatgcagactttattaatgcatttgagcatttcagggaacattgaatgaggcatatgcattgttttcagaagccttttcactgcttcaacaggtatacacaaaagttgtttagcttgaaatatctgcagaacatctatttacttgacctttgctatgaaattacagataactggacccatgcacaaggatgctgcaaattgttgccggtaaaatgccaacttatgcacttgcctattgtgttggtcttatttttgtaaggaaaacacacatgagaaattgaacaatctattggatatactgtgctgcattcttccattttagatcatggcatatgctactcataatgtgtatatggtgtttgagaaaaaaaatactcataacatgcacattacctcactatctttcacctctctgaattacctatgcacgtgtatgtaagagttgcattaaatcagggatatgatgtttagtcagatgttcagttatcacatgcaaaattggttcaggagttgagcattttttgtcacttacgaattacgaacacttttgttgttctctatgttcagatttaaatcctcagaagaaaacaaaatgcttgttcttctttgttataggtaccttgctatggttttgtaccatgctggtgatacagccggagcaattgtgcagcaacatagggaactcattataaatgagagatgtcttggtcttgatcatccggacacagcccacaggcatgcatttttgtttaaaaaatgtcactgctaaattttgatattatcattcatctaaattttgctaagaagtgttcatctaaaatatgtaggttagctgttgagctagcgttattgtagtcatgcaaaatttttttagcttattagtgttatgacataccttgaattctactagtttcaagttagttaaacataatcatattttcttttgtttttctttgatttgtcaaatacattttatatttttactctatttgttcagcgaaattttactatccttttacacccatttcttcttcagttatggtaacatggcgttattctatcatgggctcaatcaaactgaactggcactgcggcacatgtcccgcacactgttgttgctaagtttggcgtcaggacctgatcacccagatgttgcagcaactctcataaatgttgcaatgatgtaccaggatgccagcaatatgaatactgctcttaggtatcttcaagaagcccttatgaagaatgagcgacttcttggccctgaccatgttcaaacagctgtgtgctatcatgctcttgccattgcattcagctgtatgagcttatataagctttcaattcaggttagttctgacaaaagatactgatggggtagttatttcaaactgttgacttgacacgttggtgtttcatgacagcatgaaaagaagacttatgatatactggtaaaacaattaggggaaaatgactcacggactaaagactcagaaaattggttgagtacttttaagcttcgagaagagcaggtatattttctatgtttgttgattagcaatttacttttcagaattttgcaagggatattgtattatcttgactgaacaatagattgtgatgtttgctaaattggttagtgtatttattttatttagctttacagtcagcaagagcttttttggttgattcacttttgtccctaagattcttgcgtgcgtcctaatgtgcagttattatgtactggtacaaagtatgtccataacatatgttttttccccttgtgatctattacctctgcatatctttgtcattcttgcatggcgaacattattatatcatcaatctgcacaggtcaacgcccagaagcagaagggccagggagctaatgcatccgataacgctgttaaattcttgaaggtaagctaagttgcagaccttccttctataccagcttaaattcatccaactttaatgaccgaagcaatatccatacagcttactttgtacaaagtattgtggatcataattatatttatgatgcattttactgtgcttcttatgctaattttggctgaatattaactcctataactgtatcgctattgatatttatatctgcagatattggatttatggttgcattgaattcttaccttttgcttttgcaggcaaaccctgcatttttacaagcaatgaaggctgctgcgatacaatcaggtgatgggtcagcaaatgtcaacaggtcgctcaatgcggcagtagttggagaaggtgtaccacgactgagaggagtggatgagcgagctgctcgagcgactgcagaagctcggaagaaagctgctgcaagaggtcttaatgtccgtaatggccctgcggcaaaccatgcgtctgatgaactagctcagattctcaaactcatcaacgctgcttcaggttcttccacttctgcctcagccaaaactgaggaatctgcctctgaagggcaggcaacaaatggatctgttcaaaacggaactgcaactgaagcgatagctgtggataccaatggcccatctgcatctgctaagtccactgttaacacaccagttggattggggacaacattggagttgaagaagcagaaatcaaagcaaaagtcgtagaaaacctgtgcctggaattttttttggcaacagttttggattttaggttgatttgggtttttaccttttataggattgccacgttcacgtggtggaagagttcatttatttttgttggaggttcttaggtgggttcaataatcattacaagaaagaagaccagaccattgtttcgaatcatcattgacagaccactgatgagataatggctaatccttaagctaataaatctgtagtcggtacagttacctgtttaaaatttttgtgcaagattagtatgctaatttgttgcccaacaaagaaatattactcttatttctgttgagcttttagtgcttctgttggtgtcagcagaactcttctgttcgtgtgcgtgcagggtttctccagctccaatttgtgactgttcgattgtattttcattttaaggaacctactgtgtatgtgcagttgtgatggctactgacaaaatgattttatgcggcctacctggttaatgtcatcatcgatcacgcggcgcgctgccttttttttctttctttttttgaagttatactataatatttccaattattttgctattgctaacaataacaatttaacttcgctgtgtttggcctggccgtgaattatgtttagcaacatcttttcggactcagacaaatattcattcttactctagattaatatagactccctctccattactatctttagttaaaaactgatgtaatgaaccatcaaataacttttgaatcgttggatgttgaacattgaatgtatagaatgttcgacattaacgaatacgaaaataggtaattatcctagtgacatgccttcatagacagtcctgtacatcatgtattcgactatgagtattgtgtgtatatcagtgttgaaaataccaggctatagcactgatgtagttttgttttttggataggttgttttcctag

SEQ ID NO: 4523 - DNA, 7432 bp, Sorghum bicolor
acaaaaataaatggtatatacacgaaaaatattgtctacaaggaggtcctcactctataaaaaggtattatctgttttgtatagctattatattttcttacatctgtgtcctttgttactaacatttatcatattcatttgcatttcaggtagtagaagaagtttgtgaataataggagacaagtagtgtatgatgatcttttggacatgttactgattagatgtactcgttatattataatatgttttcaataactatatgtgaatttatgtttatgtttaattcataacgtgatgattattatttctaacatttttcttttcttctatgattaatatttagctttataacaaataaattgttaatgaatagatgagattttacatatgttctacacgtgtagctattcatcataagattctatatatacccgtagcaacgcacgggcacttaactagttaaaacaaatgacgtgaacaagcacaacttgtcaggcggcatatgcatagtaaggtataccttccgctagtcgtcttttttttacttcccataataccctcatgtgtcttcctgttttgtccatgatttgtagttttcgagatgcatctaatagcaatatagaatttctatgtcgtgtactccctttatcccataacacctgaccttctatacctgtttcaaattagggcacgtttgatatagctctcttcattagtggagtagttttttttttgagctttggctagtagagctgaaacttttttctgggtaaaatagcttcttttaactataaaaacggtgaaatatctacaatatattttattttttaaaatttgttctttctcatttctttctcacttattttacttttcccctcttatctttctaccttatcttctctgcacagactccgcctcttctttccttgcctccatcatctctggcctagcctcacgtacacgaaaaaagagaaggttggagcgggtccacattcacgcatgcacaagaaggcccgcgccttagcgccgccatagtggttgtggccgtgctctctcaccgtcatggccacatccaaggttcccctcatcgtccgcccccattgacactcgtagtcatgagcggctgctgcccacgtgcacggagtcgaattttgggatagggaccataatgacagaggttgaagtacccgagtagatgaaacttgtttttttggctccaactcctccaagtggctctagtacgtgggttttgaggatattcacaatcaaagttgttttcctagaggttgtttggttcatgaagctcaaaaacagctggtcgatctcacttcttaatgtatctccttttcctaaatacatttgtacttttcctttgctttctcggtgcactacacaatttaccctgcactttaatttccatgtctagacctaaaacaccatctatgattagacaaatggtatatgtgacttggattcacgagccatgttcattcaatttagaacaacttgcatctctgacttgaagaagtgttctgtgatggtacatcattcgatttgagtatgtataggaacaaatgacgctacttgttgaataaatctccgagttagcagattattcaggtgaccatatcacaaggttggaacgcgcggacgcaattgctagttaaaattagatctcgaagggaaaaaaatacgttaatcaatcaagcgacattttctttcgtgaaccaatcgtttcaccagagaactcacggtacttcgatgtcctctgttttcccgaggggaccccgtccgtcggatgcgaggcacggacggcccgcgtccggcgccgcccgatctgggtcacgcctcccctggtctagcgaaacagggctctacacgtgtacggggccagatttcccgcagccgacgtggttagtgcgtcccatctggcccctctgggcccacgcgccagggaggccgcgcccgcttttaaatagctcctctcccccggcggaatcggaggcggccaggctcctccctcctcccccctcccccccttgcaaatcctgagaacaccaccactcgttttcctgtccgggacaggagaaaaggggagagaggcgaggcgcggtgtccgcccgatctgctccgccccgacgcagctgttccgtcgttctcagtctcaggtatccgcattagccttcctggattaaatcccccctgccactgtttcatagattgctctgatgaatggattggttgaggaatcggttacttttccattgcccgggggttcgattttggggttgctgagctcggcaacagggtgatagttcgccgtagcgggctcgtgggccggccgtcgattcggcggcggcactcactgtcgcgccgccgggccggcccgggccgagctcgtcgtcgatccgtagcgtttggtgcgggaaagtaatggggatgcggctgaactcgccgtcgcgcctgtcggtcgagctcgacatcgatctcactcacccgcaccctcacccgcggacagccgcagaggccttggcctgctgatgtggatttgcctagatgaatcctggcaaagcacgcttgtttctcatcagatctgtaaagtagagtggtgccgtttagatatttttgcccgtgcaatggggccatgatttctgccccccttctgccgctaccactcgtggtgggaaacatgacatgccaactttggtcacaaacttttcgcagctcccgttaatcttgtggataaaagctgtgctacctttacaggtcttttgaggccaaaggcagcctcttttttttcggcgttcggtccctccatgttcggcatcgctgcacctgcgccgcatgatgctctgcatttggcggtcaactgctctgtttttcgagagcggagttggcgatgaccgcacacaagaattgactgacctttagctcgtgcaattgcagcatcgacgaagcaacttgttttgctttgacacataaagaaatatctacttccccagatgggaaaccgtatatgctttctagtgatcaggtgctaggaatttggagtagaaaaaaatagagcgtgttttctttcaatctcaaatctcagtcatgacgcacgcgcccgagggcaggccggcggcgggggccgcggctcgttccgtggtgcttgtctgcttgacctagaaaaaggcatcgtgatgaacgacgccccaccgtcggatgtctttggattttggacggtggcgactgtctcttcctcccacgggtcaaaaccacctactcgccctcactgccggcatggtgcatgtcagggctctgcagccgtgtctgcgcaacggtacaagacgcagggggtcacagtctgcaaggccggcagggtcggcaccgaattccaggcccacataatggcatcatcggtgcacggtgcaccagcagatctgggtacgcgtggcccctcttgtgaatggcctggtctgctgcaactggctgtgctacactgatgcccttgttatgctgcacaattgctgctactgctatggccatggtagtcgcatgtgccatccatttgcctgcttgtaggctctcccgcactccaatcagaaagagacaaatcagtcggacgcacttgtcttttcagaattaatgcacagtatcagcacagccaagcatctctttcgacggatctgatgtctgtctccatcttggcgccatagttgggtgggtcgagaggacacgcttgtgtcattttggccaatggctcaagggagacagatagcatccgaatccaccttgtgggagcacatgtgcagcttcgagcaatactggatgctgcactgctaaagttactcaaaattggtaacaagatgaagcacacaggcaacaaaaatcgaatctttcctatttttcgcaccaaaataggctggttcttagattaactaatacgttgtgcttcttttacattgctatatgtggcttcactaggctatcgtatttcaacatttttccttttcttcattagttattagtttctcctccttgcctggtcttatgaccagactgtaaatcgaactgttttaccaccaccttcaatgcaaaggcagagcacctgtggcatcttatgctaaaaataaaaatattttgtgcctccaggctctgataggttgcatatagaaggttgacttcagagttcatatttcctagcttttcaaaattgaccactcctacaaatgatgcaagattgccttgtgtatggctattggatagcttagatttgactagatatggtaccctttttttctcgttgaatctcctctacacgtttttggcgcttgtagtctctcctgcgtgctgctttcctatagggttattaagaagtccttttgacaaagcatgccgtccaattatatgcagtacctcacatttttctcgaggggactgttggaccagttagtggcacgtaacatcacaagtgacatgaccttaatctattttccacgtattgaatttatttgcgtaccatagtcttgctgtaagactttactccctctgtctcaaaaagaccgatgttttttactttgaccaatcatatttgactgttcgtcttatttaaaaaaatttgtgcaaattttaaaatagataaatcattattaaagcacctctaatgatcaaataagttatatcaaaatagacaatatttatacaaaagttgtaataagacagatggtcaaacaagatgtctaaaagtcaacaacaacggtctttttgagacggaggaagtatattttattagtcctgtgtggtgattcagaacagatttaggcacatctgcagcagtgcgtgtggcatctcaactcaggatgcacacttcactttgaaaaagcgaatctgaattctgaacatgtatctatgttacataggccattgggcttgcacatgctgcgatcaatgcgatcccgaactcgctgtggcacataggaatatgttttggcatgaaagtgatgcgatcatgcacggcacatgccacctttgtgggagacgcctctcgtgccgtgatttgttttattttggttgattgatgtctttctcgtacccttgctggatcagtgccaacttactagatattttttttggggggttcacatgacagctttttgattggatgggatcgctgtaatattgttcttgatccacacttgcttgatcttattgtaacatatctcgtttgtgtttgtgtcagcagcaaaatgggtgccggcggcaggatgaccgagaaggagcgggagaagcaggaacagctcgcccgtgctactggtggcgctgccatgcagcgatctccggtggagaagccaccgttcacggtgggtcagatcaagaaggccattccaccacactgcttcgagcgctcagtgttgaagtccttctcctacgtggtccatgacctcatcattgccgcggcgctcctgtactttgcgctggccatcataccggcgctcccaagcccgctccactacgcggcctggccgctctactggatcgcccaggggtgcgtgtgcactggcgtgtgggtcatcgcgcacgagtgcggccaccatgccttctccgactaccagctcctggatgacatcgttggcctggtgctgcactcgtcgctgatggtgccgtacttctcgtggaagtacagccaccggcgccaccactccaacaccggctccctggagcgagacgaggtgttcgtgccaaagaagaaggaagcgctggcgtggtacaccccgtacgtgtacaacaaccccgtcggccggctggtgcacatcgttgtgcagctcaccctcgggtggccgctgtacctggccaccaacgcgtcgggacgcccgtacccgcgcttcgcctgccacttcgacccctacggcccgatctacaacgaccgggagcgcgcacagatcttcatctcggatgctggcgtcatggccgtgtcgtttggtctgtacaagctggcggcaacgttcgggttctggtgggtggtgcgcgtctatgccgtgccactgctgatcgtgaacgcgtggcttgtgctcatcacctacctgcagcacacccacccggcgctcccccactacgattcgactgagtgggactggctgcgcggcgcgctggccaccatggaccgcgactacggcatcctcaaccgcgtgttccacaacatcacggacacgcacgtcgcgcaccacctcttctccaccatgccacactaccacgccatggaggccaccaaggcgatcaagcctatccttggcgagtactaccagttcgacccaactcctgttgccaaggcgacctggcgtgaagccagggagtgcatctacgtcgagcctgagaaccgcaagggcatcttctggtacaacaacaaattctagctgctggttgcagaggtgaggatggaggcgatcgcccatacttttaccctaggaatgggaggagcaatcaggaggagaagatggtaatgtcccaaagtctccatctacctatctctggttagtcatcaggctttagacaggaagagagcatttgggaacagagaaggcttattgcagtgccatcgctagagctgccatcaagtacaagtaggcaaattcgtcaacttagtgtgtcctctgcccatggctgagctttgggtagtcccaagttttttttttttctcgtttgcgtcctagtcgtcgctgttgtaggctttgccggcggcggtcgtcgtgtgattggcatccgtggccatgcctgtgcctgcgtggccgtgcttgtcgtgtgcgtctgtcatcgcgttggcgtcatctcttcgtgctccccgcgtgttgttgtaaaacaaaatatcctggtgtctttggcggaataacagatcgtcgaacgactacttttttgggcagttgtagtggttttccgagtcggatcacgcacacacgattctcgtgtcgccttgctcgtttctgggtcgtctttgctagctggctcaatctgccaagattgccccgattgactccctgctaatccatccacacaaaggatgtgtggtgagcaggatcttcgcttcgctttgcttgcgtttctctgagctgggacattctgtctgccccagctctgcttggccatagtgccaatttgcaacactgtggtccaactagtgccaatttgcaacattgtggtccaagcgcaatgcttatcgtgtggatggaaaaggaactgctctcctgtgccgatcacctgcctgtgaggaccattgttttgctctgggcaccggctcaactgtcttacggatgggagctagacttgctcatactgaacccatcaacgtacattgttgtgcttgtaccttattcccccatcacatgcccattctgttccgtgtgtcaaaaatctcgtgtcttggcatgaggtccaagagaattcagtatcggtctct

SEQ ID NO: 4524 - DNA, 3605 bp, Sorghum bicolor
cgaaaaggaagagaggagagaaggtgagcgccgagtgctgtgtcaatgtcagggtcggagttggacttgtgaactgcagccatgtacatgagccgcacgaactgcaggctcggcagcggctgtgcgcttcttcctcaatcctccctcctgactgcactctctcggtctcggccaacaactcccataggaaatcaccaccgtaaaagtgatggtacagtagcagatgtcaagtgttttcaaccgtgtagtataaagtttatgttcagagcatgcaactccgagtggtgttttgtgaaggtagattggcgtgcatttgctggggagaatcattgatgaaaagctctaccttaaagcctatgatgagcagccgaaacatgacaaaatgtttcggtagcaggcggggacagtcggacagacaaggttgatgggcacacggctgccatttggacggtggatgattggcttctcgcctcctccactcccgcctcccccatgttctcatgtggatccctttggtgcggccgcagctacccagtttttttaagtttaaatttaaacgctaatcaaataaacagctctgtcacattccctccttcggtccatgaatgaatcatcagaagcttcggtttataccttttcccgtaactgcaaacaccgcatcctatacaaagtaagatactctctccgtaaaaaaaaggtactctctccgtaaaaaaaaagtacaattctaaaccattacatactatctttacatttgagtaaatttatattaaacatatattaatatttatcaatgtaaataagtatcattagcgtggaatatatgtttataatatgattatttagagtgttaaatgttgatattgttttttataaactaagtcaaacttaagggggtgtttagttccccgtaacatgcagaatgcaaaatacaaaatgtcaactactttggaatgatgaaatacaaaatgctaaatttttcaaggttatgtttagtttcattcaaaatgtagaatttattgtcttcatgagggcctcttgaggttttgttttgttttgttttgttgcttttgaggccaaaaattcaaaataaagaataatcacctttttgctaaaaaaaattgcatgatgtttagttccaaaatgatagactttttttttttgaaaagaaggagaactaaacacccctaagatgattggactctaagggcactcacaatgcagactctatcatagagtctaaagttatttattacatcgaacaatgtggacttagagtctaaataagacttggagtcttattttttctacatctttcttcaataaatatgctgccacatcagcaaaataccataaataatatgtagttaattgtcttggactctctaatagagtcttgcattgtgagtgcgctaaataacaaaataactgcattcaatttcatcgacggacgcaaacagtttgaaattcatgttttttaataaggaatttaaagttcatgttgttagcccgatgaggcaatgaacatgtttgttacgacaataatcagacggccgctgttcacatgagttggtggcatgagctgctgaaccgagtcacacaggggccggtcaggcggacagcacaccacttggtggacgtcaaagcggctgccaggtggccgtatcctggcctgcaccgcaccagcagctgccgccacccatcatttttgccaacacggctccagtgtatctgagctgcctggcttcgaggaggacgtcccaaaaaaaaaaagagtttggtaattcgttcacgtcgcctcgcgctatagcaatagcatgttcttctgttcattcacaaaagctactagaggaactttcaactgcacacctcgttcgtgtccccctcatgcatgaataaagccagcctgtcgtggcggaggcaagctgttgtggctgccacaccgcgccatcacatactgacatacacatacctcctcctcctccatcctctgtccacaccaaaagcagaaggaagggagagatctgggaggggtgagagagcaggaggagaaggccattgccctcttgaaggctcgagaccttctccgtccatcctcttccctctttgctttgcctctcctagactctctagtcgtccggtccggccatggccaccatcctggagaacatccagaaggcgaggttcctgccgaccaggccgctcaaggacgagctgcccaccttccagggcggcggtggtggcaaggaggagagccacctcatgggcctgaggaagcggctgtcctccttctcgggcaagatccagcccatctcctccgcgtcggccgagtgggcgttccggcgctccaagtcggcgccctccctcggcgccgcgttcgccgcggggggcggctccctgaggcagtggtggcagtggggcgtcggctggctcctgtccaagaagcccgggttcgcgggcgacctcgagatgaacgaggaggaggtcgccgcgctgggccgccagagcaggggcagctggggccacatcctctacaagatgcgctccggtgtccggcggctcgtcatgtccacgcactcgctccctaccacgcacaagcagtcgtccctgccgtcgtcggcgtcggcggtgcacaacaacgtccagtgcaagccggcggcggcgttcgcctacgcgcagcggcagagcttccaccacaccggccacgccatggcgcactaaggagcgccgtcgcggttgcaggtgctgtttgcagccgatctcctccagattcagaagtggagatggcgagaggcacgagaagaagaagaagattcaggttccaggtgcgtgagatcgatggtgaagatatcgctgtaccgtccgttataagtgaaaactagtagctcggtgaatcgatgatgaatgaaatggatcttcatgtaggttttaccatcctgtgctgtgtagatctagtgccccatgtagaggtgaacaagtgttatatgctctcgttctttatattcttttgggttcttttggacgatgtaaatgtacaatgtttggttgattttgtactgtttttgcctccagcagtaaataaaactaatgcaaattgtgcccctctgttcttggaaaagtagcgctactccttcatttggagtctcggcccagatctgatcttttcagcggctgcccttgccatgtatcggtgtcggtgcacgcgtttgctggaagtagtagttggtcaaggcaacgcaaaaacagctggaaaagcttacgaaaaaaaaattcataagatgcccgtcaacgtaagcagcagctaggagaatattctgaaacgagagttgccgccgcccgccggtacccccggttcatggaatcatggtgtatatggcagttttttcccgtgaatttgtccacggtttatagttaatctcaaaacgcaaattagttcgagacaggtggattcgaacgcgaatttcactccaatttcgtttctagaacgacacatactattctctcattcctcaaaaaaaaaaaacataggccttgtttagttcgcaaaaatttccaagatttcccgtcacatcgaatctttggtcacatgcatggagcattaagta

SEQ ID NO: 4525 - DNA, 5209 bp, Sorghum bicolor
ttttgatcatgggaaaattgctttgtatgtatgtccacttagagtgccacatcctgatccataagctcaatctgcttaatgtaaattatttagaacttctttttattttttttcttgataaaatatgtcctttttgggtgaatcttgatgaaatatgtctaactctagtagagataagaaaaaaatgtgggagtaatacaacatccacattacaatagtaattgttgttcttctcttcgtcctctcgaacatcatttcccatcaatcttctagctccaacctagattcctccacattacagcctttttttttctcacctcctgtaagttcgtcagcggcataagggaggaggtctcgcccttcgatacccctcctccctagtttttttgtagtttcttggtgtgtttcatctggataggctccttcccatcccactaccacttatggttttcggtggtctcaagcttgaagtctccattgcgacgacgatagcaaaggccactcgcgtcattgatagaggtcatcacttaaggaagaataaaataaagatcttcgcccccatgccaccgagaggcaaccggatctgctcaccccaccttggcttcgtggcttcatatgtcctccgttctagattgggccaggtctgatttagacccaccaaacttgggtcaagtcgctccttgttcaccggagtatgttgtggcagattaagaatctccagcgcgtcaactccactcccattgatctttgtcaagcagtgctctaagattgtcatgaccaagtccttattcctcttcagcaaatagccgataacacttttgctttctcagagctcaggtgctttccataagactttgtcaacctctcttttgctccgtcattccaccgctcaacatttgtcttcgcccttttgcgccgatgttttacaacctttgtagagcttgggacttacccgtgctctatgtcgccatcatcctcatcgtcaattaggactaagttcttcttaatcacacgtgtttgtaatgcttcttcattaattagcaaacttatgttattataaaaacagtaattgtcaatagttttagggcgggtttggattccttgtcggtcccttgcctggccgagcaaagttcatggtgttcggctcctttacccactgccttgttattcatgctttcaagatttatccttgcatgatcaaaagaaccaatttagcttgcctgcaccggcgatgatggctttgccaagtgaagcaacaaggtgagagatccaacacgcccttatctttctggtgaccttacctgttactgtggaaaagccaacgtggcagagaacgtgtggtgagtcactggggcccggccagcacagagaagatagagctgtccatgctgttattgcagcaggcgatccagcagctgtcgtctccctctctctcgtcctttttgcagcaccaggaaaaattcagaatggcacatctcactgtcagcacacgcacagctagctagaacccaagcctcagttgatactctcgatcattagtcatacccgagcctcaaaagagaagcctttgctgtttgcactcttttcacacctttggcaatcttctccatggaaagcttcattcggaacgcgtgaattctgaagatgcctatgcatgaattactagatgctaaaaaagctagcttttcgtagagtgtttgggtgttcatttctgatgccctgctgcgttgcagtttatgcgtaactagaggcccccccggccccggcaaattggggccctacgatatgccagctgaaacacactcccccccccacaccactgtggccagccagccctacctcacatgatcgcacctaaagggagggccaaatccaatctcccatggccaagtaccatcacccccaagcaaaggggcgccgggctcccctatctatccacccgtcgttctccctatatatatggattgggaaattttccaggagggcacacaagccgggaagcgaaagggacgcgcaagcttcatccacaagaccctccctacaccacacacccaccctcgatctcctacataattgctaaccacgctgctgcaattcactcctcatcagtggctcaaagacctgcaccaagcagctgaggcaaagctatagtttgtccccagcaccttagccttaggactctcggcgttgataccgtctccggagctgctggcaatggcgcgatgccaggggaccgtcgagagcctctgccaggggctgctcgacctcgacgacgacaggttcagcgcaatgtgcagcgccttcggctacctccaggagtggccggacctgggcgccatgtgcggcgcgaatctcgccgtgcctgccgtggcggcggcggcggcaccgagcgccggcgacggcaacgactcctcctcttgcagcggcagcggcgggatcaggaagaggagaccggacgcgtacctcgatgccaaggtgagagggcgttggttgctggagcttgagcaaggctttctgctggattgtcaaagcctagcctttgactgacagttgtaagaaaaaaaaaactgaaattggcagggtggtgcaaacgacatgagcaagagacccagagggaagcagctgactggcctctctgagatcgcggcgcccgggaaagggaagcaggagcggccaaaggctggcaccaagaagaaggcggaggctgcgtcgacggcggcggcggcggcggcggcggcggcagcggctgccggccagaagaccgactacatccacgtccgggcccgccgcggccaggccacggatagccacagcctcgccgagcgggtaatatattaatttaacagctgaattactgaacaaacatctttgcgtgctccatggcatgctgctcaagtcatgggcaccgatcgacccctgccgcgtgcatcagaattcatggccgaatgaattggcgtgcaggtgaggagggagaggatcagcgagcggatgcggtacctgcaggagctggtgcccgggtgcagcaaggtcacgggcaaggccggcatgctcgacgagatcatcaactacgtccagtcccttcagaagcaagtcgaggtaccgaccgaccgaccggccgccggccagcttcatcttctcggcttcttccagctagctaaagctagcgctgttgcgcgatcgctcaccggagcttctccttgcttgcagttcctgtccatgaagatcgctgcttccaacccggtggtgagcttcgacatcgtcgaggacctcttcggccggcagctgaagcaggcggcagccctgcccgcgatggctctgccggccgggcagctggagccgtcctgccttcagatgagccccatgcagcaggtgcacccatctgcagccgcaggcggctccactggctttgggcttgagatggtcgtcaacaacctgtacgcgcccgccgccgcgagctgccctgtgtccgctgcgccgtcggtatcggcggctgccggaccgtcgacgatcgagccgtgcctcaacgtatgtacctgaaaatcagttgtcctcgagtctgctacctcccgttctgaagcctcaactgaactgagtgacttgtgctttctgcaggtgaatggaactgctgctgcctgggatattggcgcccagaatttgttcagcggttttgatgcacaatttcagtcagtagaaagtgagtagctgcttcctgaaggccaagccagcagttactttgcctcatgtgaaatgaaagaacacagtagtggttagatcagggtaaaataaacccctagctgaacatgtttaaagttcagagttcataatagtcgtacatgccatcacagaattctcgaaatggcagccgatcaaataactttaccacaaatgagcggatctaataaaatttagctatgtccatgcaaattcagatttgtatgaacggtgcatatgtccctatacatttaactccagcataagtgactgaatccagctaatttccctgcaggtgactgtttgctagacaacctcaaaatggaaatgtaagaagaattaatcctcattgctggagttttaaccacggcaaaatttgtggctgaagattctttattcatagcaactgtactaatgaagtaattctgtcagcaatggcaatacaagtacatttcttgtgttatatgtttgtctgctactctcccaatttctaaacattccttgagagtcaagctacacagagggttcagaacttcagattacaagcaaagcacttaaaaacatgttcccacaggccacaactaaccaacaccaatatacaacactttatcacctaaactgatagtacaagaaacaggaacaactctcctactcatcttccttcaaagcacagactgttcaccagcttctgcaaagacagaattcaaccttacttgtaacagaagtaaaggataattcgcttgcacagtatacactgacactgaccaccgcaaaggatttgagtgcagagatatcagccaaatcttacaatattaacatgtacctacactgacatggcatatgatttgagtgccttaaggtaccgactacccgccggatcttatttcaattttgacgaatactacaaatcccttgtgaaccacagaaaaagtatttgttcagaacactaatttcaggtccccaaaaacatagttttgagctctcgttgtgactagatcaaaaaaaaaaaaagttcagcctaaaaaacagttgtctccctcctccatccatttgtgcttatctcgtcaacaagacttcagtgtgcagagtaaatgaactgttctttatttttcacatgtctggtcgtcagaaagatccaaaaaacggcttgcaattatttgatacaggagagactcaaatacataggaaaaactatttccttgtgccacaacaagactagatgcttcttgtgcttatccacagccatccctgttcatatcagggtgtgcattcacaaatgcattgctatgctttgtagcaccatagcaatgacctttacttgagacccagtctattttcgtgaaatgcttgagacgaagtaaaggacctgaactaacctttgccaggcacaatgataattggtgctgctttacagttgcggaagcaatactcactgacacttccctgcaacacactacagtacaaaggcaaagttagagatatacttataaatgcaatc

SEQ ID NO: 4526 - DNA, 4511 bp, Sorghum bicolor
tcgatcgtctcaagaattttgggcctgtttagttgacccaaaaaccaattttttaaagattttcaattattttaaatctttcaattaatacatagagtattaaatataaataaaaaataattaattataaatttatctgtaatttaaaagtcgaatcttttaagagagaattctttatgagccactgtaaaagatcgtgaatacttgtgagctactaaaaaagttcaacggcttcagcgccactactctaaatttgtttgcccttcaggctgctaggctgctgctgttagattaggctctaacagtgtcaaaccgcgggtgtaaaaagtcaaaaatacctttagatataaatatgctattaatttttttgagcatattaacgactttaaatgaaaaaactcaaaactagaaagttgtagatctcgtcgagatctacaatttttatataaaaattattttcatttaattttacaaaaaatatatgttttgatatgattaatatatatcttagaaaaatatacatcttttttgcgttattgaatgaaaatatttttatataaaaattgtagatccccacgagatctataactttttagttttgagtttttccatttaaagtcattacgatgctaaaaaaattaacagtatgcttatatctaacggtatttttgacttttcacacccgcggtttgacaccgttagagcctaatctaacggtagtggactggagggaaaaaaattggagaagtggcgctgaagtctgttgaactttttcagtgacccataagaaattgtgatcttttacaatggcacacatagaatttgctcatcttttaaacctagttagttcatgattatataattattatcaaatataaacgaaaatactacagtataaaaatcgaaaaaaaattagatctgcctcgctgaaaaaccatcacctactactccctagttaggccctgtttagattggagatgaaaaatttttgggtgtcacatcggatgtgtcggaaggatgtcgggaggggtttttagaaactaataaaaaaaataaattacatagctcatcagaaaactgcaagacaaatctattaagcataattaatctatcattagcacatataggttactgtagcacttaaggctaattatagactaactaggcttaaaagattcgtctcgtgattttcaaccaaactgtgtaattagtttatttttcttatctaaatttaatgttttatgcatgtgtctaaagattcgatgggatggatgaaatttttttggaagggaactaaacagggccttatttctgccatccctgtcacctgttcgtctctcggccttgtttagtttccaaaaaattttgcaaattttttcagattttccgtcacatcgattagacgtatgcataaagtattaaatatagatgaaaataaaaactaatcacacagtttgatcggaattgacgagacaaatcttttgagcctagttagtccatgattgaacaatatttgtcaaatacaaacgaaattagtactattcatattttgaaaaaaatttggaactaaacaaggcccgtgctccgcgaaatcgcggctatatatattcacacggttttctttgttcgccgcgcaagatttgagtgggcccactccgttcatccgcaggcctcaaagcacgcgtggcccagccgcggccggcgagcgagcccagttcccgttctcgctttctcacacgcgcccgacgcaaggcgccagcagaccggcagatatttcgcggcagcgcggcttcatcagccagccgcccagcccaggcgaagaaaaccttggccgagccgcacgccccgcacctgtcgttggcgcgtcgcctcgcctcccccgcaaactcttttggcccaggcgcggccacggctacccgatcgcgcgccgcgccacgctgcaccacacgatccccggacccaaacctatactacacacacacacacacacacacacacacaccaaggaaaaaaaaagacactagcgagccttcacttgcgttcccctggcccccgtcctctgttccagcgtttccgccgctctccagaagccctgcctacccgatgtccgtcgcgtccgtggccgccctccggacggccgcctccggctccggccggtgccacggcgcgggttccccacaggtcggcctgaacggtgggcgccctcgttctctaccaggtccgtgacgcactgacgctctaaacaactgtattggctgatccttgtggccggggccattggctggcagggggcaggttcttgatgatgcagaggagggagctggtgaccaaggccgggatcgcgctcgccgtctcctgctccatggcaacttctccagccccggccaacggctctgctcaaggtatgtatctgaccagggctccacgcctcagccaggaggaagggtgtcactctcgagtctgaaccatgcgtgcagggctggaggttttgccgttcaaagcggacgggtacaacttctggacgtggcggggtcgccggatacactacgtcgagcaaggcgccgggcagcccattgtgctcatccacggcttcggcgcttccgccttccactggaggtttggttattatgggcactgaccgctgagacaagtttagatgtctgaatgttattgtttggcccggcgtgaagcattggaactgccagcagcgacactgcggaacaagagcaatgcatggtactgaatattgatgtgctgtgactgtcaatcaattcaggtacaacatccctgagctggccaagaagtacaaggtgtacgccatagacctgctggggttcgggtggagcgagaaggcgctggtggactacgaggccaccatctggatggagcaggtctccgacttcctccgggagatcgtcaaggagcctgccgtcctcgtaggcaacaggtacgcaacagtcaactgatacatggcatttcagtttcaggattcagacggtacatgcctgactgaaacatttccttcaacactaaaacaatcaactgatatatatatacatcagcttgggaggtttcacgacgctgttcacggcaaccgaggtgccggagctggtccggggcgtcgtgctgctcaactctgccggccagttcggcgaccccaacaagccggccgccgcaccggccgaggaggaggagggcagcccgctgtccaggttcatcgtgaagccgctcaaggaggccttccagcgggtggtgctggggttcctcttctggcagtccaagcagcccgccagggtcgagaaagtcttgaaaagcgtaacgataactcaactggatatctaatcgcatcgatcggctgctgccatgccatattggcataccaagttcgtcatctgagatcgtcttgtcgctgcaaaaacctgcaggtgtacatagactccagcaacgtcgacgactacctggtcggttccatcacggcgccggcggcggaccccaacgccggcgaggtgtactacaggctgatgtcgcggttcatgtcgaaccagagccggtacacgctggaccggctgctggggaagctgtcgtgcccgctgctgctgctgtggggggacctggacccgtgggtcggcccggccaaggccgcgcggatccaggagttctacgccgacaccgccgtcgtgcacctgcaggccggccactgcccgcacgacgaggcgccggagcaggccaaccgggcgctgctcgagtggctcgcggctctcgacgcccgcgccaagccggccgagcccagcctccagaccgtctgatcgatcaggcgtcaggggcttagcgtacatacatacactagtcaaagcatacaatttggtggccatgtgccaatgtagcataacactagttaaagcatacaatacggtgattcccatggtgcgagtaattgaggagttgggttctcggacgaatgacaagtgattgatcaaaattaatttcagagaaatggatttcacataaaacaatttacttcggaattcacaaaaacatggctaaacggtgtattatcaatgaaacaataaaatgacaatcatcaataaaataataataaattccctggctaagcattcagtcacctgtcaccaacaacaccgtaaacttcgctccaagccgtccgatcagcgagaggtattgaaccaacggttcatgattgtatttgatcgtgagataaccacacacactcggtcacagccgcagccttccggagtttccttggcagcagttgccaatcgcgccgtgggatctcgtcgaacggagcgggcggcgacggcgatgtcaagggaggcgacgaggacgaggagccgggtcctggtggtcggcgccaccggccgcctcggtggaagcatcgctcgggccagcctcgccgcgggccacctcaccttcgcgctcgtgcggccccaccacttcgcacgccccgactcccccttgctcgagccgctcgtagccgccggcgccactctgct

SEQ ID NO: 4527 - DNA, 8811 bp, Sorghum bicolor
ttatctggccacgcggccagttcatctcggcataactcaagccctaaagtccacctgtaattaaaacgacaaacatatttgaggtcgctctcacagcaaaatgattctatttatcagggcacagcagatttgtatcacaaaattaagctcctagcaagtttcattgagaaaggcaaactggtaacgaaattttgcgtagttccaacggccaatctttttgaactatgaagaggaggacagctgttccatttcaggcccaacaaaaacggaccttcaaccggaccgttattactcctcctgcacggtacacttcagttcacctggaaggaagtggggggcagcaagagcactagttttcgcttttccacgcgccgtttcaaccgatccaccggcccccggtggccacggcacgccgttcccggtgtgtaaaatcttcaacgggcccgagaagcacaatgcgcccgattgtcgcctcgcggcgcacggggaattgcggatttgcggccctggggaccacgaaattggcatgtctgcgtgctacagccaccagccgatggacggatttgtttgtagcaaatccttctattcttccacgctcatcaatgcactttgtttctgtgcgcgtacgctcttggctcggctgagccatcgatccagccaggatcacctaggcgttcatcagcaccgtagcgatgattggcatatccgtaggacggagaaaatactgtacattttcggctgcacgtacagaacttgtactactctttcacgtgacaacgagtcctttgaacagcaccccgaggtttaggggtttcagggccgtcgatttaggatccaacggtccggagatggtttttctgacgtctatgtaggagtaccgtgaaggccagggcccaggggtgaaacgatcggtcaggtaaagggaaggcatgtggccgatgaggaagaaaatgaccggacaccggagcgtggcagagggtggtgtgggaagggaagcaaggtcttgtttacttccaaaaaaatttacaaaatagaaatagtaacacttttgtttttatttaacaaatattatctaattatagactaactaggtttaaaagatttgtttcgttaatttcaactaaactgtgcaattagtttttattttcatctatatttaatatttcatgtatacgtctttaaaaattcgatgtgacaggaaatcaaggcccaagcaaaccatgcggcatcgcggttgcagaagatttagcattggatgctgcgtgcccccgcaccccgcgcatgcagatggctccaaccccccctttttttagtggcagacctgacctgacctcactgcatcgtagtttgtcaatgcaagcacaaacttgaaaaaaacagtcactagtgaaggaggtaacgaaaaagtcaagattcgattaacaaagttctcttttttcaaaaacagaaatgctatgctacggtaaaaagtgggggatcgtcacatgagcctatctgcgctgctcaaaagttggcgtggtatcgtgggcgctcgttgagcatttaacggtacggatgagatcccagggcagggaggccgttgcttactgcggctcgccctttctcctccgcgtttcatcacctgctcgctgttgctacttctatcttcctccaccatttattactccttgccttgccttgtttagttctaaaatttttttacaaaataattactgtagtttttttatatttgataaatattatcgaaatacaaactaaatagttttaaaaaattcgtcttataaattacagaaactgtataattaattatcttttttatatttaatattttatgtatgtatgtaagatttgacgtgacccacaattttaaaaattttgtaaaattacaagcgagagagagagagtagtcagacagttccaactccctttccacacgcacccaggccttcccttccatccctgtgccgcgccagctcccctgcagccactgctcactcctcagtcgtcacgcttgttttcacattcgttcctgcctgcctgcctgcctgctcctcgccctcaccggcagcagagtggtaaatcgtaagaagcccttgctttcctcacgattcgcttgctctctcccctccccggctatagtctcctcttctcgctcgcagatccatgtcgggcggccgctgactgttggcgtcgaagctgcaaaggtacttgtgcctctctctctctctctccctctaccctgccgacatttcgccaagagcttagtatctcagaaatgccggcgccgacgcgccatgccgttccagttcctgccgtgtgccgtcccagccccgagcttcatgttcccctcttctcctcctctccttcgcttgcgccgcccacagaaagtactagttgaagacacggcggaaacatgtagcttcctcttccggcgggattagcaatagctagcgccatcctgcttctcgcgacggcagccgtcggcgccggtgccgtaatcaaacgccggggaaagaaaggatgagagaaagcacagtgaatttatttttatatatttttttggttacctttagaacggataaataagagcagtcaattgaaagaatggtttgctctcgtaatgaatcagggtagtacgcgagtgtgctttgtctgaaaagaacagtcaaaattccggccttttccccgccgcaggtgctctggtttttactactactctaccaccacctcgccttttcaggtcatcgctttcccgcagcctgtgtttccttgggaaagcgaggacgaggaggcgaggccgcagccgcgcccagagtccccagaccaggccagccgtgccgcactagaccgaggagtaaccgaccgacgctagcagctgcagtcccacagcgcgcaaaagcccacacgtcgtcacgtcgtcttctcctccacagtccacgctcctgtccatcccggcagtccgcccagttcaaatttcaaacgcctccgccctgctcctgcacctgcacggccgccgccgcggcgccggcgctgcgtcctcatctccggcgaccaccttgcccctgatgctactactggtgctgtaggcgcggtacgtcaggatcgccggcccaccacgcgccgtaataataactcgcgtccgtccggacgagcttgcggattgctgctactgctaccactagtgggaagggtacgtccacattcgcctcgccttatcaggacactatcattagccgcatctaattgcaagattacctccagcctcctcgtccggcttctctttgatgctctaatcattagcgcccgaaaagccgcgctgtggagaccctggtgtttcgtgtgggctgggggtgtggtggcgcgtcgcggcagtaaattaaagctaggcttctttttctgcgggcggacgagcgggcggtcgccatgtacgccgccccgtgattattgcgagttgggagtaccggtggacactggtggggagagtagtgttgtgtttatctttgggagatcgcagcgcatttaatttttgcagcagttttgcggtctgacgaccggtctgctcctcattcaaatcctgatggtggggtttcgtcgtcttcattcatgtctttcagttactggttctagcacgggcgcggcgcggttgcggaggaggaggagggatcggcggagatgaggatgaagacgctggcgtgctgccggcggcggccgcaggacttcagcatcgacatggacaaagagcccgacagtaagcaaacttgcctgccagcccaagatctccctccccctctttcttcctgtgcattcagtatcagttcctttgtgttcagccagatttgggtttcttcttgagtatcctacaatgttggatctcttgtaccggatgtgtaccttcgattatgcagcttgtgttgtgttgccgatatgttcaccattttctagcattgctttatggtttggtagcaagagtacactatacttgttgagtttgtgagaggttgggccgtgcagcctgccccgtacctgcgatcccttgaatcttattagatttttattaatctagactagatcctgtcatcctaggatcaagcaaactttattcactgcctttttttttgaaaattttattcactagcttttcacctgcccaaaatcgcacacaagaagacgagaaaaagtgtacatacatagagaaaattaaaatttaaaaaagaaggggtagacaatagtagtagaggctagagagggacggcaacgtgggcgaggtcacggcagacatgactattcatcagaggtgtcccggcccgtccctacagactggccccccctccccttgcggcagcggctgcagcgccgcgccgtgcagtgggttgggaacgtgcggggtcacgggaagatcccggggggcgggggggggggcaccaaaggagcaacaggaacagccaacgagccacacggccttgtgcggccggcccggccgcaccatgttcgcattctgatgatacggagtagtagcttggtccttccgttgcacagccgtagtactagactccatgaaccaattttttttgtcagtctgatgggcattcgtttgacaatcgaatcctccttttgctacttttttccccctctaggttagaattcgttagcactaaccccttgtttagttggcaaaattttggttttttggctactgcactttcgtttttatttgacaaacattgtccaatcacggagtagctaggctcaaaagattcatctcacaaatttcagataaactgtgtaattagtttttatttttatctttatttaatgctccatgcatatgaccaaagattcgatgtgacagagaatcttgaaaatttttgcgaactaaacaaggcttaagcagtacttagcaggtttgtatacttatagtactacagctcaagcgtggtccccggctgttttctgcaatgtcaggtccggcatctacgctctcattgactttgtgcgcaaaagactagccggtacagacctagtggtacactgctttttagacactgcccagtggaaaggctcaacaaaagaattgggccatgccccgtcgttggaattactagctgttgcaggaatcttgcaaattctcaatggcattcgcatgccatgtgtgggctaggcaattgcaaaataaaacctaaaaaccctatgttgctatgatttcaaaataaactggctctggcctctgtgatctcacgagtagatatatggcactagatagtagctgcggcattgttctttctcaagtccttgcattttagtttcttttttttcctagttttttgtgcttagtacaaagcgaaatgttagtgaaactgaagtgtgtgtaggtcctgcaatcaacaaccggatgttgtagctctgcagtgaaatttcagatgaaaaaatggcacaagaacctgaacaacaagggttattattactatacctcaacttaccattagattttcttagtttttgattgatgttttatttgcagcgatttgctttcttagcaattgtgcatagtattttagtcattaatttgcccctctgttttggtggaagttggatgaataggcaggttcagtattgtacaagaggaagtatttctattacaggcattggtaaatacaagattcactacagcttataggaagttcacacaagcatgtgcaatggccttcttaattcttctgataatattctaatgacaccatggggaattaaaataaatgactggggcactacacaacaaaaaaattgtctagtgctagagtgctacacattgattaggacaatgctggtttatacactattgtttatgggacctcaaattaggtctctggatgatagctgtgatttgtaaacgggttgtcctgtaatctgttttcttctttccttttatttagcaatatcctgagtggaggcaagttggcatctgtttgacaacacatattgccaaattattttcctgaattaacatctttctatttcattatggcaaagataagttaaaatacatattgatgtaggggtgatgacatataatggcctcgagacctgcattatcaacagttccgcctatgacgatgatagtgccattagtgcaacaacaggcggagatggatgtgtcaccactgattcccttgatgatgaagtctctagttgctctagtaaagatgcttctggttcttccttctcttcacactgccttagcaagcaggatgagcattcactagatgagttgggtacacccatcgcaattcatctactccctttcaaagggaagaaaccaatcacatataccttgagcgcttcagatattgaaaacatgaaggaaaaatttgcaaagctattgctcggtgatgatacttcaggaggagctaggggcgtttgcgcggctctggccttgtccaatggcataatcaatctctctggtacacttctagaagcaatttattttgtgtatattgtagtgtccctgtgctccttgatcctgacagaaaaagggggacttaatgttacagcaactgtttttggagaactctggaagctggaaccattgtgcgaagataaaaagatcaggtggagaaaagaaatggactggttgctgtctcctacaacttatatggtggagttggttccaacgaagcaaagcggggcagatggatgcacatttgaggtaattagcctccaaatagaatgttcctcactttgccacaatctaacttagttattttttgactgaaccatgcagattatgactccaaaggcccgctcagatgttcatgtgaaccttcctgcccttcagaagcttgatgcgatgctcattgtatgttgacatttttcatctccactctgtggcatactctccaactctttgtggcatattttgtattagtaatggtgtatgcaacgaaaaatatgcaggaagtgatggactctatgatagatacagagttctggtatgaggagagtggtagcagagctgatggtcggggcaaaattacaggtccaaggaagagtaaaaagtggtggctcccatctcctcgtgtccctgaggaagggctatctcaatttcagcgaaaaaggcttgtttttcaggctaagcttgttcatcagatcctcaaagctgcaaaatccatcaacgaacaagtcctattccatatgcctattccggcagctgttatggatgcccttcctaaggcaagtatccactttaatttaatcatgtgttagtacacctttcggcggtcttgcagcaagctttgagcttccgtttgcctacaaaattagttagtgatagaatgagattctgatgcaatgcaaatactttgttctttgcagtctgggagagctagcttgggggaagatttgtatcaggctataaccacacagtatattcctatagaggaaatatttgtttcgctcagtttgaaaactgagcatagtgtgctcgagactattaaccggttggagggtgcagtgtttgcatggaaccaaagaattctagaggaaagaagcaagaggtccccaggacgccattcctggagcttcatgaaggatagctcatcagaacttgacaagatgtctgcatgcatcgaaagggttgacacacttgtgcagcttctgaaatccagatatccgaacctgcctccaacttttatagatgttttaaaggtccaatacaatgtggtaagttcgacattgcactgcaacatttctgataggcctaaattctaaaatgctgtaattcgaaactttggctgaagaatggctactggatgcaggacgtggggcatgcaattgtggaggcctactctagggttcttgttggggtagcattcagcatactgtcacgtgtagccgagatactgctggaggatgacttgatcaagaagcccaacacccccatggccacactgaagttcgacctctcctcggacgtgtacttggcaggtatcacagagacgccaccgggacacatccgacggtcccttatggaccagatcagcatggttgacgggcgctttgatgctgttgtcaagaagaaaggggtgaaacagctgaggtggtgaggccacagttagctgttgtgaatcttttggccatgtacagggtgatgcagggcccagtgtccgctccacaaggttaccttaccttagctatagtgcagtgtaatgtatttggcgacgagtttatagcgtactgtaagagcagcattaggtgaaaatcctgcctgtcgaagtgtccggatgttgctgttgcgtctgaacaatctgatgctcttgatcagcctctgctgcatttcttgctggcacctgatgatggcatgttgatgacgagaccttgcttgagtgcgtgcttgacgggttcgtgctgacgcgtcttccgttctggaagccgtccgcgttgttggggcgtgtgggcctgtggattattatgaatggcgggaccgtgtcaattctgaagtcagattcggagtcagtccggcgctaaagggagagtgtttcttccttcggttatggtcattcggcaaattctcctcgcttcgtagtcgaatcaccacgggcacgaactgcacgcaactcggcaatcgtcccagacttctggttgacgggtggctgccggctgccgcgcgcgtagttgggtcctcgctggagtcgcacgaagatggcatggcgcctctgtttccgcgatcaaacacgcgttggagtgttctactccaagggacggagttcaggaatcaagagtagtatagtaccatttctcattgacctgtgtatgcta

SEQ ID NO: 4528 - DNA, 5295 bp, Sorghum bicolor
ccttcaactttaagcatacgattccagacccaaaactgaaacctaagcatgcgatgctcgcggaaagccgttcactttagggtagggtagagggatagagtggaaatgcgaacaaagacaaacgaatcgtaggatagctactagctagcttctcaaatctacatgctgccccggccccaaagaagaatctttcaacctcaaggctcaagctgacctgcagtagtcccagacatgggagtgccattttctacgtacaattactctttcaatctctctaccgccttcaattcactggcacctaattgactccaattaagccgcctgtttttaaaaattccacgcctcggatccctttgtctgatcatgtacagggtacatcagtacaaggatcaattaatttatactattcatatttatattagggagcaggcacgactcattttgtagtggttcagatgagagctaacccctgtccatgtgacgtacaatcatgccgtgaagcacatcacagtctccagtagtcgcacacacgaaatgaacatcacggatccagcacggctgaagcagattaattccgtggcgtgctcttttctgatcaagctgccgtttgatcggaggtggtccgtgcatcatgatcagcgggactttgtaaccgtcggtgcaccgatcgatcgagctccgatagccagagatcacgctgacgcgcccacctaaacccgcgcgccggctcggctccggccgggccagccgatcgaggaaacggcaaggcgaaaaaaagcgagagtggcaaattgggcgagcggcgacgaacggagggcgggtggggcggcggtcacggccaagttggcgcccacgaatattcccgctcccgtccggggccacgcgacgcccaccggcaacatctccccgcgtccctctctcggccgttctcgcgcgccggaataattcccctccaccaatcctccatcggcaaaggccgtgcgcagctctcgctatcatcgtcgatccatcgatcagccattccatcgccatggcattggcatatccactgacgcgcatagtcccgatcgttctcgcgagccgttaataaaatcccgtcgcgttcgttcacctcggttggcaccggtatatgcagtcgacgagccgttcttgatcccgtgctcccggccggcggctccggtagccgcccgcctgcgcattgaccgccggccgccgggggtgggagtgggcacatggcggcatgccgcgcctacgcctacgcacgtacagtgcactgcacagaattcagaattggttgtcgaagcaaatctagcagcgatcagacagcttctctggcctacgaccggaagacacggcacgcacacatgccagctccgctcttgtcgggggccggcgtccacgtggcgcgccgccgcacatgccccttggcctgtcctgtcccgcctcccgcgccctccctcccttgtgtctgaaccccaaagagagaaagagagacggccggcgaatcgaacgcgcgtgagcgtgggtcgtcttcgcatgggcaccatctgacggccgcgggagcgcggtgccgacgactccgcttccgctcccgggcggcggcggtgtccacgcggcgcgccccggttgggccggcgtccttggcgtttgttagctctgttccggcacaaggctccccgagattccgcgcacacatgagtgagggtgaggtgagtacaggatgattatgatggcatggcgggcgatgccgatgccgatgcgctcctctctctctctctctctctctctctctctctctctctctctctctctctctctctagccgtctcctacatattcctcctctctctctctatctctgtctctccgcccagctttcgaacgcgacactcatcgcagcacattcccgtcaggccggaatccgcctcgggcttcgccgaaatcctacgctaccttctcctcctcgccccggccccgagcgcaccagattcacaccgcgccgtgcggcaggcagcttgcctctagctagccgcaagctgcagcggacgtgcgtgcgtgtgcctgcgcgagctgcttgctagctagttgcagctcgagctgctagctgtttctcgcgcggcgaaccaccagctgcgcggtgatcgacaagccggccccggccgcggggagatagctaggaggccgagggacatcacacaagcaggcaggccacgcgatcgatgagcatgttcgaggggatggagagggccgggtacggcggcgctgggccgatgggcggggtggtgctgtcgcgggaccccaagccgcggctgcggtggacgcccgacctgcacgagcgcttcgtcgaggccgtcaccaagctcggcgggcccgacagtgagtacccgcactccctctactgcttgcctgctctcttcttgtactactgctaccatgccatgccatgcaccatcagttcgacacagcccaaagctcccatcaggtcgttgcaacagtaaaagcttaacagcagcatgcatgctccagcttcgaacccatctgctctcgttgattggagcatgcgcaaagattccaaaaacacttgatcatctaactgcatctatactacatggtgaccatgtatagtgttccgccgattgctagcttcactgataatgtttttttactgatcatgtactatattagatcctttttttggatcctggttgtgatcctgttttggggtttctgaatctgacatcgttttctacttgattatgctgcgcgcgacaacagaggcgacgcccaagtcagtgctgaggctgatgggaatgaaagggctcactttgtaccacttgaagagtcacctccaggtaccaccacctagtacttcgatctcttctctccaaattcatgtgtagataaacaaatgttgtccatgtatcgctttctccggtgatgtctcgtccttgttgtcttgttggtgacgatgatcgatgtcttgtgcgcagaaatacaggcttggaaagcagagcaagaaagacacaggtttggaagccagcagagggggtatgtaccttgcaaatacgaatactaatacaaactgctaaaattgagcaaggataacataaagattcttttccaaatcttacattttctttttgctctctatcctcacagcattcgcggcgcagggcatcaatttctccacaccagtacctcctagcattccatctacggccagtaacaatacggggtgagtagtgggtgtcaaaatccaatcctgcatgcttcctttagaagcagtacatagattcatgcgtgtctgcttaacagcgtcgccatgttgtctgaagaacaagcatttgccttcagtagtaacaatctagttaactcgattctgttgcatcagtgaaagtgtgaaactaaaaggctggtgtcaaaaggactgatgaacatgaaaagtaggagtacaattgaacgaaatagcagcagcagatcgtgctattttttgttgaaaaaaaagctatgtagatcatactatcggtaatttagatacttgtggtcaattcttataaaagataaatgccttccaaattcctaaacaagacgtgcttgtttaatttaaactatactggtcggctaatgattgagaagtcggagtcattcgaaagggagacgttgacctcgcagaaaaaaaagggacgttgatgtgacaagggaatatttgagtttatcaaagcctgctggagttccggcgttgattagttgattgataagttgcataagcagtttttataatgttataaaaaacaatctagaaagagcggctagtgaagtgatataagttaaatgctggattaggattccagaatcggcctatttcggtatttctgttacccaactgaagctatgtgatgtttgaactacctctttttaggaaaaaaaaaaagaactgtttccaaatggtttcaatttgtgtggatttacatcattcttcatctcggttatgattctcctatttccggttgccttatcaattcctgaacatgcatcagagaaacgccacttgcggatgcgctgaagtaccaaattgaagtccaaaggaaactgcacgaacagctcgaggttagactagactaccctcaaaccttctctgccactgcaactactgcagtcacgaatacaagattttgacctcttgatttgttttccacatgcaggttcagaagaagctgcaaatgcggatcgaggcgcaaggcaaatatctgcagacgatactcgagaaagcccagagcaacctctcctacgacgcaaccggaggcgcaaatctagaagcaaccaggtcacagctgacggacttcaacctcgcgctctcagggttcatggacaacgtgacccaagtgtgcgagcagaaaaatggcgagctggcgaaagccatgtccgaggacggcctcagagcgagcaataatcttggatttcagctgtaccaccatggagttcaggacagggacgatgtcaagtgcgcgacggatgaagggctgctgctgctggacctgaacattagaggagggtacgatcaccgggcttcggcggatctgaagatgaatcagcacatgaggtaaaacagttcagtagaaaggcgacggctatagtttaacctaagggttgcccttgtgtttgtgagaaattctttcggccatcctggtccctgaggatgctttgtttacggtgatggccagcatattgctaatgtaaaatttggtgagaggctccgaataagcgtagctaatcttatacaagatctttatacttctatttcaggcatctatacaacagtgttaaaatgagccatacgtcgttgaaatggtctaaaaattacaatatgaatccaaaaaaatgtaacctaagaaaaaaatgtgttaggacggccagtgttataacaaaatcaaataaagtatattggattttgattttttagataatggatataaaaatccgacctcggagcctctatattggcttttgataacttagtgcaacccattcattctccaatgtttatgcgtgcgatactgacaagaggtacaaatcttttttttcttaatgaagatggtcacaaacaaaaatcacagcatggtcgatataaaggtagacttgcagcatggcaacatggcaactatgaatttactagagaagaagagaagataaaaaatgattagaaaatttaaattgataacaggaataaggaaccgaacaatttgtaggtgacttggatagcaccaagagaaatttggtccacctttgatttagcct

SEQ ID NO: 4529 - DNA, 5397 bp, Sorghum bicolor
ttaccttcttgaaatcttctaaacaatgcactacaagtccaatagttgaaaagggtatgtttaaatctcaaagacataagcaaaacttcattctttagatacatattgtttcttcaggttggtataaacaaagtcggcagattcaatctagcatttgcatcctgccaatagtacgaaaaactgaaagtaaagagaagagaacagtaccaagattattttgacagaccagatagcaaacacgctgttcagaaactagttgctgaaaaccatccttgtgaagtagtttgagtgtgctgctagtaatatatatacaacgtcatggtaaaaggcaaaatgtaattggcatgtggccagtaccgcagtagtacggaaatttggttgccacgtaaaattgatgaacagataacagaatatgtttatatcaacaccaatcatttcctaaaagtttctcttgaacattcttagaagaggtcaaagtgaagggctatcagatttcagatcatcatcatcattaagaatggccatgagaaagatggaaaactcacactctttgaacttggcatctttgctgttattcatgccataggaagttgggaaatgcaagtcatgccttctccgttcctccgtattttacggacattatgctgtagtgtgctttcagaaactaaaaggacaagtccaactacctgaaacactggacagttgcaaagggagtcataaccttgcatcactgcatagaacctaataatcatgtcatgcttgcatttctttgtactttgtaaacttcgatccagtatacagtagttatgcggttgacatttctggagttcttattatttcccatacaatatatgtgctaggcagagactgtctaaacgaggactctctgaatatatgtttcaggaacataccgtgtcctttttcaattttgactgcaaatgaacacctcatccaacagaagggtcaagagaaacaccctgcagcccatctcaaatccatcttcaagagggagggaacacctatgagaaaacaacagagtgatggagctcaactgccaaggctcgtctgcgcttagctttgtgactttggtgatggatcttatggccatccttgaatttgttcatggcagcattcatgacagcctgttctaaccatgtggtatggggttcatatgtttttctggagctgtaaatgcttggcaatgaatacgtaactacaattggtttactaaactagcattctgatcgttttgcagagctgtattacagtggcaaattcaattagcaataggaggcaaattgagctggaagttgaaaaacagtgaaattcgaaagttttagtattaaacttcgaattggggaggtgattccaacgggaggtaggttgaattaatcgcctctgaagggtgccaactcttctgatggataccggtgaagtaaactgaaagattaatcgcctctgactctgaatgccaatgccaagtcttgtgatggatatccaggtgaagtaaaccggaaacatggatggtctggtacttcgagttaaacacgttttgatatttgttttgtacgtagtacttttgtctgcggcttcaggatatgagccaacaccggttctcttttccttttttttttttgttttgacaacaccgattccgtgcttgaaagttggacttggatacgccatcctgtccttatcactactccttacaggggaatcgaaaaaaaaaagaagagatggcaatacgagcatggctggaaacctcgacacaagtcacagcgtggtaataaaataacacacgtataatgccccgggcaaatccattcagtctcgtacaaggaaggtgttatttgccgaaatgactgacgcaatgacgctgccgtacagcaagcatgtctcaactcctccaatcaagatccaacaacaacatcgagacttctcaaaaaaaaaaaaaaacgagaccctaggaacgcacggtcgggccgaaacgcggagaccctaacgggctggaccggagccgtccacgccgccacgagcccacgagggtagagcctcgcaccagccagccctagagcccgcaacggctattttctcctaccctgccctccggcggcggctcggcgtactagccgttggccgtggccgtgtggtgcggcgggcgttcccctcttccctcctcctcttcctcctacaaataatctttcgtggccgatccctaaaccccacaaagcaaagcatcaattctctctccttcgcgcattctcctcgcctccccacgacgatctcaagccgctcgccggggagtcgagacacgcgcacttctcgcctcgttcataagctcgtctctttgttctttccgctgttaatcttcttgtttgattattttctgtgcttgattctaacctgctattattttagttcgcgtttaattccatcgctactgctgttgttatttctctgttgtgcttgccctgttcttttgtttgctctctaaccatggacgcaggatcccactcgatctcctcggagaagagccgcgccgccgccgcgccccggccgccgctgcaggaggcggtctcccgcccctacatgccatcgctgggctcgggatgccgtaacccgtcggccaagtgctacgtgagtccctttctcttgctactggatcgagtaaggtgggtgttcgatggtttgcctgaccaccaagtttggctggttctcctcctgtttgtgttctgcagggcgacagattcatcccggacagatcggcgatggacatggacatggcacacttcctgctcactgagcccaggaaggacaaggagaacgcggcggcgtccccgtccaaggaggcgtaccggaggctgctcgcggagaagctgctcaacaaccggacacggatcctcgccttcaggaacaagccgccggagcccgagaacgtatctttcgccgatgcggcttcctccaacctgcaggccaagcctgctaagcagcggcgccacattccccaggtatgcgcaatagatcttctgattcggcttctatccatcttatgcaacgggttgtagtggcatgggagaatggtggatcactgatgcggttgaatcaaaatgtgcagtctgccgagaggaccctagacgccccagagcttgttgatgactactacctcaacctgcttgactgggggagcaacaatgtgctgtccattgctctgggagacacactgtacctgtgggatgcgtcgagtggatccacatccgagcttgtgaccatcgatgaggacagcggtcctattaccagtgttagctgggctcctgatggtcggcacatcgccgtggggctcaactcgtccgacgtccagctttgggacaccagctccaaccgactggtacgtaacagtgtcctgcttcatccaaaaactgcaatgcatgttcactgttgctgaattaaatcgttttttctatgcagttgagaacactcagaggtgtgcatgaggcaagggtaggttcactggcatggaacaacagcatcctaaccaccggtggcatggatggcaagattgtgaacaatgacgtgaggattagagaccacgttgtgcagacttacgaggggcacagccaggaggtgtgcgggctcaagtggtctggatcagggcagcagctggccagcggaggcaacgacaaccttctgcacatttgggatgtgtcgatggcatcatccatgccatctgctggccgcaaccagtggctacataggctcgaggaccacacggccgccgtgaaggcactcgcgtggtgcccgttccagagcaacttgcttgccactggcggtggtggcagcgatcgttgcatcaagttctggaacacacacactggtgcgtgcctgaactcagttgacaccggatcacaggtgtgcgctcttctctggaacaagaatgagagggagctgctgagttcacatggattcacacagaaccaactgactttgtggaagtacccatcgatggtgaagatggctgaacttactggccatacctctcgtgtccttttcatggctcaggtgaatttttcgcaccagttaacaaatacttatctgcatctgtgccatggaactatctgcatttgagtacatgctagtgtgaacattgcttatataattctttcgtggtgaaactgcagagtcctgatggatgcacagtagcgtcagctgctgcagatgagaccctccggttctggaacgtttttggagcccctgaagcgcccaagcctgctgccaaagcttcccacactgggatgttcaacagcttcaaccatatccgataggatgagtcatgaggatagtctctttctaaagcagatgatatctgcctaccatcgctaagcaggtggcatgagggagcactgcaatcctaatgcatcattttttggtatgctcattgctcaatttctcagtacaagcacaatctcttggtgatcttggagtgggaactgaattgacacatgctctttccgttggtagctttcaggagggtcagaaatcaatgacagttcgcttcgtagacgtcgtcttcatcaagtagatatctgcaatgatactggaaccagaacctcgaaatgcagagtcttagagattgaattgcagagtcggtgacttcaggaatcagaagaaaaagatgtatacccctagcctcagaggttgatagcaaatttgttacttgtcctgtgttgtgtatgctgatcattaacagtaacactctgtacaaagtataatgttttcctcctctttattgaacatcaatagcgcctatttgatgtgccaattattgttaatcaagacagcgattcttttttgcaatttttaatggaatatttgtcggttgtaaatcaagacaaccattatttttgcaaattataatttgccattttggttgcaacatcaagagaacctgtgtcagataatggaataccatgtcatttctcattaaagtttcgtttatgaacactttcaatagactgaaaagattaaaaccaatttccatactccaaaagtatagaatgtagagaattgcggcttccttccagaatgttccatggtggcttggaagaagtcatgctttcgatggtgaagatggctgaacttactggccctctcgtgtccttttcatggctcaggtgaatttttcacaccagttaacatgccctctcgttatctgcatggtgaaactgtgccgagtcctgatggatgcacagtcgcgtcagctgttactggaacgtttttggagcccctggaaagcccaagcctgcagccaaagcttcccacactgggatgttcaacagcttcgaccatatccgataggatgagccatgaggatagtctcttctattggatatggtcccagtg

SEQ ID NO: 4530 - DNA, 5691 bp, Sorghum bicolor
cgagttatgctgataaatcatcatctgaacctccaagttctactccattaagtgatcccatcaacaataaggttagcatagtacggccatctatgagaaaggaaagattgtttacaatcattttgtagctgttgttcttgcacaattcagtgtctacatccacttctctgttacctctcttttttctcgtggaattgtgacgtattccgaagggagaaaataacatgaatcctcattgtttccgcaatgtgctcctgtaggtgcatttgctcagaaccatgcttcagtgggaggagcaagttcgccgtggtgcatctttggcagagaaaagtcttggtgtaaacacctgcacaaaaccaatcctgcgagaggtggccataatattctggcctaatggcaagattatgagaatgagcactggtagcacagctgctgacgctgctagaagaatgggcgttgaagggaagctgctttgggttaatggccaagtagttctgccccaaacagagctcaaggatggggatatagttgaagtgagggtatagatgcaagtaccagtttccagtacacctttctcaggggttattgatcatattggttcctcagttcttgccagatcttggcaatgcaacagactgaaggattgtagacataggaacccaaatctcaactgtacagtccatttgtcgaaatgaatcgaagaaagaaggattaggtgcagtaagtgttgtgtcatcatacaagagtttactgtgtacataagcaactgcaagtataagctgtctgtccagctgtgcttctctttatccatagttacagtggtaatgtaaatttctgtaagtaaatctgtagttgtctttagttagggatccacatttcagtaggactgcaacgtgtttgagcctgttcggtcatggttgaaagtactgttcgctgatttattgtgagaaaaaataatgctagctgacagaaaaatacgacttataagacaagcaacgtaagggcgagatgcgggcttcttctttttctctctcttcttttttttgatatatgtccaaagtagatatctcatattccctaaaaaaaaaggtgtcgatgcccccaaaaatttggcaagccgtcgctagaaaattcatggaggatatgccaaaacatttgcaactagttttggagagatgactgtccttttttctggtgaattggggagatgactatcaatcagcaagttaaataactctacgatgctggttaatggtatcggtgcgctgattttacacggcaaaaaaagaagaaggaaaacacaaagaaacgatcaatattttgactgatttcttgtttacactatcttcgtaaaaaaaaaaagttaaggctaagcggggcaacacaaatatcgaaacgatcaatattttgactgatttcttgttcacacctatcttcgtcaagttaaacggatcgacggtatggaaggtgattacctgttcacacctaaacgtggtaaccattttccaaaccaagcaacaaaatatcgaaacgatacggaacgcaattaaaagaggaaagcttgaaaacaccctgtcacgcaccctcaattaaactccttccggatttcgactattcgtactcgttaatcactcccgggccccacatgcagcgacactcgcacaccgaagctaatcaacggaggaggagccgtggacggcgtgtatactcgtgagtcacccccggacccacctgcagtgactaagcgccatcgaacagcttcgcgaagccgcctccatgaaccgagctgacagctgagcagcgttcaaactttcaaacttccaaacgagaggggaaaaccctagacgagccccccttgcaacggtcggatccatttcctatataataatccctccgccgcctccctcctccgcatcccatctctgctctttattcgccgtccacagatccaccgcgcccacgccatcgcatcaggagaaggtaagcagacgaggggggagatggaggcggcgacggccatggatttccactcgctctcgcgccgtgagctccaggcgctgtgcaagcgcaacggcgtccgcgccaacatgaccaactccgccatggccgatgcgctccagggcctagattcggtgagttctcgatcccactcgtgtgcgttcgtgaagcgttctcgattccattcgtgttcgttcgtgaagcgttctcgattccgctcgtctgcgttcgtgaggcctattaggtttggaaatggtagttgatgttgggggttttgattgtcgatcaggtcgacgggatcgatgagatcggcacgactctctgtctcccgactccaggaaggtcggcgatgaagtcggcggcgaagatggtggccgtcgaggagcagcagcacggtagcccgctcccccgcggccgccgcgtgtcagtgaaatcacccgaggccatccggatggaggttgaaggaggagaggacgaggtgaaggagatcgtgaaaactcccggcgtcgctctgcgcagcacacgccgcggcactcgggcaacgcccgcaccgcttcctactccggtggcggcgtgcagtacgcgcgcaacagcgaggaggaccgccgctcgtaagacgggcgaggtggtgccgaccccagccacccggaggagccagaggacggcgtctcgcaaggccgcggaggcagtggaggcggaccgacccgccgatgatgtacccgaggaaaagatatcgaagatgacgatagctttggatcaggaagcagaggtcgtggcggccgcatcaaaggaggagaaggtgcataacgacgaaccgaaaggtgagacgatttcatttcccagatcgacttgcactctgtcttcctgaaagtttcagagttccttgtttgctctgtaattcgaaatttacggttaagtattgttcctaagcagtcattgatcttatttcttgaattgaatgtgcagctgattcctgtgatgaaactacagtgtctgcagctgttttggttaagagctgcaatgatcctaaggtggaggaagtggtggttgtcatggaggaacagtccgcaaagccccacgaaggtgagaggcattccgaagtactgttgtttgtaccttgaattgttgtctgcagttattgagattctgacaatgtcgtcttgaaatttatccatatgatatttgtttgcatactcgagaccaaccattagtttcttgatctatctgtagttgttgtcttgttgaggctctgaaccaggacattttaaaatcaacccatttgttctttgtctgcatgcttaatctggccataagttccttgatctatagctagctaaaatttagcaaggggaaccaaacagggccttaattgttgttttttttcagtcgttattttgctgagtttctgaactgtgtgctcgttgaacctttttttactatttgtgtattctgattctggagcgtcactgtcaggaattgtgaaagagctggaacctatcagtgttgagacatctgctcttttgacagtcatggatgattcaccaatcttaggtgttgttgagaaggaacagggtgcctcggttgaagattgtgaggacttggctgaatcacctgcaagggagatcattcctgttactgaagataaggacttggctgaatcacctgcaagggagatgactgatgagatcattcctgttactgaagataaggaagtggccatcagtgaggaggttgttactgaagataatggagtggccatcagtgtggaggctactgaatataaggaagtggccatcatagaggaagtggcaatcaatgaggaggccgtcaaggaagatggttttgctaacactgttgagactgattctaccccagaggagattctgactgctgcgggagaagatgagaccattgaggaaggtgaagaagataagaccattgaggaaggtgaagtcatacttactgaaggcaaagaaagtgctgctgaagagatgttacaggctggtgagaccagtgaagaagatgaggaagaatacctcactgaattgaaacaaggggctgctgatgaggtgctgcaggctgagctggcagacagtgaaacaagtgaagaagatgaagatgacctgagtgaagagagagaaggagctgctgctaagatgctgcagggtgaaatgacagaagatgagatcagtgaagaagatggtctcgatgaggatgaggaatggtcttcagatgatgatgagaacactgaggaaattggctctactgacgagagcgatgaagatactgatgagagcagtgaagtccaaatgttgcagggaactgggataactgaagaggccaacgaagatgcctctactgaagatgatgatttcagtggtgacctaccaccagaatttgacaatatcatgatattcagtgatgctgaaactgagagtgacattgctcctccagtgctcgaggaaaaccaggctgctgttgcatctgcaaccaaaactgcaaagtctctggatgattctgccatgagttcagagcaggagggtcctgaggttgacaacattgtgaagtccctggatgagttcaccttcaaggagggagaatcagaggagatgcagaaggagcagccgcaggattataacagcatgagcctaaggaagcttaaaagcacgtacaagaaatgtcttattgctcaaaaggtataaaactaatcggctcatactatgtgcactcatttagcattgtcgttagtggctcttttctttactcattgtttttttttaatctgtagcaggaaggaaagcaggaggaggtcaccgaagggaagaggcttcctctcgaggaggtggatgagaacgcctgcatcaaccactgaacagaacaagcaggcgacaggtcacaacattttcgtgtgatggcatctgctacaacgggattgaatcgaggaatgctgtggttgtgaaatgataactaggctaccttattgttcatttccaaaagttttcgtgtgtgtgtggagagattgggatcagggctgaaaccgtggtttcagccaacaaacttgcagttcctgttgctttgcctttttttttctttattatatatcagttacagaacatggattatccagtggtatggtgatgaatgatgctatgtttcgcttataataataatatgtatatgaaggagagtgccccaatttttgtccatgtttaactatcacactttaaatttgaattcagggttcagagcaagaaaggattatctatcaatttatgaagctcactgatgatgtattaaatgtaaatgcttatttatttattttctatccggtgatccccaatattaactacattagacactaggttctactatatacgctagtataacatgagtagcccctgaactgttctcactttgtatgatcgcagagtttcatcgacttttcttgtcacactcccacttttttgtcttgtctgctaattccttctttattttctgtaatttcaagagttgcatgtcagtcctcagctcatctttgtcagatcaaattatacaagactgtagaacctgagaggatatccgaagaaaatagctgtgatgtaaccaaccaatgctcctactgacggcttgcttcataaattatcatcgaaataagaaatgaggtacaaaatcttccaaaagaaagggtgccat

SEQ ID NO: 4531 - DNA, 8521 bp, Sorghum bicolor
  misc_feature (4415)..(4799): n is a, c, g, or t
ctactgtacagtttggtcgccctcagtccttttttgttggcgacgcacacggacacattgatgaactggcagtaaatggagacgtcctgagcaaagcagcagtaccacaccggggtacatggccttgttatgaaaaagtttttgaattttagaacggtagtatttttgtttttatttaacaaacattatctaattatagaatatctacacttaaaaaattcgtctcgtgatttacaggtaaactgtgcaattagttattctttttatctatatttagtacttcatgcatgtgccacaagattcgatgtgacgggaaatcttgtaaaattttgggtttttaggtgtatctaaacaaggccatagattcatgaaggatgttcggtgcaattacggagggctcacggccagggccagcggccacacttcactctacaactcggcgaaaccgcatcaggacagcaaagcctccgtccgcccgagacggcatctggcatcgtttgcgggcagcggaaccaccgtgcaggcccgggcgggggcagcgcctgcctgcgctgcgcacgtgctgcgtcctcgcctgctcggctgctgctatcattatcagccactgctgggtctgggtcaaggccatcatccatcatttgctctcccagaagaagaattcctaccgtttggctgcaaaactgcttgcctacagctgttactaccccgtagctaagatataggtggctgtaagttatctaaatgctgaggtggagaagagaagaaagaagaaagaggagaagcagaccgtaagcttacagccagcttagacacaggaaccaaaaaactttgtgagagaaatatatggaccatgtattaatagtgaatagctaactattgtatggatgagctgtaagaaggctttaaggaaccttacaaccaacaattgagttatattattaaacttgctctaaggccttgtttagttcacccaaaacaaaaaacttctcaagattcctgtcacattgaattttgcggcactaaatataaacgaaaacaacctgtaaatcgcgaaataaatcttttaagtctagttaatacatgattagacaatatttatcaaataaaaacaaaaatgctacaaaccaaaaattttttgccgaactaaacaagtcctttgtcaaatgttccagagccatgcccgatttatgcagaattcacgttcccgaaccaccacaggacaagcaaaatgcacagtcatatgagtagggtggatgactttgcacgtccatggccgctcttctgattgaatgctgtgcgatgttaatgcagtactatagatcatccaggtgtatgcaggatcttccgctgattaagggcagcagcagcagagtactgtcagatggatgctcgcgaagaggacgccgagggccggttttctcggggcgtttgcaaacttcgacaaatcctgacatgaaatccaacacttcagaaacgcctcgtacagcaatgagagctaatggccaagaggtcgctcgtaccgtacccactacagtctacaaggatgctgtaatgctatgttgaaaaaaaaaactactggtactagagggtgggaaccgcagttgtgcacctgtgcttctgccgcgcacggagatgtcctctgtctgcgtgtgctgcgtgcatgtgaacccaggcgtgactgcatcccctctgaaggctctgatcctccctcctctttaagcgcgcatagctagaaaccgctgccgtttcccgttcaggctcccttgaatcgcccagctcgcctcagcacaccaccgtcctcaagctctaccctcctcctctctttacctcctgctcgctttcattctttccttgcagcgctctttccgtcacttcactgccatcttttgctccatccccactgttgatcaaaggaggtttggacttggacttcgctcaagcctcaaggtgctgccggcctttccgtccgcttaatcttttgtagctgtagctaccctgcaatggccgggggcttggagtggaggagctctgcagccacaaccagaggagtcgagcaggtatgcagctgttcttcttgcgcatacttccggacaattgtggtgcctcgagcagatctctacgcataagatacgctccgcagttttcatccttctgttgtccctcttctcttctgcagcttcttgtagtttcatttcatcgctgcaagccattcattcaatcacaaggatctgttctttcttcctgacctgtacatctcctttcccggggggagccaataaataccctgcaatttgttcagaaaacaaagcataaatgcattagacagcaccatcatgatttcttataaaagagaatcctgaatgcaaacatggagtttccttttgtgcaacttccagtatattttcttgcctgtgtccttttgcttaaattgttttcgtactatgtacaagacaatatcaatgctaggaaagatgcatcttagatgaataccactttgtggttgacagcttgttccttcctataggccattattactctcaagaaaggttcacatctcctgaaatgtgggaagagagggaaacccaaattctgtactgtcaggctatcttatgtaagtagtttggctatatgtttacacgtttttcttccatttgcttcatatttttctttcaatgaaacattgtgctatacaaccttgcattcacgtgtctattgttctgttaatatttgtcccggtgttttattggcaaactggaccaataggcttctgaagtccactacctgactgccaacatcttctaacactgttgtggtggaacaataggacataggattgatctcagcaacactgatcttttagaactattaacacgagattccatctaatgttgcttacagtgtagctttggtagtcgtttctcttaatgctcagctatgttgggtcatgaactgttttcatgtaattacatgaagtagaactttgttggtgatctgtgagatgtgtcttgcaaatccatgtgaagtttaaaacaagtctatatttagggaaatgagactaagaaaaatttccattctcaatttgtcaaccatctcatttgttatcaatgaccagaacctcttcggtgtattttgcttgactttccactgatcatttgtagctatccttgttttcttactgttgacaaaaaaacaaagcatatgctacagttttgttggtaactttgaaatggacatgctccaattatttctccaacaattattcaggtatatatcaaccaaataagcacatcatggctctatcactgtcccaataatatattttctagcgaaaactgactggaggccggagctctgccttctcatttaagctaggaaaaaacaaatagaaactagacctacataaaaaagcaggaaaactgaacctagtgtggcaatgataacaggccaaagctatattcttatattactgttcctccttgtccggctgaacaatatccaaaccaagcttagtttgtttgtttttttttacgagagttttggttttattagacttcagaagcttgctatagattgaccaacttgaataaactgaacatcttcaatctatatacttacataccatatttggctctcttacctatttgacaattttctatttgcaggatgagagagcactaatatggtactccaaagagagggaaaaacgtttaagcttgaattcagtgtccagtgtagttcttggacagaagactgtatgcgacattccctttccaaatatatgctattagcccttggccccttactagtaacacattatggttggaagacactgattttctaataattcaatattttgcagacaaaacttttgcgtctgcattggccagaaaaggaatctcactccttgtcagttatatacaagaacggcgaatcctcgctagatttggtatgcagtagtccacattgtttaaattttgtaatctctttactaaattaacttacacaaccttttatttggggatcatgttaacccaggtttgcaaagatagagatcaagctgaatgttggtatttaggccttacagccctaatatcagtgtcatgcaccccattacttctggttaactcaacaaacagccgtcggataaacagctgcacgaatagccctcctagctatattcagcaaaggaataggcttttcgctgtgcatgatggaagaaatttcacaaaggttcattctggaattcaagcatttcctgaattttatgcagaaacatgatagcattgtctaagtgagagtttgacattgctcgtgaaatttcttacatcacactaagtagcctgttttgaattccatgcttgagaaaaaaggagcgtaccagcttagtttcggaaaaatcgggtagtgcttttttnnnnnnnnnnnnnnnnnnnnnnnnnnnnnnnnnnnnnnnnnnnnnnnnnnnnnnnnnnnnnnnnnnnnnnnnnnnnnnnnnnnnnnnnnnnnnnnnnnnnnnnnnnnnnnnnnnnnnnnnnnnnnnnnnnnnnnnnnnnnnnnnnnnnnnnnnnnnnnnnnnnnnnnnnnnnnnnnnnnnnnnnnnnnnnnnnnnnnnnnnnnnnnnnnnnnnnnnnnnnnnnnnnnnnnnnnnnnnnnnnnnnnnnnnnnnnnnnnnnnnnnnnnnnnnnnnnnnnnnnnnnnnnnnnnnnnnnnnnnnnnnnnnnnnnnnnnnnnnnnnnnnnnnnnnnnnnnnnnnnnnnnnnnnnnnnnnnnnnnnnnnnnnnnnnnnnnnnnnnnnnnnnggtacctagcccctggcgcaagacggcagtgcagcgccgccgtccacttcaccggtacgtgtccatatgtgccacaagcctttaaactacatatactttgaggggcaacatttttagttaagtactatgccatgattggtgactgtaaatagccatcacaactgtcatatgttccaattgcatcatgcttttacttgtactgttcaaatgataatttctccaatcatttgttcatgaaggtacattcgctatatggcagtcctaggttgatacagaacaagtacttgcacagtaatttggattgttccgaaccattcttttctccaagacagaaagcatggtcagaactagattcctacttggaaaagattagtcccgaattggtaaatcgagtaaaaaataatttgagagacataagatctgctgaaacaattaaggaccaaagaattattcaaatgcctaaactcaaacaatctgagggatcaaatgcagcaacagattctctgaaggacatttttgtctggggtgatgttctgggtcgtatgtcagatcatggacatgtaccagcaaccaatatatcacttccaaggttattgaaatcatcgcagattcttaatgtgcagagcattgcttgtggagagaaacatgcggcaatagttactaagcagggtcaggtattctcttggggtgaggaaaatggagggagattgggacacaaaacaagtgacagtgtctctgatcctaagatcattgactctcttgcctccacacctgtgaagactattgcatttggggcaaagtacacctgtgcagtttcagtttcaggagaactttatgaatggggtgaagggattcatagcctagggttcgggaagaatcagtgtcaaagaagcccatggttcccacataaattgatcagtacttcagatggcatatctgtgttgaagattgcatgtggtcaatggcacacagctataatatcctccctaggtaagctgtacacatatggatatgggacatttggtgttcttggacatggtgacacacatagtgttgttcatccaaaagaagtggagtccttgagagggtcaagagccaagtctgtcgcatgtggaccatggcacactgctgctattgtggaaacatcaggaacactcaagagcagtgctcctggtgggaagctattcacatggggtgacgcaggtggagggaagctgggccacactaacaaaaagtcgaagcttgtaccaactcgcgttgaatcactcattgattgtgattttactcaggtatcctgcggtatgtcactaacagctgtgctaaccataacaggtgttgtatttaccattggaagcaaggaacatggtcaattagggaattctcggtctgacaacacatctatttgtatggttgaagggccactcaagactgagtttgtcaaagatatatcctgcggcagttcccatgtcgcagtcttgacaatgaatggaaaagtgtttacctggggcaaaggcacagaagggcaacttggtttaggggattatgttgacaggagctccccaactctggtggaggccctggaagacaaacaggtggacagtatagcatgttcttccaattttactgctgtaacttgtgtgcacagggaaatctcaagcaaggatcaatctgtgtgcagcagttgcaggttggcatttcggttcacaaggaagaagcataattgctacaactgtggttccatgttctgcaattcctgcagcagcaacaaggttcaaagggctgcccttgcaccagataagagcaaaaggtgtcgtgtttgtgatgcttgtttcaacgagctgaataaaacagctcagcacggcaaaatgagttgtggatcaaagacccaaaaagaagaatcgtctttaacagaaacaagaacatatacaccaaaattatcacgaatgcttaaggaagcaaatttcatcatggaaaaaatgggttctgcacaaagtcccaaccagagaaatcaggaatcagccactctgaatcaaatgcaaagacagaggtggggacaggtagaatgccctgatcaattcaaatgtgcaagagacaacattccacattggttgacatcaaagaagcagacaattgatgttctgtgtatagggagaatgactgatccagtctcacaaaagactactgcccctttgccacaagctactaatgatagaaggaaagaacaagatttgatggaaaaaatactgctggaggaggtgaaacagcttcaagcacaggtaatctctataacttattgttttctatttaggacccatataataattcttctatggaattattttgtttcttcattctgtgtttcaaatcattgatttgctgaacagatggtgatcttgctattacctaagcaggtaaccactctagcagaagaatgccggcataggagcctgaaagttcagttgtataaacgaaaacttgaggaaacttggttgatagtgaaggatgaggccacaaagtgcaaagctgcaaaggagattataaagattttaacaaatcaggtacaagtctgactaataacaaattcgaatattttataacttttctgtccgatgtcaaataagttcatcttctgcaaacttgtgcagaggaatgctttatcaaataaacttcttgatgatctagaactagatgattccagtatcgtgcccgacccacccgacaaaactcatgtcactggcaaaattccaccactaaacagcatcagggatcaacacaacaacaacatagaggaagtggatatgcaatctacaacatcttctaacactgctgtggtggataactcagctgtgcatcagaatggcagaagagcctccaatagcagcacagggtggtatgatgggggaacagatagcacaattgctcctactgactccaatggagtgatcgagcaaattgagcgtggggtgtacattacagtcgttacatcccccagtggtaataagggaatcaagcgcatccggttcaggtgaactcctgaaagcctctgtaatacttttctgtcgtcagagttggcttaaaaattgaataaattttatgataacttgctcgtgttgatctcacagccggaagcattttggggaggctgaggcacagaaatggtgggaagacaatgagagcaaggtatttgcaaagtacaacagcatggaatacttggcagtataatctcgataaggaaaatgtacatgagtagccaatgccttgtcagtgtgtgtagaacatgtacactgcaacaccatattgttcaagtgtagtcgtaggatagatgagatagaaggaatcatgaatagtttcctttccttgcaagcagataaactgcatcctcggctcaataacaattcaactctacacgaactggggattgagtttgacaggaacggggtggagcctgtgattcggattcgcgacgcggcgacgcaagagtacatctgttggctacaccgatcggcgatcacagatcaagagtaagatttcgtggatgactaaccctagttcactcgagtgagcagagacgtaccggtctaccggaacgtcctcgccgtagccgccgtatgtgcgtgccctccccgcccctgcgaagcctgctccccttggcgcgaccggtgacgcctcccccacggcggcgtgtggcgccctatcatccaccgggtggcacccgacctctc

SEQ ID NO: 4532 - DNA, 8855 bp, Sorghum bicolor
ataatgtatattttagatttactattaataaacagttttcttttgggttcatacttgtacagtttatttcataaatctttttcctaattaagtcgtgtacaaaagaaagataaataaactatattaaaaagacaaaacaatcggccatcatattatcacatagcctgttttttagttctagtgcagcatactgattattatttactcatatatatgccaatgccttacgttgaatatagtaaaaacacaagaatggtccctgatcttgtccttcagtgtcatttaggtcctcaaactttcaaaaaacatgagtagtcctttgttgaccaaaaactctttgatttatataagttatttgttccttgcaaatattttgcagggaccaacaaatttgggaaggagaccaaaataagaatttgggatgtgttcccccatttccaaatgggccttttcaaatttaatgacacgagttcaaaaaagttagttctttcaccatatttgtttaaaaattaaatatagttgttgtatgatgtgccgactatacatgggaaatgaattagcagccgcacaactagaatctatagcttctcctagctatatggaattctcccagtgtgtagcattcaatattgagtatgagtttttccctaccaaatgtctcatagagaggattctcatgtgttaggactggtgtagtattcttattagtacttaaaacactaggagaactctaccattttagtggtgcttgctgtatgtcctttttttttcaaaagaaagcataactatgaatgctgccatgcatgaactagctagtagctggtgggaggtccaaccaaaaaggccaactatatattgatagcaatgtttttactaacaaatcaagtcgatcagggagtcactaaagcaggttctaactcctgcacccaagttattagaatgctgccccaaaatcaaactgtgacgaaatatgcacagattaaagcgagaagccgagtcgtcgccaaaaatgccacgccgctacttgatcattcaattcgctatctaaatttctcatctctcatctcatatcatgtaatggcagcatgcatggatctcatgatctcaatgatgtgtgttgtcgtcgtcatcgccgtcccatacatgcctacagaaatctggcacaaaggcgggcggctcacgtactagcatatacgctacaggcagcacacatgcaagtcgtactagcatgcaaccaagggaaaattggcaattggggttatggaatcaaacagggatctatatttttgggcagcctgcctccaccggtcggatcggagaagggttggatcatatcggaggcgcgcggcgtggcccaaagcgaaagcaacggcgcagggctgcagggttgagagcctgctgggacccaggaggtgtgtgaggtgcatggcgacctgcatggtttgggttaggcctaggaggttctctctccaatgggtagctcgcaccctttggccgccgttctcgtgtatgccatatgccatcatgctatgcttcgcgccgtgtatatttgtggcgtgggagccgccgcatcggagcgcccccgtttcggcacgggtctcccagttagggtaaaccaggggcagtgggtaaaactgcccagctccactccaaatttaccctccggcctctctcctttaatttaaagctagctctgagagatagatgggagtgcagagtgggggagatagatggatggatggagacgcgtgaaaaagatgcgatgcgagagaagagaccggcagcgtgctacagggcagccacacagtgacgctgccctttttcccggttctctccactgatattccgctcctgtcctgccccggcgacccattatatcgtcgcgcacaatgcaaaacttagcacttgtgggcggccttgttttgtggggagtcgtcgcctagctagcagcggataagcaggcagcagcagaagagcgagcagagagagcggctgagtgagagagagaacagcgagctctcggaggagaaggagatcgtcatggggaggggacgagttgagctgaagcggatcgagaacaagatcaaccgccaggtcaccttctccaagcgccgcaacggcctgctcaagaaggcgtacgagctctccgtgctctgcgacgccgaggtcgcgctcatcatcttctccagccgcggcaagctctacgagttcggcagcgccgggtaggcgatccgatccgatcgatccatcaacacacgcacagccctcgcgccgcagccactaatccatcttaattctcgactcctgcaagcagcagatctgctagcagctgctgccttttccttgacaaagagatccgctgatgatgctttacttgctcaattgctgcctttatttttcccttttattatctccgatcctgctgtgttggctttgtgccctttttcctttctctgtgatttcatgttttttagcagaagcatggaagaaagccggtagccaagctactaaaaaactgtagttcctggccttggcgcgaggcagcatgttattttattcctgcctgctatccgcgtgtgtatctgtgcgtgtgtgtaggggcatggcggtgttcatataaaccgggggtgggtggatgtggtgtggatccctaactggcatgagacatcctttcagcagatctactagccctacgctttgcctctttctcccagcttctccgggcacttgaagtagtcgcccggtccatcttctcggccgggtatctggagttggccatctttcgtgtgctgggggcgtgtgcgtgtcagagacacgcccggtttgctcgattgctgagctaataggggttcgtcgtcgttgggtggaagagggtagagagttaacaccgatgtggtctgagaggggaaagggtggtatgttctttccttttttgatccagctccggcttatatgaaaaacccctgctgcccacagacttgtcctggcacttgttttgttctgggctctggctacctccatctttatttcctgacctcgatctcttgttcgattattgctccttattgcttcttcttcttctttaattttctcttcccttacgatttcctgtcactttgctcgacaatacaaatttagttcttttattacgtttgctccatacttgatttagatctgcttgagattttcaggaggcctcaacatttcaagttgaaagctcaaagcatgatgaaaaactttctgttttgcggcccttgtcttttcaccggcctcctcccttgtttctagttgtttttgtgtccctttcatttcctaactggtgtttgatgtctagagagagattattctttgtttgttcttaaggtacggtatatatatggccggaagacaatttctgttttgctcttttctttgttctcattttatgcgtatgcatcagagtactactcagccatgaacggtcactcatttgcctttattgatagtgtatgttgcttgcacgcacttcgttcatgtatttcgcacttcttgctttgacttcccctgctgcttaaagatcttttttttaccttacccctatttcttcatgtgacagatctagactaataattaataaaacgaagttatctctttcttatgtttctacttccaaaaagaaaattttcgtagactgcaactacatatgatcatttttaattcttttttgaagtgttatctgttcaattcacttgtaacatgaattatgaaattgtttcctttcgtttgagaataaatatctaaggttcgaacttccaatataatttgctctaggcttgtatacgttgttcatacttggaacctctccactaaacattgcatttttaccatttttctatgatatatgggagagatatcttatattatgcatctttaatttgtgtgatgtggatctattttatgattgaagtatagcattattttgtagtaggaaagtgatcaaattgccttgtgtttaggtactttgagtttaatttcttgaaaaaaatgttttagtttaacgaagaaagtgctaaaacgattcaccaccaatttactagggatctaaacttctaatgcatcatagaactagtctgctttcaaggtatttaccactacatattataataccactacatattgtaatggggatctgaaaatttccatcttataataccactacatattgtaattaatgttcatacaagaaatttaagtccaatggggatctgaaaatttccatcttgtaccactacatattataatatgcatgcatgctttattaattttcttctttttatatattagtttcatgacaaaaacatggatttagtaattatatgacatctatggggcaacaagttatttgctttagatatatttagatttggttttagtgttggaaataaattttcatgcagtataagcacaatactaaaatataaaaagctttgtctacgtcaaggcaggaattaaagagccatagctacatcacaaaggattcatgtagtaattgtaattcttatagggcatatatgtagcataagtgcataactataagataatcatgaatttcacaaagtattttcaactttagctttctatagatggaagctcccaaataatgttctataaactacgagttcaatctcatctatcatgtcacaggagcacacgctcctacgctagtgtggttcacttataagccaaatccacatgaaatcagacttcttatataagaaggaatatatgttaatgttagtaaatagctatgtatgtatatataaacagggcaacctgtgcatacaccaatacattcctcagcagcatctttgccattctagattctagaagtcattttcagcatattttgtagttaatcagacaagtccctttacatataactttctgtgcagcataactaaaacactagaaaggtatcaacattgctgctacaacgctcaagattccaatggtgcactctctgaaactcaggtatggcatcaaatgtagcttatgataacctcttcattaaaattatttctccttaaaaactaaatatgttccctctttatattgttgggtgaatttttatatttagtctgctaccatagtacaaccataaacgagagcaagaagagtgtataccaattatcgatcttattatgatggtgatattacatcggagcataaaagtttttgttgtgttctcagtgcttagctatatatcattcaacttttcacatatttttaatttaccaacaaaggagccatttcaaatgaaaataacttttaatgttttcttggtacaaccatagacaagcaaagagagaatttattactgctgtgaaactgaattcattttcagaaccgaagtcattggtgttttttctttctttttaaggaaagttttttcttccttctaattgatccaacaatatttttttcatatattaatgcacttagctctacattatatctgctaagtgctatacatatacaattccaggaagaggtagcgtgtgttgtatattgttcatctgttgacatgacatacaagtcggtacctattagtaatagtaaagaagctcctacaacactgtgatcttaggcactatttctagaatttagtaacatttctacagcatagaccccccccccccccccttccccctatttgaaattgtaaagtggctattcctgctgttttttaatggtaacagggtactgtgtgtaataaaggtcgatcccaacataggccgaggataactaacaatagaatgcagtgaattttccgcaacctaaaatgccttttttttttgtgctaatcatttttaaaagggcgtccctcatctcattgggttctccaatgcattaaaacctgctgataagagctcacagttgtcatgcaattgaactgatgagggtgggcataattatattctgtttagagctggtaccaggaaatgtcaaaactgagggcaaaatttgaagccttgcagcgcactcagaggttggtttgtcatactttcacatgtgataatatagtatagtgtctctaaaataagatttttctaaagcatttaatgcaaatacatactttctacaatatatttgaatacactgtacatgttaatgtgaccacaaaattgacttattacttttctatgttatataacttgggaaagcaggcacttgctcggggaggaccttggcccactgagtgttaaggaattgcagcagctagagaaacagctagaatgtgctttgtcacaggcaagacagagaaaggtaattcatatatcccagtcttcccttatatgttatgaaaagaacccttctgtttcagagctaattaagtagctaataaatacataggaatcgtgcaaccatagaatttatacaagctgttaggaaaggaatactatgttgtctgcaatggaatgcgcttgtaataatatatgcccacctggccacctactagtggtaggactagtgacttacattaacttcgtgtaagatagcaataatcaatgtatttccttcttttatggagatggataattaattcattaaacaacaatgcttcttccaagtatttgaaagaaactgcaggcaaggatgattaaacactttaattagtaggttataatatgggtcaccaacaaacggggtcattaaaactgatcttattttttattagctttaaaatgtcaggcatgtatgaagtcgtacaacatcttttgtaattaccaatgttagcttccgtacgaaaggtcaatatagccacctatagcatgctagccacaataaagcaagcgcatcctagcatttttgttgccatgcctgtgaaaattttaccttaaaatatgctcccacatttattttttctgctatatctttatttcctatgaaagttagtaaaaaaatgaaaataacatcattactatctaatgcatagaaagaggtcgctagaagctcatatactactcccttcgttccaaactacaaatcgctttgactttttaggtttatccattttgctatgtactatctagacatattattttatttaaatgcatgaaaaaataatatagaaaattcaaagcgacttataattggaacagatggagtagatgaaattattagcaaaactcgaacggtagttccaatgacgatttaattaacatatgtgtcaaaacttcaatacagtctgtattccctaaatcaccaaccatatacagcccaatatgagccaaagccagaagaaaccatacagaaaaaaaatagtgtaacaatatgaaaatcagcttaatttgttgatttattcagtttacttataaatgaaaaaaatgaaaatatatgtacatacttctctatttatttcttacgactaattacgcctcaaaattgttggcagacacaacttatgatggagcaagtggaagagcttcgcagaaaggtacgtattttatatactagactttgtttacaatagtaatactctacggcacagctcgggcatatactctatcttatgcacactagggatcctatgcatgctctttagctgaaaaactagctagaactgtagatagttatgcataggtgtcttccttgtactcttttgtacacgagtcaaccgttcatccatgtctaaaatattcttggactgttgcatgcgcaggagcgtcacctgggagaaatgaacaggcaactcaaacacaaggtccttatctgtttcctatatatagtagaatgacagctatatgaattagagctgtatatactcctatattcatttgatcttttttgttttttttttcgaaagatctgatcttttttgttttaacatggacagtgtttctttgtttactatgttatatgttgtccaattctacagcttgaagctgaaggttctagcaactacagaaccttgcagcatgccgccgcctggccagctcccggcggcaccatcgtggagcatgacggcgccacgtatcatgttcatccacctgctcactcagttgctatagactgtgaacccactctgcaaattgggtataatacctggtcgatcgtaattcaagaaaaacaaatgcagactcatcattgcagtgtactaacagaacaaaactgactatctgtttccaggtaccctcatcaccagtttctgccttctgatcaggcagccaataatatcccaaggaacgcccccggaggcgagaacaacttcatgctgggatgggttctttgagttgttctctcaatccatccatcagatgggcaatcatgttgaaacaaataaaaggcattcagtgttgtatatgcatgcatattcatgctcaagtgcttgatttgctacgatgggatatcttttaaatttatcgttctggtgtgtaataactaattaagaacggcaccttcattctgtgtggttgtggtgtggcacttctatgtttttttttttcatttggaccatgaatcttgtaatttgtaaaaatacatctatgctggtggtgcataggatccaaaattatctgcaacggtacttatatgctgatgcaagattcagcaccatttggatcatttttctgcttcatttgtccctttcttctggcccaggcacatcttaggccttgttcagttcacaaatttttttggcttcaggtactatagcaatttcgtttgtatttgacaaagattgtccaatcatgaactaactaggctcaaaagattcgtctcgcaaattacagacaaactgtgcaattagtatctatttttgtctatatttaatgctccatgcatgcgccgtaagattcgatgtgacagggaatctt

SEQ ID NO: 4533 - DNA, 5534 bp, Sorghum bicolor
ttgacaactggctcaactaaaagatttcccgcccatatcaagcagcacggttgatgaagagtcaagggaaaaattggcaccctatgcaggcttgtcatctgaagaaagctaccagagtcgcgaccttgaaaaggtatataaaaggttagattactagaagtatctccacatgatcaaactatctggcgctgatcaattaagctgtgctacacaggcatctcagcaagttgcaaagaacctgtacgactccaaggttcagccaacaacattgatcccaaaacaagttgggaatatgtatacagcatcactctatgccgctcttgcatcgattattcataatagacatgaaactctggtatgatactatttagtatttacagtgtgtgtttccctctgcttttacaagactggccgaccaatgttaaagtaatttcttttcttctgtacttttgacatgtccaggcagggcagaggattgttatgttttcatatggcagtgggttgacatcaacaatgttctctttcaagattaatgaaggccagcaccctttcagtctgctaaacattgcaaacataatggatgtttccaagaaattgaaggcaagacatgtggtgagtattagcgatattctttcatgaaaaaatcttcaattatcactgaagcccactgtgtttaacataaagtgagggtatgttccatgcaggttcccccaaagaaatttgtcgagacactgaaactgatggagcaccgctatggggcgaaagattttgtgaccagtcaagatacaagtttgctatctgcaggtacatattatctcacgcacgttgactccatgtaccgaaggttctatgacgtgaaaggtgacagtgtcaccactgcaatctccaacggccactgatctgtcttctgctcgaagctgcaacaagttaaataacagaggcaggtgtcctaagtattctgagtgttcttagattatctattattaggagggtaagctggagcttagattaatctctgcccagttgtaaggttgtaaagttagttagagctgcgccattgttgtaatgcttgcttagtaaaaactctggtgctcttccgttctttattggtgtgaattgcagtgcttgcaaaattcaaatcaagcacactgctgagttattagaattctgaataatttgcagaatcactggttacatccaagttatgctgttgaatgcatctggattcagttgtactgttggagcagtcgtgtcatgtcttgtactttttttaattagtttctaacagtagattccagtgtccggatggatgactgactagagggaggttttctctttgttttttttttcctatagaatgtttcttgcactgtgagtagggctaaaggtacgcatatagtctatgctactccccccgtccaaaaaaaaatgttgttttaggttttcgtgtcacaagtttgacttgatttgtagaaaatatgtgcaatatttgtgtctctaaataaatctgataaaaaactagacttaaagatcttttcaatgatactaattatgtactataaatattaatatttgttactatatttagttaaagttattttttggaaagcgcaaacgacgcttattttgggacggagggagtatatatttgttgcctctaccctctgtcacatgccaattgcaatttgcaatataagagaacctattgaagattagtaatttctcattcttaaatctaaattaatctagagtagaaatttaatggggtgatgaatcgagtacttttgttatatcggtattagacccagtgtggatggaattttgactatatacagtcggtatatacatagtggcccgtcaaaattgacgagctctgccaatgtgccgcagcgccgccgtgctccatttgcttcctggcaggagctgaacaaaaggaaccgtggagcggagggcaggaggattcagaaatcacaatcaggacacgctaaacccccaccaacatgtctccatccgacgacggcgaggagaccctcgccgcgctcatagaagcctccaggaccccggagggccgggagggcctctccgacgtgctcgacgacaccctcttcctcctcccggcctccccgtcgcgcctcctgctcctgcgcctccgcctcctccgcaacctccttgcgggccacgagctcaaccagtacgccttcatcgagcgctgcggccccgccgccgtcgccgcctccgtgctctccttcccctcgctcgcccccgacgtggcgcgcgccgcgctccaggcgctcgggaacgccgcgctcgccggggagttccaccgcaacgccgtctgggaggcgctcttccccgaggtgctgcaggagttcgcggggctcagggaccagggagtcctggatcccctgtgcatggtcctcgacacgtgctgcggcggggaaggcggtcgtgggaggctcgaggagctgtgccacgaggagctaggcctgccaatcctcgtccaagttgtcactacggcctcgcaaggtgagatgagctttcccccgcattgttgttcgaatgtcctgtacgtgctatggacatcgatgatttgttttcaggtgctataggttattaggtttgtctgtaatttggtattctactagtacctgattgttgcatggcaatatgtgtgagcctgctatcttagttggaaatcggggtgcatactttatatatatatatatatatatatatatatatatatatatatatatatatatatatatatataataatgacaagaaaaaccttctggttattttgttgcaatgtgtagtagccttcaccactgggatttattaggctgttatacaagatcctctgttgttttgtctgtacaagtttagttgatcctaaccagaattatgtaatgcagtggggcacaaggaagagtggttagagtggcttctgttcaaagtctgtgttgaggagcagaagttcgagagcttgttctatgccttatgctccactaatgatgtcgagcacacagacagtggcgagtataatgccaagcatgtttttcttctgggtacactgtcaaggtgtttgaacagccaccccaaagaagttactgtctcggacggttttgcacatgatgttttcaatctacacaagcatgctgccgaaactgtgaattttactcaccgaggtacgtcccctcttccaactgggagccctgcaatcgatgtccttggatatacactgcagctcctgagggacatttgtgcctgggaatccacctcatcagatactcaacgtcctgttgactcgctattgcagactggctttgtacagcgccttctgagatacctaggtgagcttgagccaccaagtacaatcagaaaatcaatggcaggaggacaaggagataaccatccagctcttgaaaatgcaaaggtctgcccatacattggttacaggagagatttgattgcggtcattgctaattgcttaaacggaaggaagaaggtgcaagatgagattaggcagttaggtgggatcatgttgctactgcagcaatgtgtcatcgatgaagataatccatacttgagggagtggggtctgctggctgttaagaacttgcttgaagaaaatgaagaaaatcagaaggaggtttctgaacttgagatgcaagaacctgttataactccagagattgctaacataggtctcaaggtggagatagacaaggaaacaggtcgtccaaaactggtcaatacttctgatgtaagtatacctgtacctgatctaaaataagtttggattggatatttataaataacagatttgtaatatccttattatcctaaatgcttgttaaactaaataacttgttcattgtgtgacttgtttaattgtttatcatgagaattctgtcatgtgggggcgcacgtacgccaggcgtgggcgcgcgcgcgacgagcgcagagcccgggagcacgctgagcgcgcgacgtcgcccaggggctaagaaggaaagagttgagattagttgctatttttattccttagattcagggatgattagtttccctcttggtgaaggccaccggcctatttatatcttgtaatcgggatatttgaggattaagcaaagtattacccaaatctacttctccctattctaaatatcaagccgacggcagaggggcataacctcgccggcgacgatggaccagggctacgatcttcgtagccgagggcctcctacccttggggttgacgctcttgacaattctattatagtatttcaaatctaggttactctgcagttgcatcgagttgttgtaagctctttgctcatcgtttcacatgaatatagacatatagttgagttctagatgagcttgtctttctgccttccctatgacatgaatatataacctgccttccctatgatatgaatatataacctgctcatctataacatcatttcacataaatatataaccttctggaattttgtcattagcttggttatattgttgcattgcaatacgacagcagcagtgttatctgattgattgactgactgcataattcgttttgcagacctgaactctgactacaggcactgtcagaatcaaggttatgttgatgctgtagaatacatgtgctaccttttggttgaaaaagtctgcaatttactccgatgatgaaaaggtctcatgtatgtactgtggttatgattgagaaaacagagttttgctacaagagtgatttggattttgagagaagtgattcatggtaagcaaagcagttgtgtagatgtatgtggttggtggtctcggaagtgaactttgtatgcggaaaacgtggacatgggctaagcatgtggcccttcctgtgtggaaattttagttttatgacgtcgatagattacactttccaaaaggtgagcttgatagaagtagatacgccgactttctgaaattcttatttggttctgtgttaaacctggaatttggtatcctgtacgatgctagttctaagtttttttagtttctttttggttaatataagattgtactctgcttattattactagagatgtcattaaaaatggtttgaagtttcgctcataatttgttctgattgtgcgggctaccaaaactacaagcagtttgttttgctaaaagacgtcacggatagcacagggagggactgaaactgcagctaacagtaccagctgtaaccaacggttgcagctatcaagacttaaatagatatagaacacgattctgatgtcaaaagaatcacttccaacattgcaaagattacaagactcttgtatgacaacttacaaaatgggaaagtaactagaagtacttcccagccccagatccattatgccctagacggcaagttgatccacaacaagttcaggcattcagctaagaaaatacaacatctgaacggagtacatacttggcattctttttcacaacccgggcttcatgcagcatacatttggcgccatgtaggtggaggag

SEQ ID NO: 4534 - DNA, 4103 bp, Sorghum bicolor
attcacggcttgtgtgccgctgcgtcacgaggagggattggattcacggtgcccaagggttgaaaaccttcttcaatctcagtgacttggctcgtccgtagtcgtagcctcgtaggggtcccttccctccctcttgaccgaaatactacgagtagtgctactgactgtcgtgaaggttttacttgccagttgcgtcgccgcctcgatcgatcggaggtacgccggctgggatgtggcaggatcaggatcgttctggctcgaggagactgctgtcttcgattcaggagtactcgtagccgctatgaaagtacgcagacagctgattaggcacaatgctgtacagtagtataatacttcctccatctcaaattgtaggtcatttcaagaatcctggagagacgaacttttataagtttgaccaaatttatcttataaaattattattattattatggtactaactaagtatcattagattctttcttaattatattttcatagtatattcactttacgttacaaatcttagtatttttttctataattttggtcaaacgtgaaaatattttgactctccaagatttttggaatgacttacgatttgggatggagggagtacaaaacaacaacaacaacaacaacaacaacaacaatgcttcatagagtaggcagaatttaattgcattacggggatcttttgatgcattactgaatgttttttccctttcttcttcttttgatttgactcaaaactgggaagccatttagagccctttggaagtcagttaacccactataacaatccgataagattttatttttcacagcaaaaacaaataaacacatgaaaaaaaatcattgtcctaaagggtcttagtgtttgtggacagagttataaatgtaggttcatatgtttaaggcatgtttggaacataggaatgcaagaaaaaacagttctcaggagtagaaaatgagtataggtaaaaaaaatagtggattggcaaacacataaattttagaaatgggtgtgtggaatacaggaatttaagaacatgtttattcctctattgtactagtgcataagcacatgctcatccctctattcatatgtaggaagcttttccaagagcttgaaacggctgtttatttcctacatttttctttaaaaaaatcaagcctttctataggaaaggaaaatttgattccaaacactatgtgatgtaagtagaacgtaggaattggattccttcaatttatataaaatcctcccatccaacaagccgtatcctaagacattaaattttatagatactgctattactggtattttatatctaatttatattttattttattgctattaatggtcaaagatagaaagtttgacttaggccttgtttagttcccgaaggaaaaaatttcgcgacactgtagcactatcgtttatttgtggtaattattgtctaactatagactaactaggctcaaaagattcgttttttttggatttttgggtggaagtaaataaggccttatacatataaagtaacagtattaattacctccatcctaaaataaattaattccttgaatccatctaataagtcaaactactttaaatttgacttacttcctaaaattatattttatgatatctagtaatactaatttcgtgttataagtactggtgtacttttggttaaactttaaaagacgacttaaaacaatattcaaaattgatttaatttggaacggagcagtatttgtttttttttggatggaaagatttttaattttcaaggaatttgggccgtgtagatccacggtcagcacactgcaaaagcagacaattacgaactcggtgccgtgcacctgccacctacctagtgatctgccggctataaaaagacggcacgggcacacttggtagcacacaaacaccactccacaaagcacagcactgctcggcttggcttggcttgtcctcttcctttgttgccatggctaccaagatggtcctgtgtcgctttgtggccttggcggctctcgcctgcctcctccgccctggcgcgcccgtcgagctccaccgcaggctctccgcctggtccggcgacgccggcgcgacgtggtacggcgcacccaccggcgctgggagcgacggtaagtacagatacacatgcacgcgcgacgcgcgtgaactttaacaaattttccattccacctgcatgcaaaacaaaaggaatccgtaacaaatgccgccttccggggatccggtggttatacgtgtacgtcgttttttcgtgtaggtggtgcgtgcgggtaccagaacgccgtcgaccagccgccgttctcgtccatgatcgccgccggcagcccgtccatcttccagaacggcgagggctgcggctcctgctatcaggtaacgtagttcggttattcgtgcgaccgtttctttaagagagtggctagctcgtaatactatgccacttcctcctacttaataaatgacaccggcgccgcgtttggagcaactataaattctgcaggtgaaatgcaccggtcacgcgtcgtgctccggcagcccggtgacggtggtcctgaccgacgagtgccccggcggcgcgtgcctggccgagcccgtgcacttcgacctgagcggcacggcgttcggagccctggcgaagcccggccaggccgaccagctccgcagcgccggactcctcaagatccagtacactcggtacgtaagctctcgcagcgcgccgcgtgcacgtgccgcgtaggagtgtagtacgtacttgtgccgtgtcgtacgttcatatactcgctttcggtgtggtgtaccgcgtagtatgccgttggagtacattaggctgcatgcagcctccaacgcacgtagagcaacgccgcgtgaccgtgacgcatgcagggtgcacgtacgtacaaacatttctcgtgtctgttttctccttggtcaatgtactatatagtgatagacgagaagagtgtctgttcctcgcaacttgtcgtttcgtgccgcccatgtccatgtccatgcatgaccgtccgctggcgtgcgtacgtgcagggtgccgtgcaactggaacgggatggacatcgcgttcaaggtggacggcgggtcgaacgcgaactacttggcggtgctgatcgagtacgagtccggcgacggcgagctgaggtccgtggagctcatgcagcgcggcggcgcggcgtgggcgccgatgcagcggtcgtggggcgccgtgtggaggtacaactccggcgccgccctgcaggcgcccttctccgtccgcctcacctccggctccggcaggacggtcgtggccaccaacgtcatccccgcggggtggtcgcccggcgccacgtaccgctcggtcgtcaacttcaacaactaattaaccgtgacccggatgcatcgtacgtccgggtgcacgcgcgcgcgcgcccgccgggacggcgtggcgcttggcttggtttatgattcgagctagctgtgcgtgcctacaccggccgacgacgacgctactgtgtactgttgcgtgcgtgacagtcaccgtgtatccccggaatggcgtgtttgtgttgaatatatatataaataaaagctggattattggaactttttttttttgtgacttaagctggattggaacttggaagcgatgtgttctgtgtgttgatcgctgggttgatttcgctgtcaggcgtgcgcaagccacgcgcccacacgccgcttcttcgtgcgtgcgccgtgccgcctttcgagggaagaagagtgcggcttaccaagtttggtagcgtcatccaccggagctgatgctctcgcgcgcgcccacagaatgctaagcggatccaacaacatggtatcgtattgcgtcgcgggcggtgttcctcgcttcccgacgacgtgtgtttccgtcggtcggtgtttgatacatacgccttcgccttggcaggtttggccgacgtgcgtcacgaactcgtgaatcatgtgatggaagacgtgcgcgacgagttctctagtgctactccacgcacacggcgggacggccagcccacctctgcttggagatgggccggat

SEQ ID NO: 4535 - DNA, 2892 bp, Sorghum bicolor
caggtcaagggtcgggttgccggagaagatatttttgtgggtctccggtccggtgctgcgcgcatggagcagattgcttcatcttttgaggaaagcccgcgtcagaaagacggcaaccggatgttctccctccaacacaaaagagggagaggtaccatggcagtatgggagagcccatgcttataactagggctccatttaaattttagctagctaaaattattttatctaatttaattttatgaattaaacaattttatttttttagtcagttatttagaaatttagctattaaaattaactaaagttaagttagcaagggaaacaaaatatggtctaaagtgagttgaaggaaaaaacatgatgaagagttttacagaaagagagagctcccccatatgtttttctaaaaaaaggagcaggagtgagggcctgtttactttggagatgaaaatttttttgggtgtcacatcagatatgtcgggatgagtttttagaaagtaataaaaaacaaattacataactcgtcaggaaactgcaagacaaatctactaagtataattaatctgtcattagcacatgtgggttactgtagcacttaaggctaatcatggagtaactaggcttaaaagattcgtctcgtgatttttaaccaaactgtgtaattagtttatttttttatgtatatttaatgttccatgaatgtgtccaaagattcgatgggatggatgaaaaatttttaggtgggaaactaaacagggcctcagagtttgcgtgtgatgtcaatgtcatcaggtctccttttattcacgagtcagcacgttcactgtcgtggccatgtgtttcccacctaaatttttttcattcatcgcatccaatctttggatatatacatagagtattaaatataaatataaataaaaaccaattacacagtttggttgtaaatcgcgagacgaatcttttaaaactagttaggctatgattaaccataattactacagtaacctcacatatgctaatgatagattaattaggcttaataaattcgtcttacagctttcagacagttttcagactagttatgtaatttgtttttttataagtctatattcagtagccgacatatttgatgagtcttgttgctttgaggtctgccaaacctgtcccgtgcacacatcctttttagttgctcatcgatcgaaaggtggatgagtgtcggttgttttcgcagggtgtaactggctcgattctcgcttccgggcagtgggaattgcctagagattgattgagagtaagcaatactaatcaaaacagactttaaaccttccatttttgtactatctatattttattgttgtcttcacataataatattacttaaaatgggccacccaaactcattctagtagagaatgatatgtgggtcccccatgcgcatcttctctcatgttttttttatcaccatagatgaactagtgtgtcgacaccagaacaaagatggagccgaaggtgcgcccgcgccaggggtagggagttgtcgggggcaacactaccacaccgaggttaggcctgctgcgctggggaccttgctcggtgctcggcggtgacatggaagatctgcgcgcgtaggcgagggcagggtgaaaacgagggtataggtttttgggtagtcacctagggattggccaacaggaatgggtagcgaaagggaggacaacaaatttagagtagactgccgcctataggcaccagcaatttagcccgccaaaagcccatcacggtcccacccgcatcgggcctttcagccggctgaacacctctattccccccctctccaaggaaagagaaccacccggatcctgcaacccgtggcgcccgctgccgccgccgcatagcattgccccgacgccgaaacctagctcctcaattctcctcgctcaccctctcgctagccgctgcccactcgccaatctccgtggccggacgccgtcggcgagatggctacgacctgtttccgcgccgccgcccgcgtggcctcggctgccggccgctcggcggcggcctcccgctccgctccctccgcggcccgcgccgctgccgctgccgctgccgcaggccgcggggcctcgtgcttctccaggtaacggtgacccgttccgctcttggcgcttggtgctggcgcagtggcgcattacgggatctgtaatggatgcgcttgttgggggtgttgtgcagggtgccggtggagctcgggtgctgcgcgggattgtcgctgctgccgctgcacagcgcggtggcggcggccaggctgacgtcgcggctgagcacggcgtcgagctgccgtgctctctctcagggtatcctctgtcgcacctatcccgggctttaacatcgtaagattatgctcttgtctgtgtttgctttacatttggttgaaaatcacgtccgtgtatttttcctttctgctagtttcatagtttactgcgtgcttgtttcatatgcgcggaaaaaatgtcattcattgttgtattgtaacagcgaaatgacatcctaaccatttattgttctattgtaactgtgaaatgacatcctaaccattttaactgatcatgttcaacacgaaacctcttccattttcctgaaagctgcccgctgctctatagtacacaatacatgaatacattatgatctctgaatggaaaagtacatataaacattgaagccttgaacgctgaatgcaaacacctttcattgtgcatataaacaatcatgccttgaacgctgaatgcaagcactactctgaacgctgaatattagtacatataaacaatttaatggtgatatttattttgacgaatcttgtgcatatagtcctttataggaaaaatg

SEQ ID NO: 4536 - DNA, 3893 bp, Sorghum bicolor
cattcagagactacaacccatttggaaagcaaatgcagaacccaactgcagattttttgcttggacattgcttcacaaaaaaaaacttgaccaccaacaaattgttcaagcagaattggcctcatgacccgataggagtcatggatatcgagtgatttgcaagagcgctgagactaagatggcttaggctggatcttccagttgacgaatgagaacaaagaactgttcacggctttgacggtcgtgacaataggagatggaaggacgaccaaattcaggacctcgtcatgggtcaatggacgagcaccaaaaactttagcaccttcactctataagaaatcaaggaggaaacctcacagttcaaaaagcgttggaggataaccattggatttcacacctaatctctttagcaacatcctaggaaataagagaatagatagccctatggtaagaggtaagccaaatcccagttgaaagataacacacaggacaacattcgttggcggtggatggaagatggagaatattcagtgaaaagcgcatgttgtatttagttccaaattgttctagcagaattggcctcatgacccgatatgcaaactttgtagccttggaccggaaacaatgacccatctctgtaaggactgtactttcttaagagaggtgtggtccttaatcaagcaatgattcagtctagactattggcgtaaatgcagaaccaatatagacaaagggcaaagaagaaagtttgatggtatcatggtctacctatggtggactttgtggaaagaaagaaatcgaagaacatttcaggagatgcaaccgagacatgtggctctcctttgcaagaaagatatcaatcaatatgaataggcgacaaggtccagtgccgcacaacatcagtagttctagtagtaataacttttcttccctttaggtttattctctcttctatacaattttttatctaagtggtgtaaatagtcgttctgccaccgggtgtttcttaggccttgtttagttccctttttttggttttaggtattatagcacttttatttttatttggcaattattgttcaattatagactaactagactcaaaagatttatctcgtaatttataggtaaattgtgcaattagtttttgtttttatttatatttaatgttccatgcctataccgtaagatttgaattgatgggaaattttaaaaagtttttggttaaagggtgaactaaacaaggcgttagtcgacgcacagctgcattccttgctaacacaaaaagagagaaactagcacaacaatatcgttgcttcctgaactcatacaggccgagactcagagacccatgatgtggagtgatgaaggatgatggcgcctctgcaagcggagaatcattgcattgccacaggtatacgtggaattgtggatgtctgctggagcaagacaaagcgccggcgtgacggtcagactgccattgtcggtggtctgtgtgttttgccaaacgaatcggcggggcggggccctgcctcaagccgtcgtgtcctctgtcgctttgttccactgcaagctctttcttttcttgttcgctgctctcgaggacgcatcattgatcattgtcttttgccatggacacagcaactagccggcatagagttggtcatctggtttttgaattcatcaacttaatctgcatgcatgcagttggtcatctggtttgatccggactgtcaaccgtggcgtgtgatgtactgatgttattataccaaagtggcctcaccgccggcaagcctgccggcatcctttcaaacggaaagcaacaccgcatcatcgtctccactgttgctttgcagccaagcctcgtcgtctcgggccccgcgtgcttatcccctcgccacaaagcaaggaatccaaagcaaaggcatcaacggcgccaagttagcagcaggatagggacgatcgatcccaaaaccacaacccaagaacgggaagcgtgcatgcgcacgcacacgcacaaacctgcctgagctcgagctccctcgctctctccctccccgcgcgcacgcaatggccaccggcagcgtagccccaagccccacgcaagccagcagcaatgtctcacggccgacgatccccacaggcctcgtgcccgtggccgtgcttctcgccgccgccgccgtcctcctcgcgctgctgccgtcgctggcccaggcggtgtgggaggtgccgcacctcttcctcctaggcgccgtcatctccttcggcgtcttcacgcagaggaacaacgacgccgatggcaacggcaatgccgccggcgccaagcgcagctcgctggcgtggaacgcgcggtaccaccccgccgacgaccccctcgtcgtgatcgctgatcatcacgcggtgccgagcgacgaggacgacgacggcggtctggaaggcgcacgacgggagaggccgctttccttgccggtgcggaggctgaagcctgcgtctgcgtctgcgtctgcgtctgcggcgcaggagtccgaaaccggcggcgacgccagctgtggtggtttcggcgaagagacggatagctgcgcgtcgtcgtcagggttttgggccggcgcgcgcgccgtcccttcgccgccctctgttctcgacgccgacctggacttctctccgtgctcacagccgccacagtctgaacggccgttctttgtccaacacagcgccaacaggtcccgtgggtccaatgccgcgacgccgacgccgacgccgacgccggcgtccaccgtcccgaggggcttcgtgcaggggtaccagtaccatccttcggcgcccggcgaccagccgttgagtgacgacggcgaggtcaccgactgggacgatgaggacgccgccgacggttccgatattgagatgacacccgtgtcgtcagaaaggtcggtccgtggcgacgacttcgccgcttgtgacgacgatcataacgacggcgacggcgacggcgacgacacgtccgtggatgaagagcttctgaagctggcggcgaaggcggagccggacggggaggaggaagtggacaggaaggccgacgagttcatcgccaagttcagagagcagatcaggctgcagaggcactagccggccatgcatggcgtgcatacatgcatggatccatgcatgctctgctgagtgctgagcgtgcaccgacacggcgacacacatataaataccactgatgatccaccacgaatggagaacgcagcagttgtttgttcatccatggcaccatgtttcctgtatcattttattgttttttttgttgctccactgcccaacaaggagccggaaacatggtgtgtatatgaatgcagaatgcatattgagcactgcttttttcagtgcatttctatagatttctcgtacgtctgccaatgccagaaatgatgaaatcgtgtgcggcagttgggaggagttaggattaggaagaacagcaatcatcctggagcaaaatctttgcggttttcgttggaacagtccgcacgacgtatgtacgtgcacaagcacagcccgtcacagccttgtgatggcatgcatgcaggacaataatcaatgaaatgttctgaggaaaatcccagctaacgccaccttaacgctgaaaaggacttgtccaggccggccaagcatgcgtggccgtttcttccaacttccaaaggcttgtcgtcgcttgtgtaccaagcatcattgctggaagtattttcgctcaatgaatgaacggtggcatgtgtgtcacttgtaggcttgtaggcgtcgtcgtgcttgagaagagcgtgaccttccaacagcagcgtgaaagtcacgtttgcgttttgtgttgtgcccatcggcgtgctgtgcctaaacatcgagct

SEQ ID NO: 4537 - DNA, 2659 bp, Sorghum bicolor
atttactactacatgattgtgccacaaaattcgatgtgacgatgtgaacagagaatcttgaaaaaaattaaattttgggaggcctttgtacagcgatgaaactgattatcattctattttgctacaaaacttacatattcttacaaattcttcaaatattacaaaatcaaaaagagtgattgtattgtatatgaccactcaatcattagtccgccacaaatgattacaaattcttcaaataatccacaaccaataaatttatttaaaatatagaagcacaaggtaccaattaacagacttcaagacaaaactaactgtcaaacttagcgtgccctcagacatccaaggaaggaattagcagcattagctctcaagcctggcagggcgaaagctcttaggcggcaactgcgaatgtagagaaacaagccttaacttctatcatcattgggcagaatcagagctcaagaaagaaatgaagattaagaaaaatcgaacacagaaaatgtagaacacacaaacgattcaaactcccagcaaaaaagacaactaccaaagaacaaacaactcattattcttattgctttgcatcagacatccaaggaaggatttagcagcattagctctccagcctggcaaggcgaaagctcttaggcggcaactgcgaatgtagagaaacaagccttgaatttatcatcatttgcaataaaaaagcaaatgcctatacattttggttcaggctgctttttttaaagactatccaatcgaatgtttaacacatgtatggagtactaaatagactatttacgaaactgaaaacacagcaagagaataatttgaaaatctacaaaactgaaaacacagcaagagaataatttgtgagttacagtaccttttgaattttagcaccgccaaccaaacaaccccaacacataggtatgaaaaaaatgtttgaaatacatatggctcagatatccaaggaaggaattaacagcactagctctcaagcctggcagggcgaaagctcttgggcggctactgcgaatgttgagaaacaagccttagctttatcatcatcaccatacacaatgcaaacataccaattaaaaatagagtgagtgcagaaaaatgtgatcacattaaccggctctgtggacagacagagaagcagtccccaggttcctatcaacatgtgaaatgttgagacaactttgttttggcctaatcatagcatctctggtcaataacgtggctaacagagacgtggcatcaggcccaaatttcatttcattacaattcacaaactaaatgatgttgaataagttaaataggcagttatcataacccctcagagacccgatttaaatcacacaccacagcttaatcaaacaactacagatgggactctatcctagacaaaaccacaaaggttatggtcgaaggatagacacctgcagctgaaagaagcagctgctgtttacagggtcaaacggcacttcctatcggtaggtcttgggatcctcattgggactattgggactgcaacagggcaaccacgtctacataatcagattaaactaacaaaagtacatgatcaaaacatgaaatgtataatatgtatgcttacataagcctcagcaagccagacaattttcgtcataagtaaatctgacggtaattccagatgtatagctaatcatcattggcttacatacagatcacgtggcaggataaggccgtaaggatacctgcctaaagcaaacaaagacacagaccaaacgataaaaaaacgaaaataaaaaggctaaatcaaagagtaattgcagtatcatcagaaaagaattgccttctcactcacagagctaacagcactgtgtcagaaggtgtcctaagattgtttcgtggtttcatcatctgatacaaagaaaaagacagatacagttcaacaacacaaaaaaaaatgaaaaccattacagcaagatgttaaggattcagatgcagagatgtatgtgcatcactcgctcggcagaagccggcctcggatcaagtgttggattatgcatcagttgatcttcactatccaaaatcaaattactgagcaggaaaaacaacagcaaaaaaaagattggaggggatctgtagttactcagtggtggcaataggttattggttcgattctgccagcgagtgtcctcagtgctttcagaagagggagcttagtatcctcatcgcaacagtccatcccacgctccaatggaaaaaaaaataatcaaacgaaaaaaaaagaaatcgcacggagaaaacatttcgagcagataaacgagacgcaaagagatgagttagatggctcggttcagcgggaaaatcggcatacagatcaacctcgagtagagagagacctgtgattcggtctgttgagcttgaatattaccgagtcgtcactgccatccatctcacttgacacaaacaatcgattacgaacagaaagcaatatgcacacacgatctggaggtgttctaaaccaagagctctgcggatctgggttggcgtcggatggattggggcgaggtgttctaaacctaaagctcagcggcgatgcggggactccagtagaggcggcgtttatatggaggggattggtgaattagggtttgagcaggag

SEQ ID NO: 4538 - DNA, 16385 bp, Sorghum bicolor
aaaataaaaaggctaaatcaaagagtaattgcagtatcatcagaaaagaattgccttctcactcacagagctaacagcactgtgtcagaaggtgtcctaagattgtttcgtggtttcatcatctgatacaaagaaaaagacagatacagttcaacaacacaaaaaaaaatgaaaaccattacagcaagatgttaaggattcagatgcagagatgtatgtgcatcactcgctcggcagaagccggcctcggatcaagtgttggattatgcatcagttgatcttcactatccaaaatcaaattactgagcaggaaaaacaacagcaaaaaaaagattggaggggatctgtagttactcagtggtggcaataggttattggttcgattctgccagcgagtgtcctcagtgctttcagaagagggagcttagtatcctcatcgcaacagtccatcccacgctccaatggaaaaaaaaataatcaaacgaaaaaaaaagaaatcgcacggagaaaacatttcgagcagataaacgagacgcaaagagatgagttagatggctcggttcagcgggaaaatcggcatacagatcaacctcgagtagagagagacctgtgattcggtctgttgagcttgaatattaccgagtcgtcactgccatccatctcacttgacacaaacaatcgattacgaacagaaagcaatatgcacacacgatctggaggtgttctaaaccaagagctctgcggatctgggttggcgtcggatggattggggcgaggtgttctaaacctaaagctcagcggcgatgcggggactccagtagaggcggcgtttatatggaggggattggtgaattagggtttgagcaggaggtgcaggtggatgtgcggtcgagttgggctaatccgtgggcttttccgcaggctatggtttgggtttggtgggctggtgggttcggcctagcccacagagtactgttaggggccgtgagatacgtaatgtggcgcggggagggcggcggggcggctgagagctgaggcggctgggaagaattatgttttcatcttaggttattgttggtaacaaaaacatattttccccttgaatgtatgttgcataagtcatagccaaacttttttttactctatttgttttaaaatctcaacctaatatgtatctaatcgtataatgaaaattaccatatccgttctaattgtaagactctttaattttttgttatatcaactttattatatatctagtctagatataataatatgtgtagctatatagtaaaatggatatagaaaaaagtcaaaaccacttgtaatttagaacggatggagtatgtacgtagaaaaggtagaataccttagagcctatttgcttgaccatatgtaatgaatctgtaaactatttaatagtatttttctctcacgataaatcaatgtttggcgaaagcattattcattaattttttgtgaaagaaaatattgattcgatagataagctccaatcaatagggctaatatttctgatttcaaaattccagcctaaattttgattttaaaggtacaatttcagaagtgtaagtgggcgcctggccggtggatggaggcgacgaggcgtgcgtgtccacggtccacctcctccaggctccagcaggtcggcactccggctcaagtgccccgccatcagaatccactaattactgatatttgtttttcttcacctgtcgcaatcgccatttttgctagagagaaaagaaaaacagggctcgaaaatacgagctccactactccctgcttcaggcacgctcatcttccccgctccagtgctccaccgatcaggaattcattcagaactcaccgccaccgcctgctccctcctcgataaatccagcctattatccaaaccgtctcccgtctgatccgtcgccgtcgaggagtcgactcgtctatccacaggcaaaagaagtatctagcggggagcgtcgccggcgatgctctgctccggccgcatgctggcctgcaacggcctcttgcccggtcggctccggctgccgagggccgacgcctaccgcctgcgcccaccagcgctcgcgcggaggtggagcgtcgcggcctccgctgcggcgtccggcggctcatctgacctcccatcgtcgtcgtcttcgccgcctaccccgccgttcggggtcggggacgaccaggccgctgcatcacctgggtaaaaacattttatgtaggaagttggcaattttagctctgctggcgagctgtgaggcgtgagcaaaacatttttgtttccgctgtggtctacctgcgtgtgactagtgaatcggattctgattgcccgtgcgacgaatctcgttcagacatagcttctctatccatcaagaatacatgaacatgttggatctcttttcgaaagtaggttaatatgttggatctaactgacaaactgttggccttgaactttccatgaatatttgtttgtactcttttgcattcatcgatagtattcaggtatggtttgtgctgcacggagataacattggcccctgcttggctttttgcaggttttgcatcatcgaagggcctgagacggtccaagattttgcaaagctagacttgcaggagattcaagataacattaggagccgccgaaacaagattttcttgcatatggaggaggtgtgttaactttgtactcttttgtcatatactgctacttgtgtagtaaaatattagctttgtaagcttggcgtgtatgaaattgcttgtcaaaatagataacactaaatagcattctgccatcctttggttactgccacacaactaatctggaaatggtcacacccgtttctaaaacataagtattacttaatttgaattaattactaacgcttagtgtgattgtgttatgggacaatttgttctatagcactgaaagatcgcttctttttggaaaatatcactgaaacaacctaaatcatataataccaccgaaagtaataccaccgaaagatagaaacattgtggaattctatctctgtgttagaattgatcggctttgagcacattttccttgcttattttctctaagacacataactgaaatgacagaaattcccatgtgctagactggccagaacaaggctgaaccacaccctatcggttctgtctccaaattgatgtggctatgctcacgtgctgcacacactcccctttgctcctctctgccccaggccgccacttgcccctgttccacacctggacacggcaaccctgccatgtccccatcggcccatccaagcaccaggcaccacccgtgctcatcgcccccaagccatgatgtcagcagtgagacaaggagggtagctcccaagcaggattagtgcatatgtgctaaaatgcagcgctatcatctgtgttgagaaggcagctagcatatctgtggagattctgctgactggttgtgttaaaatgactggttctttgttcagatggcctggggaattttggtcgaagttaacggcagccggtccaaaattattaaacagaacaaaagattgctgaatcccgtaatgtttggatctttgaatggtatcttacggaaccaggttcgttcggtggtattttccaaaagacacgagcttataatggattttcccttgtgtgattgggcgctgttgctatactcatttttttgggaatccatgttatgcagatactagatgactgcccatgtgaactttcagaaaacttgagatatccatcgatgtttgcatgtcttgtgcagtttctttcgttctctacatccgatctagtgttttagttgcctcttctagttgattctggttgcagcggtgccagaaaatgcatcatatgctctttctgagtcttagttctgtttgccttgttcatagattcggcgattgagaatacagcaaagaataaagaatgtggaactcggaatttcagatgaagagagtgatcgggagctccctgattttccatcatttatccccttcttgcctcctctggtatgtatctgtgcctttgagcactcagacactacaatgcatggttgttactgatgtacaaacttttaccttatgtgaacagagtgcagctaatctaaaggtctactatgccacatgtttcgccctcatagctagtataatggtcttcggtggtcttcttgcaccaatcgtaagtcacagttctcaattttggtatcactaatattgactgttatagttttattttgccatataaattgcttgaaatgcttaacaacttgatgtgctctcgtgcagctggaacttaaacttggtctagggggcacatcttatgaagactttatccgcagcgttcatctgccgatgcagttgaggtactaccacttctccacagtccattaatctatcaaggatcatctagctagggaagtcaagactggtctgccatggctactgactgcttctctcttcatttgtctacatgtactgcagtgaggtagatcccattgtggcatctttctccggcggagcagttggagttatctctgccctaatggttgttgagataaacaatgtcaagcagcaggagcataagcggtgcaaatactgtttaggaaccggtaagttttcttccaaaaccttatttctcaaacatgcaggactgcaggagagctgcgtacactgcattaagaactagaacagggttgaagaaacccttacaaacccacacaaacatgtgcccagaagcacatgcactccacaatagcttaactagcctccaaaactttttcatgatcatataacatgaacataagttctatggaagattgcatgtgccattcagttttcgcagctatatagtcaagtgttacctaacattattatgttggcctgaagctcacactgaagcctgagatatgttgtgaagttcgttgcttgctcagctttagtgcagtaataagatgttgaaacagtggcgaagctaaagtaaattagagggtggtgcaattctctaataaatatgaaattttgaggtgtaacaatggtgaaaatttgattgtaatagtagtttttcaattttctatgggtgcatgtgcacccacaacaatgaacttagcttcgccactgtgttgaaacctgggtcaaaatagtttcgctgaaatttggttgttgccgatgctgatgctgatttgttgtgagaggaaaacactgctgaaaaacagtgttgtgtccccatatcataaacttgttatgcattccatatgatcaccaaaatatactttttcatggaagtcttcctttttagctatgtatgatgtgcctagatgtcttgtaggatacctggcatgtgcccgctgttcaagcacgggtgctcttgtgctcactgagcctgtgtcaacattcagtgacggcaatcagcctttatccgcaccaaagacagagagatgcccgaattgctccggctcgggaaaggtaaattatatctttttacatgctgaaaatcttcgtgtcaccacctcattagtgattctgattgcacatgaatatgaatcatttttgtgaaaaaatccaggtgatgtgcccaacatgcctctgcactgggatggccatggcaagcgagcatgacccccggatcgatccgtttatttgaggcgcactgtagtccaggaactgttgtagcgtgtggaagactggaagtggaagatgctttgtagataatagtatcgacaaatgactcacagataggccgaatcgtgaaatttgaatcgacattgtacttgtacggcacgaataggatgagctgaagagtgcagagaggtgttatgttgcaaagtaataattcgcgcgtcactgtatactactactagaacgtcttttttcatccgacactaatgactcaaatctcatgatgaatttggtcacgcatgtcatacgtgtatctattagccccagatgatgctttcggttgtcgatgcattgatgcgctcttggggcagttggggtggtgttccagccatgtaatcgtaagttatctttgcagcgtattttttcattgagtcaacagtgtttttttatgataaatcagcgaacggtttagggttccggtttctgtcaccattcaaacagtgtagccccgggctctactttcctgccaccactgagcagaacttccagtgattgttgcagttcacacatgtgacgaacgggtaaacattggttcaacagcagtatgcagctgatagtaggccttatttagttcctaaataattttataaaatttttcagattctctatttcatcgaatcttacgacacatatatgatgcattaaatataaataaaaaaataactaattgtatagtttacttataatttactagacgaatcttttgattctagttaatctatgattggataatatttgtcaaatattgtctcccgctggccacatctgccacacttgaactgatcggttgttgcctttggtgctgctccccgctatacataattagtacatatgaacatatgacctatggcgattaccttcttgattaaacaaaagtcttatgtgaaggaaaactatatactcatatcacgataatgcgcatgtcgcacatacatctatacctactactaaattgtgaaaatttcagtttgcctaaaactttcttctgccaccaggtatctgtccgccacgagtatgtctattctttatttccttccaaggccaccgcaacgtttccttcccacgccatcaccgctcctgtctcgcggtgccgtcccgcgctggcgctgcacgcgagacatccccttagcatccgcccacagcgcccccactcctcccgtccacgcataggggcgaggtcgccgctcctcctgtccgtgcggagcctcaccactcctctcatttgcgcacagggccgaggagctccaagcaaagaaagaacggacgaccgccggcagccgtggaggaagaaccatcgtttggggcttccagttgcgggcaacatgcaggccaccggagtcatgttctcacgcatcggacggctgggtgtactactcgacgtcaaatcgtcggagcggcagcttaaccatggcaacatcgacaacgccggagccagcgagtactcagagagagaccatgttttggccttgccgtacgggataaaggaagtcgatgcctggtttgttcatagggattgtctcgtcctagcagtgacaggaataggtaggtgtgttttctgtaatgccctttttatattttatagtttattatttttcccccacatgaatagcagttttggcctccttttctcacatggataactctactggcaggaaagtccctttgtttttagatcctagctacactaacaacaaagatcatggtggtcatatcacccttgattagttaatgcatgtttagtgcctaaaacttgcaaatcatgggatacctgctgcttccttggatcaggataacctgatagccatgttgagggtttcatgcaggaggtgatatcaagccctggtctagagcttgtggacaatgatgagtccaataaatctggtcgtgatgttcctaatgggttgtttcatatcctaattttcagtttaatgaacgatacaagatcttaaatgtaccttttatgattactactgaaaatagagttcccgatatgaccaaactaattcagaaattatatattatggaacaccccttagtcatttatgctgcaatcagtaactcataatggtccattcttaaattaatctgaaatgtaatattccttactagatgatcatgtatttgtaaattctaggtctaatatgcatattgttttgcgagtgtgcacgtgcttggctatttattttggacaagtcagataagggaggtgaaacttattatgtactctaattgctggcgtaccaaacataattgtataagcaagaatgattgtatattttgtgaagcatcttgaagtggaataaaaagatatttaagcctgattaattccgtgtctttggttgtgataattagcatgagtacggatcaataaattgtatatctcccgttgcaacgcacgggcatttttgctagtaatatttaatttaattatgaaaatttcagtctgccactttttcatccgtctaattttcatccgtccaatcttctctataaccgaattctgcaccaaaagcgggcacccgatagcgccacgtcacccgcttactctccagccgttggatcgaccgttcacgcgatcgggtccattcgatacaggtcgtagcgggtctctcacccgtcaacggtggtcccgaacggttgcggatcctcgcgaacccgctcgcagtctcgcacgctattcccgcacatccttcctcccagtgcggcaggccagcggccccatcgtgggcagggtgcgggcgctgcggccgcggcgctcccggccatcccggcgcaggtgggtccccagagacctcggcgaccctggcggccgtgccgcggtcgtggccgtgcgccgcgccgctgcagctgggcctgtatgcgtagcaatcaggccacggcctacctcctgccgagccacggccggccccgggaacatgcgggcccggtgcagctcgctggccggccaggaaccgccgccgtggccatccccgggcggaaccagccgccgagaaggcgagcttcgaggcggtcgccccgccctcgctggccctgatgccatcgcggagcaaggagctgtgcgtcagcagcagccggtgctggatgaagcgaagatgggaggagaaggcgagcagcgtcagctgcagggcaagagcaagcgacaggcctgacttgttctcacctgtgcttgtagccatggactggcaggagtgcacgtacgtttctttcctccctctcattctgcccgagcgtgccaaaaagtgctccaatttctcggttgaattggtatagccttagctttgacctgtgccaccgctgcctactgattcacgtggagaaatctccccttttcactagctgattgagctactttgcttgctgatcagtagatcagaaaccaacgtctactcgaatggaagcaaaattaccgttgtccactgaattttatactgggcaatactgggaatttgagtaaaatgtagtactgacatctacgaacggtggtccatggaaaataaggagtgaataacttgtgtaatctattgatgagtatttcttggcagccacaacagatgctggtttgcattggttaaggctggattttgtagggcccaggctgtaaatgattattatatatgtcacccaaaacacctgtaagcaactagaactatattcaataaatgttgatatgtactcgcaataggcaaggcttgtaaatctgaccatgtggactctgatcagaattcaaagtgtagataaaaggtcactgcttcctgctttatagttataggtgactgctgagtactgggttatgcatgagttttgattaaaaaacttcccaaacagtatcttcagtgaatagcttgctagacttacttgcttaacgtttcatagaagttcattcatcaaaattttacctaattatacccctgtttctacagcaaattgcaaagagatttatttgcagactataaaatctacatgaactgtatgatgcatagatctttctcttggcctcagtactagacttcgtttctttttgtttgccccttgtgacattgtaaatatgatttcagtgtgtgttttcctccactttagttaatatggttattgtccgctgtttcctttaataatgcttggcattgcatatattgtgctacattaagtatgttcagtttacaaatccttgaagataaacctgatctttcacggtggactctgaagtacgaggtccttgggtgggatgtagaattttcttggcttgcacgtaacatgacagtaagtatctgcttttacaaggctgctatcagtttagatatgaacatcattgacattactcacgtgtcagcctattaaaaaccagaaaaccaattggcaatctctccaaggtcttcctaataggtaagtattacagaatctgcggctattgcatacataaattagagaaaggttaggtaatagagatatagatatagatttgatagttttttttctcccgttgcaacgcacgggcatttttgctagtgttgactaatatacagaaaggatcaactgattattttcctattagcccctcatttctttcgtaaggcgataaacaagacaccggaaaaagaaacaaactagtacgagattggcaccataacaatcatggaacaatatccgctaacaataagggctacaggaccttgttcgcttgaccttatcagccgaatctatcagccatttagcagtatttttctctcacaacaaatcagccaacaatactttcaatagtgtttttctcttacatggcttatcatgctacgtgcaacctttaattagcttatagctaatttattagtgactgttttttggctttggtgggatgcttataacaaggcgaacgctagggataaaatcatgtctattgaggagatggtttacaacatatattctatgaaatatgttgatacttttcatacaggccaaataagaggaaaagtatgatttcttgttaggttcccccacggacgatgtcataaagattaacattgatggagctttatacaagaagaaaagaaagttgcttggttctattgtgagggatcacaaagaggccacggtgtgcaggtataatcaaattggtgcatgatgcattaagtactgagccccaagcttgtaagcttgttttgctaccttttgcatagcaataaatcatggtttatcccggatcattttggagaatggttcgacaattttagtaaatgctctacagtcctgcttttatgattcttttacaccagaagctaaaaatcataaaagcagaagctaaaatgttgtattgttcatggattttaatcctcttgaaaaatatattgcattccataggtccttgatcacgtcaatcccgctggcacgaccaaataacatagtcgcgccacatgcgttgccgtggcaagcttttagcagatattgttccatgattgttatgatgccgatctcgtagttgtttgtttcttttcatgtgtcttgtttatcgccttacgaaagaaatgctaatcagactaatagaaaaatattttgtatattagtcgacatgtatgtgcgacatgtgcgttattatgataggagtatatagtttttcttcacataaaacttttgtttaatcaagaagataatcgccataggtcatatgatcctctctgcgtcactttgccgatgaaaacctttcaccgaaaatcagttttgttttcagcctttaggttgaacaagattgacatgcattttgtcttatgagacccaatgaaacgtccaacgatccaagcctctcaaatagtgctgcaaactcaactatcacagtaaccttcatccaagatgtagttatgcaaatttacatactatcacatatattaggtgtagagactagcaatctctatgaaatctaattgatgaagactttttgttataaatcgctcagattacttagagtgactggccttgtttagttcaaaaagtttgcaaaataaacactgtaggactttcgtttgtatttgacaaatattatccaattatggactaactaggcttaaaagattcgtctcacaaattataaaaaaattatgtaattagttattatttttatctatatttaatactccatgcatacaccgtaagattaggggggtgtttgggactgctctgctctatgtttttagccaaaaggtttcagctccacgcactaaagaggtacttcataaactccactttttcatgaagctgctccagtgtagtttgtagagcagagtttgtggagcagtaccaaacacccctagatgtgatagagaagctaaatttttttgcaaaattttctaggaactaataaacaaggccggtgagttttggctaggcgcagtcgcgggccctgcctgtcagccgtgtctcccatccgtcagccattcgttcccatctcctccttcctcccgaaacttgcctgcgcggccgcccgtctagcaccactctccgcgaagcgccgcccgccccgtgcctcccaccgggccacttcgctagcgccgcccactgcagcactagccgttgagcgcggcgctcgccgccgacttctctcgcggccgcgtcgtggacccacatccccaccgattcggctggggtccagcgaggggaaggcggccgatggacgcgctcatggcgagctacgcgtccgactccgactctgacggcggcgagccggctgccgtctccggaggcgccccggagatcccggagccttcggccttgctcccaccacctcccctcgacctcctccagccccccaacttcgcaggcatgatgattccttgcgctagcatctctttgaaccttatggctgctcatgttctgagtgctgacggtatgtgcctatctggggacaatacgtggtgcaggttactcggcgatggcgcaggggggtcgcgtccggagcttcccccatgtggaaggcaactatgctgtacatgtttatatccctggtctgtgcttttgcttgttggtcttgctacaaatgttcattgttcttggatgtgaatgtgcacttagaaattgagatcaaatatatatgatgtatcctcttaactactccctgcatcccaaatcatcagatgttttgacatttataaattcaatagcttttactatgtatgtggacaatgtatatctaggtctgtagcaaaagttatcaatctaggaaggtcaaaaacgtcttataatttggattggagggagtatcttataatttggaacagagggagtatatggtgctcggtgttgtttcaaggattagaatgagtttgtcaataaaaacttggcaactaacagaacacgcctggaaataatttctcaagttcgcagtgaaggggaaaaagattaccacatttttttactgaaattgtggccatcatatgacctcactgccccaatgttcacccgaatacttgtagaactagaatcacaacaaattttttcaatctataactgctcctcgcttatatttagctgtcttatgcagtcgtcataccttccgatgcgatgaaacagctggccctttctatgaaaagagctgcatctcttgtgccggatctctatgctgttgatgcagactatgcactttctgaattgtgcaaagatgaacagaagcttgagaaaatgcttctgagcagggagtttcatgtaagcttgggaagacctgttgcaattcaggtgcatcagattgactcatttattgcaatgcttcgccagaagttccagacacaacaacggttagtcatctctaagaacttcgctgcttggtgactactagtttgtcccctctgtggatgcattttcctgtacagggttacagttgcatagtattttttttttggtacttttcaacttttgtgtctcattgtcactgattgagatctttatacatgtggaacaaaggtactggatggagttcaataaatgggagcactttgtcaatgacgattgcacacggtcatttctttcactagaagttacaagaactggtttgccagaggtatttacagtacatgtttgttccatcttgtgtttacatgcattaagggtgaagcgtccgcttatgtctatgtcagattgaattttcacaatgaaaaccttttgcatcttgtgtttaccctcagttttctttgcagataaggaagcagatacttatggtagatgaagtatatcgattgcatggtcttcctgaattttacacggtaatggatattaagttatgcattatattagttttaggatgagtgacaagatgctatgaaacatgagcttttccttgatttcaaattaattcattcaattagataaatctagcacataattcgttcaaatagataaatctagcaccttgcttgtaaaaaaaaaatagccagctcattcttatggtggaattgtctgatatgtgtaggccaatagtatgcaaaaaagaagctgatgtctttcatgcataagactcttctaattttgtcaccaaatctaaatgttatttaactgtcacttgatcatttggcagaatccacggccacatatatcattcgtgtgggcattgggtgatgtcagcagcaaactaaagcaggcaataaaggacattgaaaaatatcagagcagtatgagctcattgcaaaaatgtaacgttcgatgcaagttcagtcgtgtagtttgtaaagtaggtaagaaggtgcatgatatctgtaaagttgcatattgaatcattgaagcacacatgaattacgttcgataagctttgaggtactgacctcttatggtctgggctaattcttcggattggagcattgaaacacaaatttatgctcttcttcacatggcagtcactactaacttttcccatgcaaattacgaaatgataaagaggtctattgaagcgtaagagcatctccaagagctttgcaaacaaactttgcattttgcattgccctatttgcaaaaaagagtagaaaatacccctccaatggttttgcaaataaggtttgcaatttggttaactttgcaaatagaggttcaggctttgcatatatgcaaaccttcccaccactttgcatctacaatttcgaccttccacgtcggactctgtccctccggccctcccaccccgcgcgatttctctacgcccgtccgccctccctgccgcgcgcgcccgccctgacggaggtggacggagccgaactgacgcgaacgacgacggcgacgaacgacgaacgtggcctgggctgggcggcgactggcgcaaagacctgggctgggtggcgactggcacgcacgacgtacgtcaaaatggcgcgaagtacgtcaaaatggcgcgaaggaaaaaaaaacgcgcgggtgcgatcggtgaaaaaaaattcaggggtgagatccatactttgggtttgccaagtctaaatgcaaagtcctttagagttggactatttttagactttacaaatgagtttgggaatttgcaaacaacatcaaatgcaaaaattatttgcaaagtcccttgtagatgctctaagagctatggcacaaaaaaccaaattgtgttattctgctaccttttttagctctccccaactattccttctacagcacccactcttgttgagttgagctgagcaaacacaagtggttataatagctgatcttcccaaggttgcagttttgaaatttgcatatggcctttaagtgacataaaacacatgtcacattcctctgaagttcctagttcacacgttctcatcatccacatgaaaccttgaatattctgcaccatttatcaattgggatgaacagagatgccaacagagttcaacaatgtccgctctctttttggtagtgtggctccatatgctgtaccgcaggtatctagcagttcacttaagagttaagaagaccattggattcagaacagaggtaatcctactgtgctgcgatgcattgatggtcctgaagtacggagtattggataacttttttttatttttagcccaaattcaacacatatttcaaatttgacccggtttcgaaaatattttcaaaactagtccgtttggcccccgccatgcatggcggtggggtcaaggtgcctgctgccgtggcggggtacgtggcaaagtgtaccccgccacccattatggtgggttaggcaaccccgccgcccatcatggcggggtattgttcatttatgtagagtatcattcagtcttcaagtatcgttcaattgcaggaaccagtagaaaagaaagtaatcacggttcacgagaagggccaggcaactttcatatcctttcagctacatggactagcagcatggagcagcagctgcaggcgatgtacggccttgtttagttccaaatttttttgaaaaacggttactgtaccacttttgtttgtatgtgacaaatattgtccaattataaactaattaggcttaaaagatttgtcttgtaaattacagataaaatgtgcaattagtttttatttttatttatatttaatgcttcatacatgtgtccaaagattcgatgtgatagaaaatcttgaaaaaatttgagtagaccagcagcaataggcggctatgctgacccagcagcagcagcaggcaacgcccagcagccagcataggcgatgctcagcaggcgatgc

SEQ ID NO: 4539 - DNA, 2692 bp, Sorghum bicolor
cagagtatcttctagtctatgaaatatagcaaaaaagtatttgtatggaactcagacgaatatattcatgtcatttatagtgtctaaactcagcatataatttagaatggttgacttagagcaacctcaaagtgtcacttactagtgatcggagggagtacaatgtttacaaatctaatgaaaagtttgctagttttcagttatgaataatgcttctcgttttacaagacatttctactttccaggttttggtcattgactacaagttaacctacccaagtggaactgcaactgctgtcctcataaacggtttccacaccaagcaaggagacaagaatgcaaagtatggatttcatcaccccacctatgctaggttcatatattaggctgcggttggatcaagcatcccttgatcacgagttactgatccaagtgaactaatttactttccatgacaggatgcaagtccatgggtttctgaagtactttgggctcagcttcatatggagttttttccaatggttctacacaggcggtgatgtttgcggttttgttcagtttcctactttcggtctgaaggcttggaagcaaacgtaaatatgcatagtctgctgcttcaaatatcttcataatttgcagcacataatgctatctaattctcggtttcttggctgtcagattcttctttgattttagcctcacatatgttggtgcggggatgatttgttcacaccttgtgaacatctccaccctccttggtgcgatcctgtcatgggggatactatggccactgatcagcaaacaaaaaggagagtggtaccctgcaaatataccagaaagcagcatgaaaagcttatacggttacaaggtctctctctcttatcaccaaactcttatttttttgacttgcttattcttgaaaaaaaaagaatattggagatcatgtgtcactaaacatgtccatttttccccttccaggcattcctctgcatagctctgatcatgggagatggtacgtaccacttctttaaggtctttggtgtcaccattaagaacctacatcaacgactaaaccggaaacgtgctagcaacagaggtgagaaaaatgaaaaacaccacagactcaattctaatgcataacttttccacctttcatcgtttcaaaatttcaagagagggagatagactaacctgttgttgttgattgaatgaacagtagcaaatggtggggaagaaatggtcgcacttgatgatctacagcgtgatgagatcttcaacgacggatctttcccctcgtgggcagcttatgccggatacgcattgctgaccatcatttccgcgatcaccatcccacatatattccggcagatcaagtggtactacgtcatcgtggcctatgtcctcgcccctcttctcgggttcgccaattcctacgggacagggctcactgacatcaacatggcctacaactacggcaagatcgcattgttcatcttcgcagcttgggctggcaaggacaatggagtcattgccggcctcgctggcggcaccctagtgaagcagctggtgatggcatccgcggatctgatgcacgacttcaagacaggacacctgaccttgacatcgccgaggtccttgctcgtggcgcaatttatcgggacagccatgggctgcatcattgcgcctctcacgttcttgctcttctacaacgcgtttgacatcgggaaccccaacggttactggaaggcgccatacgggttgatctaccgaaacatggcgatccttggtgtggagggtttctctgtgttgcccaagcactgccttgcgctctccgctgggttcttcgcgttcgcgtttgtcttcagtgtcgcccgggacgtcctaccgcggaagtacgcgaggtttgtgcccctaccaatggcgatggctgtgccgttccttgtgggtgggagcttcgcgattgatatgtgcattgggagtctggttgtctttgtttggaacacgatgaacaagaaggaggctgtgttcatggtgcctgcggttgcgtccgggttgatctgtggagacggcatatggaccttcccatcttccgtgctcgctttggccaagatcaaaccaccgatttgcatgaagttcacgcctggaagctagaaacattatggacagttcgtgaaattgtagaatgtgagtgagattcagtgaaggcatcaagtgtgattagtggtagtggacataataagttgaagccatgtcgcctgtattatctttgttgtgtatgtgtgggttctccttctccgagagccacaatacttgagatttctagagctgatatgtttttcatcatgttgggtttaacctatatttatgttttggaaaaaaagattactacaatattgtctaacggaaattaatgctcatttttgtatttacattctttcaagattttagctactgacttgtataatatgctgcccacaatatgaattcatagattaggaagtaaatctagtcagggttaaaagtgtagttgtgcattcacagtttcacacaatgtcaccatctaggtaaattctttttaactaagggtgtgtttgctagtgatttaattcttgtagaaatattttagatctagatttttttaagaaacatttcagataacgtggcgaggtgtcacctggcgcttggctgctgg

SEQ ID NO: 4540 - DNA, 5552 bp, Sorghum bicolor
cgcgctcttcatctttgactagagagaaacccgaatagagaaagacaatattggagagtcaattagaaaagttgttggatggtatttttcatcaaagtctttattattcctatcaataagaaatgatataaagacttgaagttgctctaataatccttatttctaaagaggaagaagtcatcaatagcttatatggatatgctgaaaccatctccctcttattagtgtaaataggtcagtaaagatatgttgaggttcctaactgttataactttgaaagaaaaacaacatcgttcgatgactcaaagagatgatgaggccatcttcgtaatatccccatagctccacacaacacagtgggctcatccagatatgctaagtcttaatatcttggagctaaattggttacatttcactatagatatctaagatcagatagtatttattatttccaaaggagaaaacaaattcgacaacaaaatggtgtatatatattactctaaagagcatgctatatagtgtgaggaaatgactaggccgatttcatgaacaatctcatttgagtatccacaaatcggattgtctttagagtattttggataggttttctaaaattccatttggtcgggctctaaattctctaaaaaaatgtttcaaatgttatatcgggaaatgtttcctggtgaactggaatcgttttaaggaaccgtttagctatctacctgaattcagattaaaagaagtagaattagaaaacaaatatctaaaatcgttatctcttccctcgtgtaggtcaaaaggctaaaatgtttctctctggttgtaatagaaacatttccagctacaatgcgttaggcatggaatacagacactgcactgaactaattctctcgtccaaatatgtcataggaagatcactagttagtagctctcgttaaagagcgacgtactttacgcataccatgtactgtaagatgtagcaagcaaacctctgtttttttatctcacatggttgctgaattattactcacctatgagctcaagtcaaaatatctctaccgatcaattgcaaaacggtaacttatttgtttagatttccgacaagcactcctctgctttttacgtgttatattaactttgtcctaagtcaaacatttatatcttcaataatcaattttttttaaaaaaaatatatatagttctatggcataagatttatgtttttaggttctctaagagaaattttttataatatataatttatatgttatgaaagaataagggtttttgaaatagatggccacagatatttatgtctgacttagctcaaaactaatgtgacatgtaaaagaaatagaggtacgtcttttattaaaaaaactggacatctaacttttcaagaaaccaatcaatttcagatttaactaagcttataaaaataatattaacattgatgttttcaaatagttgtactatgaaaattatattgcatgattattctaactatacttattctatcatagatgttaatgttttttatagatttgattaaacataaaattgattgacttttttaaaaaaaaataagacgtgtattcttttttggatgtagggagagtacgctactacagtacgttagtgttcctttggccgcatcgcgcaccccccctgcaacgagcacgcggtggtgcagatttattcccacaagtcacagctgaataaccgaagcatacatactgcggaaatggtggaagaactgctcgacggctcgacaggaagccacaaacctgaaagctccttgattttggattttctacatttttggatgacttttgcttctacgccatgtcgacatcctggacacagagcgaggttgcagatgccgaggaccagaaggcttgcccatttatatggcccgtcgtcagagccctgggggctggggcagtccgccgctaatcactccagtccacagtagttcttgctctagccgctctgccaatatggagatcaaccccgcggacgagatcgacaagtgcgaggccggcggcggcgcggagccgcagcctgcagatccggagcccgaggccgcgtcgctggagctggagcagccgcagccgtggcgcgagcagctgacggcgcggggcttggtggcggcggcgctcatcgggtccatgtacaccgtcgtcgtgatgaagctgaacctcacgacggggttcgtgcccacgatgaacgtgtccgccgcgctgctcgcgttcctggcgctccgcggctggacgggcgcgctggcccgcctcggcgccgccggcgccggcaggcccttcacgcgccaggagaacaccgtcgtcaccacctgcgccgtcgcgtgctactcgctggcgctctgcggtacgtgccaagacacccctgacagctcagctcagctcgcttggcttggctggcacgcgcttggatgcgcgtcgcgtcgtcgcacttgggccacgtgtcgtgacgcgtgagattgctgtgtgcggcggcgctggcgccgccgcctgtgcagggttcgggtccttcattctgggcctcaacaagaggacgtacgaggcggccggagtggacacgccgggaaatgtgccggggagcgtcaaggagccaggattcggctggataaccggcttcctcgtcgccagtagctttggcggcctcctcaccttgattcccctcagaaaggtgcttcatttcatttcacatgcggaaatcttcttgttttgggggcgaaaaaaatccacttcagaaggtgggcagtaataaattatttacttttatcaggctttggtcatcgactacaagctgacatacccaagcgggacggcaacagctgttcttataaacggcttccacacacctcaaggagacaagaatgcagagtgcgtatggagatcttctctcctgttcattaatggttatataacagctagaatgaagccgattattagacagtagtatgtgtctatagccccatttggtacagcttcaccaccagcttgatgagcttttgtgagctatttttttttaccaaacatccttttaaaaagaaatggagaggggcgaatcagaaataagtagctttttatagctctcttcttcatttttctctatcagccatgtataaaattgttggtgaagttgttttgcaaaacattttgtgtaaactagctcaaatgctcaattgcatcgaaaaagctgtttgggaaacagttttcaaaaagaaaagtttactactgaagctaagctgtaccaaacggggtctgatccgagaatgtgaatgatctattcttgctcatactcaactgcaggaagcaagtgcgtgcatttctgaaatatttcgggattagcttcttctggagcttcttccagtggttctacaccggcggcaacgcctgcggattcgctcagttccctacgtttggcctcaaggcctggaaacaatcgtaatatactgtcttcatgaattcttgcttgtgctactcatcctactatttcatacatacataaatggcggcgacccctctgaagtctgaaccctgttttttgcctgctatgcttgcgatcaggttcttcttcgatttcagcatgacgtacgtcggcgccgggatgatctgcccgcaccatgtcaacctctccaccctcctcggcgcggtcctctcctggggaattctgtggccactcatccacaatcgcaagggcgattggtactctgcagacataccggagagcagcatgaccagcttgtatggttacaaggtctgctgactcacacacactttatctgagttcatggagcagtacatcttagtacagtagcgatttggttgctctgccgtgcagtccttcgtgtgcatagctctgatcatgggtgatggcatctaccacttcgtcaaggtcctcggcgtcaccgccaagagcctgcatgaacaatcaaaactcagacgtggcagcaaccgaggtagcagtagcactagcagaggtggagagtagtgcagtcctactctaccttctttcgtatttgctacttgtaatctgattcttcaacactaactaactgaagtgaatctgatggtggaaccgatcgaacgagatgcagtggccgacgagggcaacgcggccgcgatcgacgacctgcggcgcgacgaggtgttcaaccgggactccatcccggcgtggctcgcgtacgccgggtacgccgtcgtgagcgccgtcgcggtggtcgccatcccgatgatgttccggcaggtgcggtggtactacgtggtggccgcgtacgcgctggcgcccgtgctgggcttctccaactcctacggcgccgggctcacggacatcaacatgggcttcagctacggccagctcgcgctcttcgtcctcgcggcgtgggccgggcgcgacgacggcgtcgtggccggcctcgtcggctgcgggctggtcaagcagctggtgctcatctccgccgacctcatgcacgacttcaagacggcgcacctgaccctgacgtcgccgcgctccatgctcgccgcgcaggccgtcggcgccgccatcggctgcgtcgtcacgccgctcaccttcctcctcttctacagggcgttcgacgtcggcaaccccaacgggtactggaaggcgccgttcgcgctcatctaccgcaacatggcgctactgggcgcccagggcttctcggcgctgcccacgcactgcctgccgctgtccgcggggttcttcgcgttcgccgtgctcgccaacgtcgtcaaggacgtcctgccgccgcggtacaagaggtacgtgccgctgccgacggcgatggccgtgccgttcctcgtcggcgctagcttcgccattgacatgtgcgtagggaccttggtggtctttgcctggcaacgggttaacggcaatgacagcacgttgctggtgccggcggtggcgtcaggcctcatctgcggtgatggcgtatggactttcccgtcgtcgttgctttctctcgccaagatcaagccacccatgtgcctgaaattcacacctggaagctagataaatgtcggatccattgtcaagtgttagtcttcggatactgacctgatgcagtctgaactctgaggaaatgattaaattgggatgtatccacatctgctactatttattcaattgaaagggaaaaaaatgttcgtggttcatggtgtatatgcccatgaggccatgcatttttctgtagtacaaaagaaaatttcgttagatttaacgctaattaaggtctaagtattgtgattcatatcaattcacgtgttgagatggattagaataaaacttgaactaatttctacccctaatccactcaatacatgtggattgaggtgcatgcaacaatatccaaccaatgcctcagcggaaacgtggaaccatggcacgttgtcaccccattatgtgaggtgttaagccaatggtgcaaccaaacaatgtgatgttgttcttgttcttcctgagaaggtgataacacttgtcatgctagtatacatgacgtgataaaatataat

SEQ ID NO: 4541 - DNA, 7984 bp, Sorghum bicolor
ttgtatgaaattaatgccatatctagaatacaagaaaaggcaaacaaaatggtaaacgaaaagggaaaatagaaatggatatgatttcgtctcaatgaaagcttttgcgcgaatgagaagtttttggcagttcattgagtgtgaattgtgatcaaaaatagattgttgaagaaataaaagcaatgatcaaattatgaagaaacaatatataatggatttatcaggtctcaacattagtttgcttctatgacaaaggcaccaaaacggttaatcaaagtcactagatcatctggttattgtgctataatattttgtgtgtgttagtgttgttgataggggtacaatgaaggatcctgtgtggaccatggatgatccattgccattatgatgtgaagactttcaagttggacatgcttcttggagcatatttgtctcatagtgtcatttagatctttggactcgccttgtttgtttgggcttatcagccgaatctgtcagtcatttagcagtgtttttctctcacaataaatcagccaacaatattttaaatgtttaacattaaacaatcaatcaattattgtttagctattatcaggctaaacaaaaaatattaatttaaatgagacaaacggttggttaaatggagatagcataccaccacacaacgtataaacaatgtgtaaatgagctaaatgacaatttttttaggcaaacaatgctcaacatgcattttctatgtacttatggtatcatctagatactcgaaccctaaaaatgttttttgggtacttgtacttgtcttgggtgtcgttcaggtctataactatcaaagtatttttttttattaagtactcaaactattttgttatctacatctaaacgagctttaatcaacccattggtctctattgtctatatgtcgtgccactcttctagtttcatctccatgctcttgttctttctccacatttcaatcttgtgtggcactgcatcatagctaccaattactgattctcaatcaatgttcttgccacattgcatcataaagctgccaattagccatcctcaattcatactttcataatcctccatatcaaaggtcattatgtcatcagtagtgggcgtaataagaccaaagctaccgctcaaagaggtatagtaaacgtcataagttttttgataactcaagcgagccaaattggctcgccacgcccgataagcttgtcatagccaacattgttggtgaggccaaacgaactcacctttaactcatcgcgcacctagctgatcgagtgtttagatctaacagatttcctcattttctgcgctggcaaggatgttccttgctatctttttttaaaagagaatcaactctgcttttaagaaagcacagcgtaacaggttcgttggggttacctacattacaactcacgtctagatcagcccaaagatagaaaggtaaagacgacatctagagcacaacgactaaaaaactgttagatttcgaagacattagtagcagtggaaagcttgagtttaaagagttcgcttgagtttaaagagttcctcgctatctcaggctagctaatttctctctcgccctagtgagatgaggctagcctagcttggcatggtgaggtactgaggccttgtttagatccaaaatttttttagattttgtcgtttttatttgacaaacattatctaattatggagcaactagacttaaaagattcgtctcgtgatttaaagataaacggtgcaattagttatcttttttatctatatttaatgttccatgcatgtaccgcatgattcgatgtgatgaggaatattgtaaagtttgtatctaaacaaggcctgagttgaggaaagccccgaatctgcgttcaccaccaatgctacttggctcttccatgtcccacacacgtgacaagagagagccagacagctcgacctcgaaagcaggagtccaaagccgagtggacaactggacacccaacagagccacagaggaaacgaacccgatatggccgccgccgtccccacgccatccccattcctcgcttcaacccgccgcttcggcttcgcccctcgcctccgctccctcctccccgccgctgccatgtcttccgccgcggtatccgcctccgccctaagccccagttccggcactggggaagaggcgcaggcggccccgctcccgcactcgaccctcgagatcgcgggggcgcgccggggcctcctctccggcttcagcagcctccgcgccccgtaccgtgccttccccgtactcgcgtccaaccgacacgtcgagaccatcttcgctgcgttcacgcggtcgctccccgccgttaagctgcggcgcgagtgcctccgcgcccctgacgacggagccatcgcgctcgactgggtctctggcgacgaccgcgcgcttccgatggatgctccggtgcttatactcttggtacgatgctccttacccgctcgcgtcgttgcgcgttgcagcactgactgcactgtacacgcaggagccgtagtgcgtgctcttttaagggtcaatgatatctgtgattaaggcaggagccgttctggtatagtttgcataagtttaggacgtttacgtttagtgaaataggctgcagtactgtagtagtataatctggaactgaaaatgtagcattgttatgagtttatgagttaataggagtttggtcccaattgcataatctgtttacattatgtagtctcagcatattcagatgatgaactaaacgtccatgccaaatgctaataggatcaagtcacaaacatgtttcagcccttctgttcttcagcatgatgtaaaacgcacaagtttcaaggatacgaggatactatttctcataatcgtttggaattgagttctagttgaaattcactataagatacaaatggaattaaatgaccccaaaataactttcacctgaaacagagcaaaagggtgtggaaccgaataattttcaattccattatcgtttttgttttgcttatagcctaatgtaagtgtgatgtcttttcagcctggtcttacaggtggaagtgatgatacatatgtaaggcatatgcttttgagagctcgaagcaagggatggcgtgttgtggtgtttaatagccgtggatgtgcagacagtcctgtgactacacccaaggtacttcaaatactttttccaattttttattagcagtttagcactgaaagcttatctataggctatagctcaatagctcattaaaagtttcaaagctatacaatggaccatattttcccttttgatacctgtcatggagaagtgctaagatctcacttatatggtttgattcattgagaagtgcactgcccccctttaagttaattatcagcaacagtagacacacccattttgttctggtaagctggacacaactgaacctcttcctagcttagagcatctcctgtgctggctaaaagttggctcatcccagttcatatgtgcaaactgtccaaatatatatatgttttcatgttggcatctggtgtgataaatgcactatatacatcattgcttctgtgtactctttcgctgatgactgttcctacttagggtgtagccagaaactgactaaatggcgagtgaactggcttttactgtaaaacttgacagaattgaagttttgaactgaaagtaggaaaaggttaaagaatattgaagtgtatgattaacaataaattgcattgttgctcaatgttgaatgtttttttggttttattttgtggctacttgctgccctagtaaaatagaccaccttgtgtccttaaactgacttggctgtcataaatttatatgcttcaccctgatgagtacagcataccgataaattgatgatatgcatgttgccaaccaacatcgtttaccatgggaccttgaatcgaactcaatggataaaccttgatgatgaaacctaggggttaacaaagtgtacacaataagtaaagagataaagatagcaaatgaaattgaggcccgaagctgtggcagaccatcttctttttaggacatacgttgacttgcatcttctgtcatgtgcagttctattctgcttcatttacaggggatctccgccaagttattggtcatattttaggacgttatccccagtctaatgtctatgctgctggttggtctcttggagcgaatattcttgtgcgctaccttggcgaggtgagttctgcacccagtgataagcagtctacaataattctttgtattgtcacattcatgtgattgcggttccactcatctttctgtggtgaaaaatgattagtagctaactcatatatgcactatttttctttgggtgcaacaagtgatctttcatacacaccacccctccccctcctgttgttccctggcgcttctttgtatcttcctgcataaaactatgtatggttgatcacaaatatgtattcccccctgcagatcataacttatctttatgtatatatattctttttcaggaaactgataaatgccctctatctggagcagtctccttgtgcaatccttttaatttggtaattgcagatgaagatttccacaaaggatttaacaacgtttatgatagagcattggctagggctttgacgactatatttaagaagtatgtgtttttgtctcctctcatcaattcttagtgacatttgtacccgtttatgatttctaacagctgatctttagggatttgaacaaaatttaggcatgctctccttttcgaaggattggagggtgaatatgatatacccaaggcagcgaatgcaagaactgttagagattttgatgaggggctaacccgaggtttgctgcaacttctaacccaactgtgctagctctaatttctatagttttcctgttggcacccccacattccaaaggatacttcaatggtttgcagtttcgtttggtttcaagtcagtggatgattattactcaaattcaagcagctcggattctatcaagaatgtttgcatacccttactgtgcatacaggtcaaactttcactctatctgttctctgtgcttcactagaagctaggacattaggacaatatatacagtttaagagcctgaggtgcattatttctttgttttagatcatgcattactcagtactatgactgaactttaacccaaagttgttaaactacttgaattaagaatatggaagttcaattaatttatgtccttttggttctatcattggaataaaacctggggaaatattttaacactagcttaggtcttgcatatttagaacccttacttgagaaagttggttcattttgtggtaaagttgtctataaaactctacaaagcagcgtgcatggtatttttttttaaaaaaaagagatttaacagtttcaatgattagtgtgtttatgtgcatatattgtgaaggtgaaagcatgtcgtttctgttgtaacttcaatcataatttagttatgtgcaggctgataatgacccaattgcaccatccaggggaattcctagagatgatatcaaggtatctgctattgtacacccctttttcacctaataatgactcagagatgatatgttgcataagatctagtccatctgttccaaattataagtcgttttggcttttctagcttttgctatgtatcgacagtgtagtatctaggtgcataacaaaagctatgtatctagaaaaatcaaaacgacttataatttgaaacatagggagtacatattttgtttcactctaattgatgagttagccccttgaattaatttgaatcaacaaattgcaggcatacctcaaactgtgcagctgtatcgcccatatatttgtaccttttgttttgttaattacttaattgtgctgttcctgtgcttctctttggctaaagtgagaatcttaacttgaaactaggagttcattaacgacacatacattgattacacattagatgataggctttggtttggtgtcatgttctaagtgtagattaaccatagcaaaataatgtcatgagaaagtcaatataaataacataaccaaatgttgggcctaggacaagtccatttcgattgtggcaagtttaaatcatccaaattatacttgtgttaacaacttatttttatgggggcaatagttatgttgaaagcaatataaacattggtcgctacctccagcatcctatgtgctggggtcttgggtctttttgagtgtttgtgtgtatttgtacttaggctggattttgtttctcaagccctttgtactcttgtattttctatcttaatgaaatgacaatacagctctcctgcgtcgcttgagggaaaaaaggcattagaaacatactatctggtgatttgagcttgaatagaagtggagcgactaagggcatgtttgtattccgcctggccaatggggttggcaggccaaaacatacatatgcgtgttgcatgggaagccagacgtaggcatgccaattattgagctcgatccaaacagccatgtttgtgctggtcaatggctaaaagttggcttggcaagcatccgctcacatcaaaacaaccaaacatgatgaatatccagagacgtgtgccaaaattggacaaattatttcaagctgataaatgtaaatgttaccccaattactcaattagttccttgtttgattgtgctttagagtttagaacaagaaatcgactaataagtcacattcgctatggtttcaggcaaataagaactgtctacttatagtaacaccacagggtggccatcttggatgggtagcaggtgacgaagctccattcggatgtccttggacagacccaatagtgatggaatatctggaatatctccaaaatgagaaggactctagtacaaaaattaacatatcctatgagcaacagggtgtttcagaggcatcagtaccccatctaactgtgcatggccagagatagtaatattttcccttctcagggttacatatgttttatggaaatagttagtagttcatttatctgtctggtctgctgctgcgcttggtacatggttcttcgtctagaggtacgttcctgtaacttaattttgggcctaattttgtattttgatgttcttccgtcaatacgttataaccttagcagggacattgcctgtgcaggtctagtggtctacgcatgtgcgagaagatttctatgtgaaggatgtcaggttctgagatcttaatgaatatgtgttgtccaattgttccttctgatgtgtttcatccggtgtttgaaagggattctccgtaagggctcatgcccttcagtaatgtgatgtgtgaattaaatgcagggttgatggtgatgggcacaagagtgcatcatgtaaatttgacaatgtccttcagggcaaaaaaaaaaaacgaaaattgtatcttattgccaaacttaatctttggcagcatccaagagttttttttgtgctcatgctaacacacatctcatttgctaaacataatcttggattaacatgacaatctgataaaatactgttctatgattctatttcttttacagatgctacgacttaaatatttcgtactacccatgtttagattttccataatacagaacttttttatgggactgtttcacacttcccagcgtggctgttaatgaccactgcatttcctgtataatattatcaggtgcacgcacactagatctccaaggcaatggacggcgtgcacaaccgtgcaagcaacgaacatactctacatgagatttgcatcgcaggatacgtggtacgacttgccactcctcctcccaatgaccaagcagattatgatcctccacctccagacagaccaagtgcgtgtacccagcgaagtgccgatgggggaacgaagcacttacccaaaagcagaaacggaaaggaaagccaggcgaa

SEQ ID NO: 4542 - DNA, 3806 bp, Sorghum bicolor
cttagttcttggattgggtcgatgctagctgctgtacgtgtagtgtgacccagcaatactagctagctaataataactaggctaactatttgggtacattatgttcttaaatttgaaggtctttttttggggggggtacattggtatttatgctgttggctactccaaaatccaaatccatgcaccccaaataattaaggcctagctaggttgtttaacctctgttgtataaaattaataactaatagggttattggacaacagaggtccttgtagaattaagttaatgcagacacaaaaactagaacaattttaagtttgatacaagaggtttaattagtcccaacaattcctgtttgaaatttttaaccatatttattatgaaatttctacagtcttccagtattttaaggagccagattctcttgtctttcttttaagtttttctcattacctccttttctttcatggaggttgtttcagtttaggctcacatattaataggttattttatgtcagaacagaccctctatcttctgtaaatgtgtgtgccagtgtaagcgtgtgctttttttcttcacaatttggaagctatatgtgggtactatacatttcgatgtattttcctttgtccaaatatatattaacatgaacattcccaattaattgtttaatctttttagaactatttagccatataatctatcatcatatatggggcacataaatttgtttgcgcttatgcatattcatatgttgtttagatcatgtatatttctttcatcacaaaggtccgcatgtgcactaagttagcttccttggcacaaaaggaaccaagcgaaccaatgaattaatctggtaatcgtatacatgatgaaagtatctactttttatctactgccatgattactcgcctttttcctgaaaatatcatcccagtggaaataaagaaactgatccatttgttggaaactgaaacatgtacctaaatatatcgtcaaccaatgccaaattaaagttgatatgtatggagtagcaaataaaatttggggcaacaaaaaaatattattggacttctatgtatgggcagagttgaaacggttagatttgtacatcatgatcatatatgtgccaactgtgcttcaaactttgtgtctgtatatatagacatgctagttgtgtacatcgtgatcatggtcatatatgtgtgcccaccctagatataagatgaatcgtagcatgtacatatgttatcccttgatttgggtgctaggttagttaccatgtagcattgcttcttctctatcagaattattaacttaataccttgcaccacttagcagggccggggtttaaggttgttaaagtatttacttgtatcactaaactcaacaatagtcttaacaccactagcacatgccttagcattgatgtgtcatgcatgctagctagtcttggctaacataccttaggccatcctcaatgggaatttcatgacacagtttctaacacatcaatattttgaaaacagtgcataggagtttcatggggatgaaactctctctactcccatgaaactcttatcatctctctcttcattaatatagcgccacatcagcatatttagtgtgcatgaaactctaatgaaacctccattgagactgtccttatacctatgaaactctctctactcccatgaaactcttatcatctctctcttcattaatatagcgccacatcagcatatttagtgtgcatgaaactctaatgaaacctccattgagactgtccttatacctatattatgttggtgctaataactcatttttctctcctatggcttcttattagcgtcagcgtggatgcacataactctagctagtagggcgtatgacaggcaaccttttacatggctttgagctaattttactccattggcactggcatgtttaaatcgctgatgaaacctttgtaccgcgtgcaggggatccgctgaaagaatggacactttttctcatgtaccccctggattccgtttccaccccactgacgaggaactcgtcgattactacctcaggaagaaggtggcgtccaacaagatcgaccttgacgtcataaaagacgtcgatctgtacaaaattgagccctgggatctccaaggtaagaaataaatacattctgaaacaagtagttcatgcaacggagttgcattggtagtacatatagacttgcttctagtatatatatagatgcacacaatctattattggtgacatgacattacacatgcatttggaatgggcacagagaagtgcaagattgggatggaggagcagaacgagtggtacttcttcagccacaaggacaagaagtacccgacggggtctcgcaccaaccgggcgaccaccgccggcttctggaaggcgacggggcgcgacaagcccatctacaccaagagctgcctcgtcgggatgaggaagacgctcgtcttctacaggggccgtgcgcccaacggccagaagtccgactggatcatgcacgagtaccgcctcgagaccaccgagaacgggaccgcccctgtacgtaagcctgcctagctcaacaacaaaaaatcgccgttcgatgtgatcgagcatgtcattcagctcagctgaaagcatcttcttctgcttgccccacgaaatggtggttcaggaggaaggatgggtggtctgcagggtgttcaagaagcgagtggcgaccgtgcggagaatggccgacggcgcgccgtggttcgacgaccacgtcgccggcggcgggttcatgccggacctcattggctcgccgaggcagctgatgcaccaccaccaccacccaaacgcggtgtacagcggcggtcagcagcagctctaccactgcaagccggagctggagtaccatcaccttctgcccagccaagacgccttcttgcagcagcttcctcagttggtggagagccccaagcctcctcccgcctacattgccgccgcccaaggcagctgcagcctccagctccagtcccccgacgaggccactgggtacaccacccagcaaccggccctgatgatggaggccgccgcttacatggacgactcggtcaccgattggagagtgctcgacaagttcgtcgcgtctcagctcttcagccacggcgacggcacagcgaaagaggccggctactccagtccggcgcaggtgtttcaggctgagaacaagcaaccagaagaagcactggactacgcctccacatctgcctctggtggcggcgaagcgaacatgtggaaatagctactacagaacgtacacgaatccattggatgccctatacaattcatctatataatatatgcctcagaaacctgatttagtgtacaaatatatagcttgcaatccgtgtgatggcacatgaaaatatatacatatatgcataatgaacatgtaaccgaagtggttatatatattatttgacatcaggtcctgagacctcatgttaataaggtagctagctgaaagctgaagctaaggagcttcagtaactgacttgacaatttgtaaaaatagtcaagctgtcgatggacgtctatttttgaggtccatccagaacggcagctctggttgctgccgaggcatcagcaatgcttgtgaaatggagtggaaagtttatttactgagacactcccctgttgaacttctgcttttggatatgtcggctttagaacaaagcaggggccacttctttcgagcaagaagcgcatgatatgatctatttcatatacatactatgctat

SEQ ID NO: 4543 - DNA, 3632 bp, Sorghum bicolor
ctgatgtataattgtcttctatattttagaagtgaattattagaaactattggatatgaccttattttttcattcaatatatttttaggattcaaaaaacatgaattttttgagaggaaaatttagtatactcttgaagatgctcttagttgccatccacatcaatgtccactgttcggcgcatcggcacagcccgtggttcattgggccgcctgatattttttgcacagcacaagcccatggacgtgtgcacagaacaaggggcgctgatcaacgacaccaggcatgcatttgcttccgcatggacagaactcgcaaattgatgaagcagccgtgggagtccgtttaatggcccataaaagatagtggctgtatatgataggaaaaaagtccatttttctctttcagctcttgtaaaattttgtttttcttctctaaacttttaaatcaggcaaactatgttcctcaatttttaaaaccatacgttttacctccgaagcctggttataagcgattttaaaggtggttttgtctttttcttttttatttatttcggctaaatctttgaaaaatcataataattcaaaaaaattataaaatagaaaaactaattttgttgaactctacatgagtagacctatatagtgaacatataatatggtatgttttagcataaagtttttgctatagattttgatctattcttttttgtaattaattagaataattcataactgtaatttctatgggccaattgtggtcaaaattttatggtggcctaattattgtatgcttgatgtgtattaaaaatttcaaactcattggataatgtctaacttagttatagatttatttagatataacaagcatagcccccatcaaagaaagttttaggatctgtttgtttgaggtgcaagctgcacattttggtcctttagctcaaaagctgcctttgtggctttgggctgtttgtttttctattgactgtaataagtttttagtttctcaggaaaccaaaattcacaaaaacatctcccaacgtgcttcttagcttttagtctatttccttataagtaagacttttagttaactttttaaaatccagtttaatatctggactatttgttttaacttctttttttatcacaatttgtttttacttctgacttctagctcagaagtcagcaaaaaaaaactaaacaaacaggaagcccgtggttcgctgggccgccacatagtgctccgctgttcggcgcagcgccacagcccgtggttcgctgggctgcccagcacaagcccatcaacaacatcaggcacgcatttcttccgcccgtgagagggccattaacagagctcgcaaattgaagcagcagcccctgagtgttcgtttaatggcccataaaaggtactgggctgtacttaggtgataaacaggccgctttgctcgctgcagcgtcctacttttttgaaggaaaaaaaaaaacaacaacgggaagaactgcctaacacgacggtggccggcggtggcagccgaaatgggcaacatcattctcaccacgtcctgctgttcttcgtggctcgcacaacctttcagcttcagaggaaagagcgtctcgtccatccagattccagacacgcccggggaaataggataggagaaaggcgccgggaccgggacagacagaccgcggagacaaatcaatctttgcctgaatttgtgtgtgcggcttagaagccctcgcgcctcctatctttgctcccgagctcacgcgctgtgtcctttaaagcgcatccgtctcgctcccggagacgtcaacctctgccttgttccttaccggcccccgaatcgcgagcgaggcgagagttcctctcctccgtcccgcgcccgtttgctcgtcgatcgatcggttgttgcctgccggccgcgagcacgaggagcggctagccagacggacgtgtcgtcttggcaggtgcagcaagcgcggagctcgatcgccgccatgtctttcaccggcacgcaggacaagtgcaaaacctgcgacaagacggtccacttcatcgacctcctcaccgccgacggcgtctcgtaccacaagacatgcttcaagtgcagccactgcaagggcacactctcggtacgcaacgcatatataatgcgctgctcatttccgtcgaaagaaatgaagctttgtgttatttgattgattgatctcgacagatgaaagtgtagaaatgtggtgggctcatcattttcatttctgcatgcgttctcctctagattagcagctactcttccatggacggtgtcctgtactgcaagacgcactttgaacagctcttcaaggagacagggaccttctccaagaaatttcaaggtaatctacagcgcatcaacttgtctatgctgtaacgttcaactctggtcctctgattcaatataccgggacgttttgtacctgaacctgtaaaaatgtttactgcacatttgtcatcttctgaatgttacacacatcaaacattctgatccttccgttgtgctacacaggtggagcatcttcaaccaagaccgaccaggtacggttcctcaaatattctaaacagatgatacaatctgacatcagtaagagttgactagtcatgcacgatgccaattcgaaaatctctgcaggcaaaggctccgagcaagctatcatctgcattctctggaactcaagataaatgcgcagcctgccagaaaaccgtgtatccattggagaaggtacagaaatgctgtttatttctgtaactctgggcggcaaacagtagcacacaattatctgatcaaatcaatcaccacgactaatgctaatgttggcacctacgcttgatcttcttgtttagatgacgttggaaggcgagtcttaccacaagagctgcttcaagtgctcgcacgggggctgcatcctgacaacctcctcctacgccgcgctcaatgggatcctctactgcaagatccacttctcgcagctgttcaaggagaagggcagctacaaccacctcatccagacggcgcagaccaagaagaacgaggctgcggaggccgcaccggaggcaccggcggatgcaggcgcggctgagccagaagcagcgtagatagcagcaaacgcaaagaaaaatagagccgtgtgtgtgtgtgtgtgtgtgtgtctatctcctatatatacgaactctgcattcagtaagtagttgtcacaaatatatgttgttgttgttatgtttaccttgctctggcttattctgtattatgaggctctggattcatgacgatgaaatgagaatatgggtgttaacattattttgcttcattcctactgcattgcttttccaactcatgaagttttccttcacatcctactaaaatgaaggatgcaagcactgacagagcttgaggataagtttagagaggccaacactagaatacttgatcacaccacacaatgagcatataaattttcatgatttaacaatcacgaaaaccattttcttgatgacaataaaaaaagcacattacatttcgttaatacttatgacaaacaattatgtaagccggtactttatataagttgaacaatagctaaggaagtatttcaact

SEQ ID NO: 4544 - DNA, 4995 bp, Sorghum bicolor
gtggtgagcggtgcggggggctgccgggtcttttgtacggccgcgggggtaaccaacaccgctgggccggcctggttattgtacccagtgtggccatgaaaccaaacaactgcgacttggctacaaatgggctggcagcgagtctggacacaaaaccaaacacaaacttagtcgggcctgactcatttagcacataaaccaaataagtggccatggctacatttgcacaggccaatattggccaggccagattgggctagccaggccaacttgggccagaatccaaacacaccctatgagtgtgtttggtttcataaccaacttctagcctagctagaaaacaagtcaggctagtctaaacctatttccaacgagccaagataaacttgtttggttgcctacattacctaagcctggctaacaactagtttgtttcgttggctgatttggcttggatagagtcacctcttctttgtgcaggtaacttcacccctttgaagcaattcatcaaacacctttaaggcgagcggagagagcagagggaacaagccatggccgacgccgcagtttgtcatgccgttgctcctgggcctcgatgacattgcagtcctccctaccaccatcaacgatgccgcgatgtcgatcctgtggctggtttctcaagcgaagtaggccagaggggacccgtgggtcgccgaggccatggatctcggtctgtcttcatgtcgggtgacttgaccggtggcaccatcgcgcaccacttcgccggtggcaccatgtcaggttcaggaggagccagataaggaccacatcacaaaggaggacgggggcgacaaggaacacatctttgtcttggccgtggtcgacaatgccgcacgcgccttcgcggtgatggtggcggtgggaggaggagcattgacgggagaaggaggaggagcgccaacgggggaggaggaggaacgtctgtgggagagaaggaggagcgtcggcgggggagaaggaggagcatcgccgctagtaaaggagcaatggcgggagagaaggaggaacaccggacagtgagagaaactcagctgagccagtcggagcctggctccagaagaaataccaacctggtgtttctagttgggcctcgataaggctgtacggaaggccagatggagcctggctccagaggctggctaggcaaccaaacaggccaaaccttgcccatccaagcaaaatgctagatttggaggctaaccaaacatgctctataggcccccatgaaaggcctatgctctcatctgaggccagatccgtactcttagggccgggtgaagcggaatttctcttgaggggtctagtgagacaaagcccatacccctagggtcagtcgagtcgggttcgtaacttggggttgggcaagacagagcccgctctcctggggtcggatgagacgaaacccgcatctgtggagtcaaacaagtcggaatctttcctaaagggttgggcaagactatagtcgatctcaacgttaatgactttcagctttccttcttcaggtaccatgatataatttacagggcaagtagttttgagtccaagatataattagagacttaacataatagtttagagaccaataatgtaataatttactcttattttgagaaactcagaaaccagaagcaagacagaccaacaaatatacgggacgtccagatctggaaactctagcgcaaaattgacgagcaacctttcgtctgacgaatgcagtggcgtcccctccctgctattgttccacaggaaccttttttttcttcagatggtcacggaaaagtggtacagcggaaagcaaccagtgacgagaggggtgacctcaacaaccacaccccccggtataaatgtggaccggatccaatctcagtgcctaactaatagtgtctccaatctcctctctacgcacgtgaccttttacaccgtcttgtgcaagaattagctttcagttgcataataatatggaaggacgcacaggcaaccaatctgagaagcagtgagcatcaaatctctttggcagcagtacttcagtagtactataagcaatgtctaattcataagaacaaacaagagtactcccagtcatgtttttctcttctatcatatgtaattttttacaagaattttgtgatattaatgttattttttttctttgttaccagggtcgctgtggttacaggagggaacagaggaattggcctagaaatatgcaagcaactggcttccaatggagtcactgtagtattgacagcaagggatgagaagaggggcgccgaagctgtcagcacgcttgggctatccaacgtcgtatttcatgagctggacgtcagcgatccgtcgagcgctgcacgcttagctgattttatcaaggagaagtttggcaagctggatatattggtatggacgtatgatttccccttcttcatactgcaaattatgcgcaattcatatacgtatgtaattaagtatgtcttttttctcgaacgtgtaaaaggtttgtacaggttcatacatgtgcttgtggtaaattaagatgtgagtaccttaaaaaaaaggaaaagatgtgagtggttttgcagtagctttggattattcgtgttctgacttcaacattctttatttacttttttccataaacattctttatcctttatttactggtggtcgtcgatcgatttatgcttttgcaggtcaataatgcaggaattactggaacgacgtggagcgtcggcgacccagaaatttttcgtcaaaaggttatttaaccagtaactactcagtatgcaagggtttcacttaaactgagtaatagttttttttcgagagctagatatagacatagacatgcacactcatctatataaacacatccacgaacgtcctagcgcctttatgatgatcaccttcgaaaaattaagttggaccgacaaatctcgaaattgacgaagacacaacaagattgatggacacgtcgcctatcacttaaaacatagcgtcattgaatctgtaataaatataggaaaaggcgagtacccattttagttttatgaagaaaaggtccaacaatacataaaagcaagggcgaagctacactatgaaaaggggtgcaaaaggcaccccaaaaaatataaaaacaatatatttgtttaaaatttcaccatatatgcattttttaaaacacatctttatgcacccacatggaacgtgcacccgatctaattaaatgttaaaaatagcccatactgctccataaagaatatccatagttgaaacagtaaaccttagactaatgacacgataactccaaaaatctaaacgctcatttaattgatatttgtaataataatttggaaataaaggaaaagaggtgtcttttgagcacttttttttcatataaatattcaatctcactagtgaaaagaaatcgaaagaattttgaaatctaatgattagaagagtggcggataataaggattcacacaaaagagttacatagcttaattaatagctctagcttcgccaccgtataaaagatacaaatatattttgttgtatggaaacagctcgcgggcatggatttcatggagaggatcgaaacaatccataagcacatcacggaaccttatgaggaagcagagaagtgcttgaggactaactaccatggcatcaaagctgtcacaaaagcactgcttcctcttctgcagtcctcatcccacggaaggattgttaacatgtcatctgactatggactactcagggtaaatggccggcgtctatatagtttatcctacatgtcatccttcaaaatagaatcaagtgcaatatttatatatgcaaaagaaaaaaaacttagaacattgcaaaccaagtaacaattccatatcctgctccagtttttcagtggagatgaacttaaagcggagctcaacaatatcgacagcttgtctgaacagaggctggacgagttgtccgaattgttcctcagggacttcgacgatggcctactggaggctcgagggtggcctacgggagggttcagtgcatacaaagtgtccaaggctcttgtgaatgcctattcccggatccttgcgaaggatcacccgtcactgtgcatcaactgcgtgcatcctggctatgtccagacggacatgaacttccatgctggggatctcccagtcgaggagggagtacggggagttctcatgatggcgatggcacctaagggaggcgtcactggtgcgtacttggacaaaaccaaggtcgtgtcattcgtgtaatatataagcgcacaccgttagttacagggcaattttcacaacgtttcttgtggagtatattgattgtaatttggttcattcttaggttccttcaagtcagaatttgcggtgttcccagtacgtgcaaaagaaaagttattacttcccctgtggtgctcaatgaataaacaatcttctttaatctctttggtctcgttaattttctttattttttcttttttatttctcgaatcccccgacctcattagccttgtaaaatttggtggcttctactttttattaatatactaacaaaagtatccgtgcattgcaaccgaacacacaatttactgaattgtcgcttatatgacttttgactagagtgacatgtcttttaatatatattcaaattgaccgtgctctcacacatataaacattgttatatgttgttattacgatattttctaaacccctaaacattgctatatatttttataatattttgattggaacttatgaagcataaataaggtgaacattgttacaatatctatttaaactcacaaatataagctataaattgtatctaaccacaacatttcttaaaacgtttggtaatacagattatcctcctagtagttaaaaagaatgaaattaccttttccccttttcccccccttgttttctattttttttctc

SEQ ID NO: 4545 - DNA, 12524 bp, Sorghum bicolor
aatgactgattccggacggtgtgatgtgaaatgtgatggtaaagcacttttgcgcccctcctcccctccccctctctctccatcatcccgacccacatgtgtgttcgccattccagcacaatgcagaaaagcgagccggaatggaagcgacgcactgtcactgtgtcagtggcaggaccgctccccgcccgctgcaattcctgcgaagcaccagggtcaaaaccgtctttagaccacgtgataacacacagggtcatgagtcatgactccttcgaccacgccgtttgaaaaagataccgacacgcgggccccgtagccatgtgaccccttcttccccacagctccccatgcgccgccccagacaccgaacaccggagccccacgcgctgtaccgtcctcgatgcccgccacgcgtacgtagccctgccgaatcgaacggagcagcgtgcgctgcgggaagaggaagagaagcggggcccggggaggcgagcgttcccaccggccggtccacagtccacagtccacacacccccacccccacccactcctccactccgccactccacgcagccgcgcttgcggcaccaccgccacgagcccacggcgtccacgccaccactaacgtttcgaccgttacgggagggcccccgtccccccgacgttgccgcgcgccgcgccctgacgtcgtcaacgctgctccgctcggtcggtcggtggaacgcagccgagtccaagccactctcccgttgtggcttacggaaagaaaggaaacggacggccaaaagaggatgggccagctatcgttgggggcgttttttcgcatagcccccctccctcttggtcaagataaaagcttttgcttgataacaaaagatagtaaaaatgctgggtggtaaggctttgtttagttcactccaaaaccaaaaaaaattcaaaatttttcatcacattaaattttacagcacatgcatgaaatattaaatataaataaaaacaaaaactaattacatacttcgtttgtaaatcgcgagacgaatcttttgatcctagttagtttatgatggtacaatatttgtcacagacaaacaaaattgctacagtaatgaaataaaaaaatttcacatttaagcaaggcctcggcaacgttattctcgaatcaattgtttccttttaggccgatgatatgcttccattaatttttttttctagtgaaggacttaacctcgtttagtcgttttcttcaaagggaaggaacgatatacatctatgctgctaagacggtaataccgcgccaacagagggcttaactgcaattcggccgtcactttcctgtttattcgaaggcagtggggtttattttttttttcagtacgggcatgagctaataaacacgtcttgtccctttcttcctcctcctcggctccccttccccgtcgcccactctcccccgtacactccgttgcgctcacacgctcccgtcgctgtcgcccaccgcgctgcccgcagagttcgtcccgacgttcgtccgaagaaattcaaatccggggcgctcgcgtcactccaggcgacgaatccgcgcgtcgactccgctccaaggtaagcattttcccctgcacgattcggctcccattcccctgaattcctcctgcgttcaaatctgcggctgtggaaaatttttttcgaggatttttcgggtgcggggatcacccgcatttggtgcggctggctcggttttttctgatttttgctcgatttgttcgtccgtttcagtcggaacccgcatgcgctcgccatgttcacggaggggctagatcgcgacgccctcaagtgggtgcgagaggtgtgcgagctggcggcgccgccgaaccctagctggtttcagctgctgcagcctcgggttcccgttctctgatgcgtgttttttcctgttcctgatggtgtttgttggtggaatgcgtctgcagggccagggagcggcggcgctgcatagccacgaccggatggacgcgctccgtgccgtgcgcggtgcggctggccgcggcgggcttggcatgccgacgccggagaagtttcggagcggccacatgccgcgcggcgcgacggtgccgctgtcacgctcctcgctgcgcagtgacgacggcagcgccgtctcgggatccgacatggacgagtcgtcggacaacgatgagattgaggtctgcagcggcaggtactcggtcgactcgtcaccccgccgcgacgacgtgacccgacgcacggccgtgcccctctaccgctacgcaaccatgcctgggcagcagagctactactctactgatgatggttactcggacttaagctcttctcgagacacagcactgccaagagctaaggcacagccgatggggcggccccaggcacgggttgttgagtatgctgatgaagagtactcggactctccaggcacctccgaattttctagccaggtggaagggcagagcaagggtgggtatgcatcagagtactcccatactggtccagcccgaagagaagtgaacaatttggttcctaagaatcgtgcagcagctgcagagaggacgcggtaccaacatgacagccattctgctcatgtccccgttcgagagaatgtgaaatcaacacgtaaattggttagttttctttgtttatttacaaaaaatttccattcatctaccccgctctttttctatttgatagcaccatctgtaagttccattttgtttcaagttggggttgcatttaaatgtgtgggaatatggtaagtataaatgatgctcaacgaataatattcctgtttaactatgataattgtgaaagcatcacatagttgtcgataaattttcatatttacccagaaatgtttttgaagtccaaatgttcaaagcatagttatttacatggatctgaggcagtatgtgttttaactttgaaattgtttgacaaatattctagttataatttatcaatcggttctccggacacaattttctgcaaacatgactggttcattgagttatcttgtgttccatggctaaatgcctatattggagtaatcccattcccatgtctatgtaagtcactcctgattctgctgaaggataacacacttatgcatttagtttactaggataatggtctcgatgattcatggaggaaatttgcctctgaatgatccagaaggaactgagttcttccttttttttttcatttattgatatggaatgtttaagcagcagaagtactaaatctcaactgactggaacggctatttctctgtttctagtcaatgtgtactatggaacgtaccttgaaccaaagttgctattaaaattttggatgcctctggaacgtacattgaacatttcttactgggttctgatgtcctctgaagagaacagctaaatcatttttataagatcattaaaatagcaggttatattgtcatgtttcttgctttctctttcaccaatgacattattcctcatcctcgaaaatgaacttgcagttatagtactgaatggttcttagttcttacatggtcctatgtgttgattgcactagtttcttggtgtgactttattaaagatgttcaagtttgacgatttggtttatgtacagaatgggttgtctgatgtccccagtgcaccgccaataaatgattatgaccaggaccaacatccggttactcatgatgatactcggccttgtgagaattcaaatttcaccaatggcttatctgccaaaaaagatcaccaagaagtcaatggaggagctaacttagctgacaaaaatgataggtagcctctataagatgtcttaacataacattttttaatgaaacaaaatgtttcattttgcttatccatccttcttgttattttttcctgctatgtaggagcacttcgaatgcaggacccacaagcaagccatctagctcgattcctgttcgagtcccaacctttcatgccaggtatttttttgattaaacaagtgtttaagtaacagtagtggtctataatcacttctaaacacatttgttgaaacattttacagtctgcaagggccctggtattctgtacttgcttatgatgcttgcgtccgcctttgccttcatgcatgggctagaggctgtatggaagctcctgtttttctggaaaatgaatgcacgctcttgagaaatacattcaggtaagttaactcttgcacataattgaagataggtcataggtcactaaaaccaaactatattgtatctgcaccatgctcgctgcctctagcaactgtcagttctgtcattgatgaggaattgaggatagccattagcccattactttgtgttttgcatttctagggtcaggtgtcaacacctagaaaaaaacccgcaattgtgcaatgtaggattctattattattcttggttatagctcctgctgtccactatgatatgggattttcttttcattaattcaccatgatgaaatgatattgactgttgaggcacatcgtgtgtttttgttcaaggtcaactataccaaaagtcggtaggagtgtaaatcctacctgtcctgtgtgctatataaccatggctatcaaaatcattcagctcgcatgatcctccatgcactggccgtcttggtactcccttggtgtgactttttcccccagtgtgcatggggatgtcttctgatttcctaaactaattcttttgataaaacaatgcattagtttaaatatattctgtaagcaaaatacatctctaaaattaagttggtttaatttgaaaaatgtaactgacagttactattggatattgtaaagaacagaagatattaaatccttcaaagtagtttctttgaatatctacatatgcattttgaaccaacatggtgcaatgatcttaagaatagcaaatttcagcaagaccccaaatattattacttaaatgctaactttggcttccacattcagcatgctatacacacctttttgtgtacttcattcacaagcttattagttatttattgctcaggctagttgttctacatatcttcttttgtcacatttttatttaatgtgacactagagtaagccttgaaattcttgaatgtttcatttagcttgcaaaatgtcttgttacaatcggaagaggagcttatgtcgaagcgcgcatcagagctagttagcgaaggggctgcatcaaagcccaagaaaacaataggcaaaatgaaggttcaaggtacaaaacacatacatcttttccatttgaataccgtatctgctgctattttctgtttattattgatgaagatctctaggaaattagtgcattctattgattgttggactgttgcgtgtgctcagtttggactaaatacaaaaaaatgcctttagggactaacataacttaatattattctgtttgcagttcgcaaagttcggatgtctgtagatatgccttctggttgcaacttctcatctctgccaatggtgaaattggattctgtccggtaccgtttatccaatgtgcaatccacactttcatcaggatgggagtctgtacggagagttcgagttctaccacagcttcctgctaacagttcgttctcaaagcacagcttagcgtacatgcaagcaagtgctcagtatattaagcaggtatccggcctgttaaaggtcggtgtaactactctgcggagcagttcagcatatgaagcaccacaaggttaatatgctttatttctcccatagacttcagcctcttgacttggtctcatattttttttttttcgcctcagaaacatactcctgccagttgaggcttaaaagttcacctgaagatgatgtggtacctatgcagccaggatctggtgaaacacatgtcttgtatgtccaagagaagttcctaaaataacatcttattttataatagctatattaccattcattcattttctctaaatgctacacagtttgttatatgtttgttcaaacttacttttgtaagaaaaaaaaagcttaattttagcaaacctgactatctgtcatatttcagctttcctgatagcctgggagatgatttgatcatcgatgtgtctgattcaaagggaaagtcctgtggtcgtgttgttgcccaagttgctacaatggctgaggatcctgtaagattttatgaaccattttgctacttgtttgtcaaagttctttaacaaaaaggattcttgttagtacctgaactattgaccagttgattgattcagttatcatgaatctgttagtccctggttcaatcctggatcgacaaaggaattcgtaccaggtctagctccctaagtaaaaattgttgcctctcgcgtgtgaagccaaaatggaaatgtgccatactcaatgacctatggggccttggatgcccctgtcgatcaaacgagggacatgatcattatgctgtgtagtttgttggtctgggcttgtacatgttgtttgagtatgtgtgggattggtgcgagtacacaaacatgttcatatactactatctgtgtagtttgttggtctgggtgtgtacatggagcgtgaattagtgtgtggaggattggtgtgagtacgcaaacatgttcagatactatcatacccattaggggtgtaaaaaagggctcttggtgttcatacactatttttcttgatgtatcgtataacatttatggctaaataaaactaatgctcctccaaaaacatctaaatttctttgtgcaggctgacaagctacgctggtggtcaatatttcgggaacctgagcatgaacttgtgggtcgtatacagctatatatccactatacaactgctgcggatgagaacaatatgaaggtagagatgcttcagctctctgaatgtgttacacattgatcttatgtaacttctttgtccttacttcacggttaactctacctgcagcccacattctgctactacgttcattaaatcggtggttaatttactataaatgtaacagtagttgaaaacaatagcactatctgtatctggtcatctccagcttccgatagttttcttatcaccatgtagaaaagggcttgttacttgccaaacatgtaatgatattagtgaattatctaatgtctgtagttttgatttgacatactaagagcatctgccatgtgaaatcatattactcttaagtatcctcttagccagggataatggacctagataatacacaaagtttgttggcttgaatacaagaaaataaggtagcccttttcaaaatttcgctatatgttgaaggaatactgatttgttttgactgtttggacagtaatggttgtctttatagtttatattaacaggcatgatttgttaacttgttggacagtaatggttgtctctatattaataggcattctttgctctgtactctgtagtatggttctgttgcagaaactgtagcgtatgatattgttttggaagttgcaatgaaagcgcaacacattcaacaacggaaccttgtggtacatggctcctggaagtggttattaacagaatttgcattgtattatggggtttcagatgcctacacgaggttgaggtacttacctatcacactgggctgcagacttttctaccttctagccttttactgttttgttattgtgaattgtgatttataatttaacttatgaattgtggcatcatttatttaatctaatatccttctgcaatgcatgccaattattttattatatgttctcttgtacttgatatgtagcaacatgagggcatgccctgttcggcgctagttgtttagatttaataatgtattgaattgctataaccccctccatttctcgttgtcttctttttcgtgctgtgggattgctgactgctattcttgtataggtacctctcttatatcatggatgttgcaactcctactgctgattggctcaatctggttcatgaacttttgttacctatactgatgaaaaaccatggtactgctactttgagccaccaagaggtacatttctctctcccattagacatgtattgttttctgaacactgtttttgggcatggtaacacgtttcctaggtttatgtcaatgctacattgtttgtccaaattaaactataattagttaagcaaatttattcttctttttgattcagtatttttatctgtccaaaatgctgctgtgacaaacatgtcactactattgcttgactgaaatttcttcacacagaaccgaatactgggggaagttgaggagcaaattgagcaaactctagctatggtttttgagaactacaagtcattagatgactctataccgttgggtttggcggaagattttaggcctccaactggattggctgctgctgctctggaaccagctattaagctgtacagtcttctacatgacgtcctatctccggaagctcaactaagattgtgtggttacttccaggtcattattcaactattcggtaaacaaatggtatcttatgttctttagttataactaatgcttttatgttttttattcatgtccaggcagctgccaggaagcgctcgaggcgctacatgcttgaaactgatgagtatgtgtcgggaaattcagaaggtatcagggtggacttggtaaccgttaccacggcataccagaagatgaagtcattatgcaacaatctgcgcaatgaaatttttactgatattgaaattcataatcagcacatacttcccaggtacatgatcttatgcaagcttcattaccaatatgctttaatgtcatagcctgttgtacaccttctaagcacaggtcatttgcagtctgagaaatatccattatgtgttatatatctgtttgttctttctttctgatccttttggttttgacatatttccacttctctttgtttccttttgcttccacagctttgttgatctgccaaatttagctgcctccatctatagtgtagagctctcaaatcgactacgtgcttttcttgtcgcttgccctcctgctggtccagcatcacctgttgctgatttggtggttgctacagctgattttcagaaggatctgtctagctggaatatctggtaattttgtttactggtaaataaatctaaatcaatagtctcttgctatattcctgtctttgtcatgccttgtgtttgaattttgcacagcactataaaagcaggcgttgatgcaaaagagctgttccatttgtacattgtattgtggattgaagacaaacgcaggatgttactggaaaattgcagactggacaaggtgaggtgataattttctatttgctgcacattttcatcatgttactctttccaatttcattccttggtacattcgccaattttcaggtcaaatggtcaggagttaggacccagcatatgacaacaccttttgtggatgagatgtatgatttgctaaagaagacattgacagaatatgaagttatcatttgccgatggccagaatacatattcgttcttgagaatgtatgtaagaaactctatttcttttagagattctctaattcattaagttgtagtcccaaagtctgacgtatcatgtatcgttttgattctttgaaacaaaaggccattgcagatgttgagaaagcggttatagagtctctggaaaaacagtatgcagatgttttggctccactgaaggattgtattgcaccaaagaaatttggcctcaaagttgtccagaaactcacaaagcgcaattcaactgtgccctatactgtacctgaagatgtaagttttgttattaatttttacgtttcttgggacttcaattattgatatctgaccccctatctgcttttagcttggcattctcttgaatacattgaaaagactactagaggttttgcgacctcgaattgagagtcacttgaagtcatggagttcttgtataccaaatggaggaaattctgcagccattggagaaaaacttagtgaagttacagtgacattgagagctaaattccgaaattacatgcaagcagttgtcgagaagctttcggagaatgtgagtgtccttttacatcctgttacttgttcctgatctcagctggttacaaattcttgtgaatctctgataaggttaggagaggtgctaggcagtatctaggcattttgccaaatttgcacatcatgtgtagctgaataaattatataattagagtagctgaaaacattatattaaaagagagtaccaatagacataccttataggcctcattcagttggggttgggaatgattcacagccgagtttccttcaataatttaaatagcgtcggatcggttctggccaggaatggcccggagcggagaaccgaacggggccttaacagctttacaatagacaatagtgcattaaaagaaagaaaatagcaagttagatacttatctgaatgatctcagccatctcccatccatcagaccatatcagcagcaaggaaatatgtattttaaatcacaaacaaatggacagcaggtcagcagtacagcagaacacgtggcaagttattataattcataaataaagctctagttcagagacagatagttctcacaacataaggaaaacagtcacgcagcagcacttcataagtttaagaaacacatgaatgcatcataaaagataaaccatgacatgataacctctgcttcggcttcccgcgtccgcgcgagcttctgcttcgcccggaaaaaagtggcccgcctgcgcttgtccgcttccttgttgcctcaccagccttcttgctgctccgcctacccccataggtcccgtgtgacccttagcctcgcgcctaggtggccgcagaacactgatatctgatatcttactgacacaaacataccatgtcataaccaagtcacttttcatgcatagctttacttgaaaatgagatttgcttaatgagttatctttatccatgcagcaagttctggcatggatctgctttcatgagaccaggatttagtttctaatgtaaatttatcattatgggtacttttcttttagaaaatggtcttgtacctaataaatttctatgtatatgctacatttcacctcggattgagaccagaattatgaatgccttcatgtttatttgatcctggtggtgttctaattttgatcttctatgtaggggtgatttcatctatatgatcattctgtagtgtttcaggttttatacttctattctatcgaaccaaatcctgattccatattcaactttatgttgcacccctagctatgtagttatggatagaatgggagaggccttactagcactttacagagacaagtacatttgttgtgaagaacagttttcttaccgaagtttttatgcagacccgtatgcaaaataccacaaagctcaaaaagatcattcaggattcaaaagagttggtgatggaatctgatatccgcagcaggatgcaggccttgaaggatcagctaattgaggcaataaatcatgtgcacaaagtctctgaagtacatgtttttgtagccatatgccgaggtttctgggaccggatgggacaggtatatgaagtatcagtagtgagtagggatggttctttttcgtcctactgttactaatttgatcaatatttaggatgtgctgagtttcctggagaatcgcaaagaaaataaagcctggtataaaggtgcacgagtcgcaatctcagtaagttcatgttcccacggtccccaacttatggaccatgtattcgcctatccttttgatgcttcccatctcttactctagtttaataaaacgtgttaatctggcaggtcttggatgatacttttgcaacccagctgcaacagctgctaggtaatacagtcccaccgaaggaactagagccacccagatctatcgtggaagttcgctctattctctgcaaagatgcaccccgccagaagaattctagtttctattattgatgatcaggcttagctgtacatagtagtcttgcgcagcagcgcatgccgcttttatcttggagagaaaaggtcaaagtgcttggatagccggatctttaagaagaaaagcaatagaccaatgaggtttagaggaggctcaatgatatctgagaagctggccttgtgttgcaccataaaaaatgtttttggtggtaacctggctatgttcccattgcctgtgggatggtgtcaacatttggaaactggattgcgcgttagagtataatccaattgacgttgtaggttagcttcattgatagcacctagctgtggttaagcagttgctctatttttgaacatgttaactgttcttaggaattctttgaaaggtatggacatggacacaaaaaaaattgatggttattgatgcccctgtattgtatagctatagcgaggaaagaagtgcatataagccttttaaatttcaatgtaaaccgtcttattccattttcaagtat

SEQ ID NO: 4546 - DNA, 2662 bp, Sorghum bicolor
tttaacttctcaacacgccatgattccaccacttctgccatatgcccatacattagtaaaagagagataaatacttcaaactctgtataatactctgtggtttggtcataaatcaatctagatcttgcatgctgcaaaagcaagaaggaagcatgcatagcgtaaagccagagggttcacatttagagtaaaatagtgaaaagaaactaagcagagactgaaggagcgcttgtgccagacgactaagaccattagctcattggacctcctatgtcatcatttttgctttacagattaattcataatttcatatgctcaaagaaccactcaggcaagagcatttagcatgggtcataagtgcaacttgaactgataagcactaagaaatttaaaaacacttctcttggggtcactactagatgtcaaaataggcccgttgcaagtgggccacgaacaatgagataagataaacatacagagcgcaatgtcatttatacataaaacaacagctctacacagaatacctctttgctccgcgaggctgccattatcccccaagtcgtgcagccgccgcacaatatcataagaaaccttctgcttcagtaccagtggcagctcctcccgtcgccgcttctcctcctgggcaaatttcttccgcagtttctttacctacgcattcataatttcagtggaatagatcgtaagtaataggaactaaacaatctatcaacagcatacaaaattttcaaaagggttgtctattggaagtaccgccagaacgagctcaaccggctccgcctcgcggcgaatccggatcgactcctccacgctcctaatctgctcctccgtatactgtaccacttccacgcctgaagaaaagatcaaaataacaccccagtcagatcacagaaagtaaaccgaaggtgtaaacatggcgagggattccactcacggttgggagcggtgggtgcgaaggaagcgggggcggtgagggagcggagcacgagcaacgcggcgacaaggttgccgaggcagacggccacggtgacgcgccggtaggagcaccaccccgtggtggcgcggcccccgaacgacaccgcccgcgctatgcccctcgccatggcgccgcctccgccatccctaccgacgcggcattgcgccccgcggcctccgattcgcgagctccccgcctcgatctcgcacgaccgcgcaccccacgactcgaccgacgccgacaaccagaccaatgcgcaggctacgcacgatcgtcacggcgatggaaacttctggaatctgacggcgcctcagacttcgcaattcgtttgggcgctctcgttttccgcaaacgaagaagggggggaaattctggggcggcggtaaagctactaggaatatgaagcaaatccttttgttggggctttcaggctgcctctgtcacgtggggcctctgttgatgctagcattgtggcccacttgtcagattaggtttttctgtggtgtcctgtggccgacgcagagagtgacaggaggaatgcagcgaagggacttcactgtatttgattacttttgtgtaatcattagcaactgtgattagtaaacacacaattaattagcgagggtgtattctctatttcaaatcggtgccttgtttaatgttggaagctttagttaacttgcgtcagaagtcagaaggtaacagaatctcagatacaggcccgtcatacagtaatacggaataaagttaatactactacggttgtacaagcaacagcacaaacctacctgatctctgtcattttgggtgaccgagctggtcaatcactcgcggaaaagtgtaagccaagcaaaggtcctgtgcttggcctaacaaatgaggcgagatatgcctttcggcaatcccagcgaccaaccaactcaaatcagaactgtcaggcctacttgcaaccactcggccgcttgatgacatctcaaccaaacaccaataaaacatacactcagatttaacgtcaaaaatagcacaatttctacagatatgtcattataacgatgaaccgagattacaacgtgagtttgccatttttgcatcagagtttaagttggaccaattagtcccgataaaaatgcaggatctcgccagccgactatcaattgttcattgttagcactgtgtcaatatttccgggccatcttcggtaatgagtatcgtgtgctcgaactgtgctgacaagctgccgtcttctgtcactgcggtccagtcatcggaccacatgacagggtttatgctccctatggttagcatgggctctgatgacatagaacgatagaaaaacgggatgaagtttgttagcttcatatgctttaccttgctgagtgaatatcagttaaactaacagttctattctactcttatatgtttactagccagggaaaaaaaacactagatgacagtatagtataaaaatatgctcaagactcgaaagaaagctagtacttatgtgtagaacgataacagtgaccaaatgcaatgatcttagatcagggctgaaagaaacacaatataatgtactgactttttataaaaaaaatgttatatctctaggtttaactgtatgtgaaattttaatcacaggtcgatagaacaagggcagcaaatttaatcaca

SEQ ID NO: 4547 - DNA, 2791 bp, Sorghum bicolor
aatatactatagatagttctttcattctaaattagaaaacgttttattttttagatacattacttctattatgtatctagtctagacatatagtatatctagaaaaagcgatatcttataatttaaaacagagaaatagatagatagatagatagatagaataaactaaataaacgaaaatgacttatgattcatatttatgctaagcaaaataatgctatcgtgttccttttgaaaggaaatctgatacaggtgcagttccttaattcaatgaaggggttggttacaaaagcactgagcattttagcatatatgcacattccaatgcacagtcgcagcatatactactatctttttacctctgcaagatgataaaaaaagaggacgctgcacgcgtttatgagtatttcgaaaagtgtttaaaacaacatggctgatgctatagccaatggttagccgcatgattcagaatctgactagaaaatggggaaacccagcagaaatgaaatctttaccctcctgattatttcgttagccttgttgatttcgcaattttttttgttttttctactataatactttcgtttgtatatgataattattatataattacagagtaactagtctcaaaagattcatctcgcaaattacagacaaactgtgcaattagtttttatttttgtctacatttaatgctccatacatgtgtgcaaagattgtatgtgatggaaaattttaaaaaaatttggaaactaaacaaggccagagactcagtctgtaaccagtttggtaaaaaaaatttggtttcattcaagtcgaagaaggtaggtttcggacttgaatggacatagtaataatagtgccttgtttagttcacccaaaaaacaaaaaaaaaaaattaagattctccgtcatatcaaatattgaggcatatacatagaacatcaaatatatataaaatcaaaaactaattgcacagtttgtctgtaaatcgcgagacgaatcttttaagtctagttattctatgattggataatgtttgtcaaataaaaacgaaagtactacagtgttaaaataaaaaactttttggatctaaccaagacctaaatcaactggacgcgcattggtttgctcggccttgaagactgctccccacatgggcaagctttggagttcaataatcaatactggcattatttcttcttatcttggttaattaatccacaagctgtgaagctgattacttctgctataaggcagaatcaacctaagattttgctgaaattgttgaccaactcttacctaatggctaagcctatgtgcgattgcatctcacaaaatcacaagcaaccttgcgcctgatggtggttacgaatccttgagcaacgtcgcgtctgggccacatcttctagaacagaacatggctacttggctacgactgacaacatagatgaagtgttcgtactcctcagttgctcccattcttcattgctccatgaccatgtgagttcaaatttgtcactagctaggcaagcaacgtgcatggccacgtacttggtccaccgcatcaatagtgcgtgcgcggcaaaggttgaaggcatccgattcttcgtccccgctcgcatcctatccacgaattctgatgccggccggccttctcgtttcaagcaacgaatcttaaccatctgtcaaaatgccaagcggtgtccgaggatcagcaaccttggttctcctctctgcctaacaatgcacacgaattccacgcccctcgcgctcgcaccaaacgtgcggcaaccgaactgcaaatctccggagcctcccggcgatcgacccggcctaaccacgctgaccgcccgggagacaatatatatagcggcgttgttatcagctatatagcccacacggttgtctcgtggatactggatagatagctatatctatatcatcaccgtaccgtatcagctaggcagacgaggagcagtgatcagtagtgtgtaacaatggcgttcatgcggtactaccgcgcgctgccggagggggagacgacggtggaggagttcagggcgtggctgagccagttcgacgcggacggcgacggccggatcagccgggacgagctggagcaggcgctgcgcagcctcaacctgtggttcgtgtggtggaaggcgcgggaggcggtgcgcgcggccgacgccaaccgcaacggcgcggtggacggcgacgagatgggcaggctctacgcgttcgcgcacaagcacctccacctcaagatgagccagctggacctggaggagtagtgctagcctactccattttagtcactagtccttattagtccatagtgttcttctcaaaagggattaatttaattgcgactaaaatttactctttagtcccttctccccatggaaaagaacagggccgaagtttggtatgcagtcattctcgatgagttcgtcagttcattctgcagatgcagtatttcctgaatgaaactttcatggtcgttgatttggatgtttaataagctggagaagtagagatggtgctataaattagcttgtacatataggtagtactccgtatatatatactccactatgtacaaactgcgttttttcttttatacaggaacgcttttatgaatttttatacattgaaaagtttcgacgtaatcgaacatctctaacttaggcacatgtggattacatgcaactttcatgtaaagggtaacctctacttcaactaaaaaaaattcaccacagaatcttaactgttaactgtccgtcat

SEQ ID NO: 4548 - DNA, 4793 bp, Sorghum bicolor
gtcccggtccagacgaaggcgcccctccttttatcaatctgaccgatagcttgatagtaggtagcagacgatgctaaggtgcacaggaatggcgtaaagtgtggtcttggcgagggtcacacgttcagcatttgtgagcaactcagccttccaaattgaaatcctagccacaacccgcaaccgcgtcaatgagcggctactcgcctgcgtggcccagccgccgaagcgacagggagattcctaggtaccgacgtgagaatggtgacacaacacacggggatactagctggacacgggcgatcaccttgtcatcacagcatatcgacgatcacctctccatgttggcgacgagaccggagacgcccgcgaacaactcaagtatctgggctaaacaaagtagatcatttgtccccggtgacagcagtatgacaagatcgttcgcatagagcgaggagcagtgcacgaccacctggccagcaagtggcgctggtgccgctcggcgtcggcgatatgatcagccttctttatgagcgagtttaacacctccatcaccaggacaaagagcattgaacccccctgtcgtagtccttggcgtgtaatatccgatgccctggtcttccattgacaagaacttttgtgctcgtcgttgatagtacgatagagatcgggtcagtccaccggcaacgggagaagccaatgtgttgaagcacctcaatcaagaatggccatgctaccgaattgaaggcttgtgtccctacacatggttcctttcgcaaggacaagatcatattgattgattgatacaccatccttatagagttataggccacgatgtgcttggcgatctttgtctctgtgcgcgcattgagatcgctatggacgcgtgcgcgttgcggagcacagtacacgagcttctaggtccggctcccctatctactttctttctaaggcccatttacttttatctgattcagcctattttgtgttgagctattttttattctctatttctcccgtctagtttatctggtgcgaccattttctaatctagcttatttatttttctctttcggaatggcaggtactgtatatgagtagtgaatgggtaggggatggtttcacttacatatggaagcacaagtcatagatttatggtaaatatagcatgtttttaaatcgataactaaacattaaacaaatagactgaaaataggaaacatattatataaaaatctgactcgaaacaagttgggattcagatgacattttttctcaacagaaatactaatacttttgaaatgctaaaaacagtacatatagatgttcacacaagaaaatagtgtcttatgtattgataaaaagacgctgcttattgttcatccctggagctagctagccttctatattcatcgtattaagagaagattttattaaaagtcagaaatccacaatgacaccctagtaccctacataatttagtgaacaaagttaataataaaacatttgcgattggaatcgtaaaactttgaaatagatattaagaaattatcataattctatctatcaagatgacaggataaatgttggaatatgattatgctatttttaaaataatttttataatctcgtgtcctctgtacgaaccattcgtagttttgtaccactggaaggtaactgctgcgctactctatgactgttttatcacgttactctcaaattcttgtcatgtactctgttctctcaagctaaactttcgaaacatttcttaaaaaaagaatacccatttttttgaaacaaaagaaaaaaaactagcgaaccactgaatgtagacgaacacggcccgcaagaggcccatctgttacttccggacagcctgcaaaaagaagaaaataccaccaaccagtagcagcagcgctcgtgcagtccacagaccacacagatagtgtagcccaaaaagttctcctcgccttatcagatcggagcctggcgggcaaaccaccacatttttgcgcttttccgccctggcatcagcttcacagcccgtcagcctttgaacgaagcaacgaacgcctctaattccatatccagaaccgagagcttctttttgtccaacacccccggccaaaagacaagatcacgcacggaacaaccattcccggctgtatttgtccggcaagcaagcatctccggcgccagcgagggtgggctgtgggctgtggcagccatggcgtccactgtaacagccgccaacagccatggaagcgtcctgcgtacccataccgccccctcctccaggcagctcgccggttggagcagcaggcgcacgcttgccatgcctgcacaccacgcgccgtcacccagagctcgggtcgtcgccgtccgagccgccggcacccagcggccgacctggttgcccggactggacccgcctcctcacctcgacggcacgtcggttttctgacgctctgatatctgccggtgttttctgatgttcatcagctgacagtggagtagttatctctgatgatttgttgcagactaccaggtgacttcggcttcgatcccttgggcctcggcgaggatccggcaagcttgaagtggtacgttcaggccgagctcgtgcactgccggttcgctatggcaggggtcgccggcatccttttcactgacgtaagttgctcaccttctcgtccgtttgttagagtactctgggaaactgtacaataacttaggctaagctgctctgatataaaacagccgaaacagccaacaagattatttctagttttgaattgctgattgcttgagcaactgtaaaaaggactcaaaattttcactgaattgtgggctttaccctggttagagggagcccttccagaaattctctggcgccctggtgggccgcgcagagggggtttggaaatagttttcaaccagcaattgacgcgcctcggtaatacctcatgagctgcgtcattgccccaagcgcaaagatgagttgggacgttcgcccacagcctacttttatacatcgctggagacgcgcgttcgctaacataggcgatgtggtactaaacggaaccgacctactactactatccgccggactcgacctgcaacgccaagtagagctgccgatttggggttttccttttgtattttacgccctgctaatcatgggcctagtagctaagccgagattcacatgggactttaatgattttattattttagagaacaaaaggctgagtaaacccttgctttgctcgtgattctttgcagttgctccgtgtatcagggaacagcgacctccccgtgtggtttgaagcaggtgcggcgaaattcgaattcgcaaacaccacggcgctcttcttcgttcagcttctcttgatggggtaaatttcaacctaaacaagtaaacaaccaatcatttcatcggtgttaataacaaaagttcccatacaaaatgggatatgctgtgatttgatttcacgtaaaacaaaactgacattgtttctattcgacacaccgatccggacaggttcgctgaaaccaagaggtacatggacttcaaaaatccaggatcacaagcagaggaaggaacgttcatagggttagaggctgcacttgcaggtcaacagccagggtaagtgagcgttgaagcatgacaaaaattcacctgacagccctttgccttagttacgctcattacattttttaaaaaaaaattcgacagctaccctggaggccctctgtttaatccactaggacttgcgaaggatatagagaatgctcatgaagagaagctcaaagaaatcaagaatggtagattcctctcagtacagtttgcgagcaaaataactctacacaagtttgctaatcgagtggtttcttactgtcacagggaggttggcaatggtagccatgcttggcttcatggtgcaagcatccgtaactcatgccggccccatcgacaatcttttgacacacctttcggacccgttcaacaaaaatatcattcacgcattctcctcttcctaagtactcgtcccaactcccaaaacctttcttttcactgtccagtgctatggcacaaaaatgtcacaatgtttgctaacaggaggtggcctttgttagctttgctctttgcaaagttttctctcatgaaaattgaataaaagcttcaatagctgacgaactgtgtattaatagctcatggtaggggggagggaagacaaggaaatacagcttatcattctttgcgattgatcatagccctcagtatattcgctcacttttcatttccatggtcgattttttccccagttcaaagcatgctatagtcgcatgaacagatgctatatataagagatacaggaaatttatacctgaccgcaatcagcatacttgccatttcgtaataattaactacatcactcaaatctcgccttcaatataaatacaaactcgaacctgctatacacctgaaaacttcatagcacaaagcactcggttgtactgtacatatatgaattaaacaaaggaaaaacaccacatcttgtcatctacagctcacccgtatcaactagcttgagcccccagctcatatcttcacagtgtcttacatgtggaacaagctttcctgtatcagttcccttcctagttttgcaatcgtagaaaggtggagcatgaaagcacggctctatagacataacttgacggcaaggtggattaggcgcagtgcggttttccggcttgaacattagccacgtcttcgaaccactcagaccttg

SEQ ID NO: 4549 - DNA, 3253 bp, Sorghum bicolor
cggtagcgaagcgcaagcgccgaaggagaagccccaaaccctcaccatgcacaagtgttgttcttgagagagatgactttgtacagttcagttcatgaggacagacagaccggactcttttttagcttcccaaaaattttcaagatttcttttcacatcgaatcttgcggcataaacatgaagtattaaatttagacaaaaacaaaaactaattacacagtttgcctgtaaatcgcgatatgaatcttttgatcctaattagtctatgattgaataatatttgtcataaacaaacgaaagtgctacaatacccaaaatctaaaatttttgccaacttgaacaaggtcatagtggtttggattcacccggtcgacatgacaagttgtatcttgacgagtcagaactcagaagcgaggaccactaaggccttgtttagttggtaaaattttggtttttttggctactgtagcactttcgtttttatttgacaaacattgtccaaccacggagtaactaggctcaaaagattcatctcacaaatttcaggtaaactgtgtaattagtttttatttttatatttatttaatactccatgcatgtgaccaaaaattcgatgtgacggggaatcttgaaattttttgcgaactaaacaaggcctaactagccgacctcagcggacaagaacatggccgcgccgatccgaaaaccactttaggctcgtcgacattacgaggacgcgcgcgaaacgcacacgcaccgccggcccggccctcgcgtactggttaggtgggccggccgaccacaagccgaatacagtacaaaaatacccacttgggacggtattatctggatctagtactaaaaaacaattgttgtcccgtaccgtgccaccgcgaggtctcagtctgacttcctgtaatgtggagttgtttattcagttcaacgaccggtcgtcactcgtcaggatcttccaattccgttccacaatccacatctagtttcagcgtccaggtcgctaggctagggacaaccccaaagtcgtgtgagctagcaacagttggtctgaatttctctcatttcatcttgtttgaacattcatccattaattcttgaggccttgtttagttccaaaaaattttgcaaaattttttagatttcccgtcacatcgaatctttagatgcatgtatgaagtattaaatatatatgaaaataaaaactaattgtatagtttggtcagaattgatgagatgaatcttttgaacctagttagtctatgattggacaatatttgtcacagacaaacgaaagtgctacagtacctgttttgcaaaattttttggaactaaacaaggcctgagtttatcagttgttgtgttatatagtactatatagtagtaccaaaacaatgaaacgttgtattaattaactaagatcactagcaccaagcaattgctaaccaaagattgaagtaacatcaatagtactccactttattttcttatagcaacatcaatggaatcttctttctaaaaaaagggggggctatatttattggtccagcacgaaattaacgtgcgttgagctcatgacatgcactaatcataagataagaatgccaaacccgacactaatataataccgtatgaacttgcacacagactagaatacataccactgtaatcgaagccgcttgcatccacctaacctattgtatatcttcgccagccacttctacttctgatcattcatgcatccattcatatcttaaactatctgcacccgtcccgttcacactgataggtgatgacgagaaacgtgcgcgaaaacaacccggtgcaccgcttggactccgcgtgcgctcgtgccggtgggcatgcacgcgcgcctagtataaaaaacccacagcacaacaccctgaaacatcaccgccgcgacctcggagtccaacacacctttttccgccactttctcgcgacaccgacgccacgtcgtcgcacagcaaccaccaccaccaccaccaccccgccatggcgccgaggttggagcgcggcgggttccagctcccgaacaccgagcaggagaactcactcttcctcggcgcactcatctccgtcgtgtccggggacgccgccgcccccgccgcgttgctcccggcgccggcaccggcttccgcggcgtgcgccaggtgcggcgtggacgggtgccacggcagcggctgcgagctcgtcgctgggtcgagcagcgacagcgacggcgcagagtgctccgccgcgtccgcgagccgcgccagcgttggcggcggaggaggcgtgggcaagcggagagggagagggaggagggtgagcagttacaggggcgtgcggcggcggccgtggggcaagtgggcggcggagatccgcgacccgcgccgcgccgtgcgcaagtggctcggcacgttcgacaccgccgaggacgccgcgcgcgcctacgacgtcgccgcggtcgagttccggggccagcgcgccaagctcaacttcccggcggacgctgctgccgtggcggcgccggcgctggcgccttcctgggcgggggcggctgtgcagccgcaccaccgtccattgcccgatcatcagagcctccgcgagaactgcgggtccaacgccgcgtcgccggtgcacgtggcgcaggcgccgaccacgcagcagggaataaggacggtagccaaggaacaggacatctgggacggcttgaacgagatcgtgatgatggatgacggcagcttctggtccatgccatgatcctgctcctcctgcaccttcgtccatccgtctccggatcttcctcttgttttagtgcttttagttaatgatgatgatgagattccatgattgttttttagggaagagattccatgatctccctctgaaatgaaaacactttagcttcaatcacgagattgcttggcatgcagacgtacgtaaagtgagtttcattttggtgccgtagctaacggagtaacggcccggccaccagatgactgtactctgtaaactccagtcaccaatcgctttcatacgacttttacaccgacctctgaccaccgtcgtcgtgtgattacgtttacagtatgtgagtcgatgagtggcttgtggctacaaacaatccagcgttcctccgttctgcaaaaaattggcgctgcacgtatgcacgtgcacctacctccacctttaccgagaaagtatgtccgtgtccagaccgatgtacaccctgttc

SEQ ID NO: 4550 - DNA, 9214 bp, Sorghum bicolor
tatgactcatgccaacacgttgtaattgtaattcaagagccacggccaattgatgggctctaataatttatagactaattgcaagaatctctttatgttcttcttaattaagataaccccttaattagatctcaaatattgtactgttatggatctctcgctagctagatggagtcatggagagcgcaagactagctctctaaagtgcactcaagatattaaaaagctgattcagggtgagaacatatagattttgagagtaagtttaagaaaaactcttagagatacttagtctgtccaaatcatcgaacggagaaattaaaacaaaagatgacaagaaaaaaacttgaaaggcaattgatcttggcaatgaccctcagctgcacatttattgtaaggagcagctgtggctgcttgattcctacaattaattgctactgatatgctgagggattctgcactgctgatgctgcagcctcagaaaagacctaatcatttttcacgaaattagttaggtataggtgacataatcaaccccaaatctctactagtattaaaaaatgtatagttgtcttcacgaaattagttagcaggtaggtgacatttctgtatagttgtcttcgtgattaatataaaaagtaggagtaacatttaaacccagaaggggtaagcgccaaagaagtctgatcaggagtacaaattgttcgttggcacctggcccagtatagaaatcacacctaaacaaagatctcttgtgataacttaaaaaaatggttccctgacgaaattgttgcatccaacgaaacatgtaggcgcagtcggcagcaatgtcaagcattatcgtcgagggctcgaggcgacgacacgcgtgtgtgtgcgttttagacgaaacctcacgcgcgtgggttcatcacatcacacccccagacgtcgacgtgaggctgatccatttgtacagtgcacgattacaggttttggccgtgtccacggtttcgaacccctggccagtgcagtgctagcggactcgtccggacacctgcactgcattaccagccgccgtccgtgccctgctctctcagtacatactcccctgtagacaaacgcggcaagagacggcccacaggccaggccagtgccagtcagcggtgagacgacggtggcgtcatggccggtggccggtccccgatccgtccgtccaatccttttggctgcgcgcgcccagattctcccaccttgcgcgcgcccattgggcagcccgtcgcgtcgcaggccgtcagcgtcgtgcggaggccgccacgttgcgcgctcgggagcggcggagcccaccaccacaccacgttctgtccaaccaacgggacctgaaaaagaaaaaaaaaaaaagccttgtccaacccacgcgctgcacccagcagatcctctacctcactgacataccggccccgccggcctcagtcccagcacgaggagaggaatcaccgaatcagcgcctcagcggtggccggtgggcaggcgcgagatcttaggcgtctgtctgtgtacgggtgcggcgtgcgcgaggccaaaagccaagagggcccggactagtactactttattacccggcacgcacccaactccgttgagatttcgtcgcggcctcgggcctggcggcgttttaaacgcccccacacggctcctcgggggcgacacctgtccacccattccccccctcgcctcgccgccgcggtcttgacctcccgcacccgcggccagacaccaacgcgcgtcgtccacctcgcgtcctcgcctctcaggtccccccccccaccaaattcctcttgatccgcggaatttcccttgctaattctggtatatcctgtcgctaagccactctgctccgcctatcccctgctctcagctcacctgattggcggctccgttcggtatcttggcgtgcgcgtgcggcgtgcctgtgagggctctttcgaagcgtcggttgaggtgggcgacgcgaatcagggatgaatttcccgggaggaagcgggaggcggcagcagcaggagccggagcacctgccgccgatgacgccgctcccgctggcgcggcaggggtcggtgtactcgctcacgttcgacgagttccagagctcgctcggcggggccgccaaggacttcgggtccatgaacatggacgagctcctccgcagcatctggtccgcggaggagatacacaacgtcgcggccgccaacgcgtcggcggcggaccacgcccacgccgcgcgggcgtcgtccatccagcgccagggctcgctcaccctcccccgcacgctcagccagaagaccgtcgacgaggtctggcgggacctcgtgtgcgtcggcggcggaccctccgccgaggctgcggcgccgcccccgccggcccagcggcagcccacgctcggggagatcacgctggaggagttcctcgtccgtgccggcgtggtgagggaggacatgaccgcgccgccgcccgtactgccggcgccggtgtgcccgccacctcctccgcagcagacaatgctgtttccccatggcgatgtgtttgctcccttggtgcctccgctgcaattcgggaatgggttggtgtcgggggctgtcggtcagcagcagggaggtggtcctgcggccccggcggtatcgccgcggccggtgacggcaagcgggttcgggaagatggaaggagacgacttgtcgtctctgtcgccatcaccggttccgtacgttttcggtggtggtttgagagcaaggaagccaccagctatggagaaggtggttgagaggaggcagcgccggatgatcaagaaccgggagtccgccgcgaggtcgcgtcaaaggaaacaggtaatgctctgtctgtgagtagattgttggtgcggctttactcaattgtatcaaattgtcacgtttactgcttactagtaactgttacaccgacatgtgtaagtttaatgtttgtgttttatttttcctcgacatgtttatttcacaagaacgctgttgagaaaatctcaccatgacaaggtcagatttgcttgaaatgaactagagtatgtgccttagaagtatgtatagttatgctacattggtataagcatatcaacttatcaatcatttgcaaaacaataatataaactgttgatgtcttggagatgtaggaagtagaaatctaagtgaaagctatttctgaatgaatctagtctcctttctctcaggcttttaaaactactggctattttaagtagacataattgtagttttgtaatatttgctaggcatatatgatggagctggaagctgaggtggcaaaacttaaagagatgaacgatgaattgcagaagaagcaggtatgctcatacaatgtttgcatttttattacttgggtcacattcatattaacttataaaaatatttcttctgaaatagtgaaattcaaatagtttaattaatatccatacttgaaacatacttgaaattgagactgtttggcattccagagagacaaagtccaaataaagaaaccaacaatagatagtgtgcatctagttcatgagagttgtttttttttctgtaataatttcctcttaaattagtttaccagccaaggaacttcccatttatgactagttccttgcctgctttatatgaaaatcttattgtcagcaatatttttgttcaactagaacatatgaacttcacagtcttttatttgactatttcatgtgtagtgcgatcataatctttaagtctgctgttgtttagtaaccaaccattttttctaatttgcaggtcgaaatgttggagaagcaaaagaatgaggtaatttcttttcattttgaagagactatttttctctggataggccatttcgtttcattaccattagtgaacttggttgatgtaaacaaattgttttctacaaaaagaatttataatttttagattcccttgtcatgaagtattatagtcaactctatcaacatcattaatatagtatagctctattatcatatcactttctctcttttgtttacttaattggaaatggatgagtttgaaacctcaacaattattattttctaaacttgtggtttctgtgacttgttcatatatgagaaatgttattgttcattgacagctattgatatccatagagttctgcgtttaaactatcaatatatcacacccatatttgactaaagcaatatcttatatgtgaagtaaagctgtagagaaactaaaaaatgattaaggccagaactgatgtggatgtgatagttgtattttcctacaactagggctaggtggtggcatttaagctggttaaatgatttgggaactctctgaattgattggccaacttcctgaactattgtcgccatgcagtctgtgcttttttatatgcagtttgcatgttatactaatgttgtattttaaagttactaatgttcttgtcaatgttttgctcaagcttttcccagtattttaatagttgtaatgtctatctgtgatcttatgttgatctaagaaaactgagaacggtcaagaaaatatgcagctctgttttaccaccaaatgttaaaaatgtttgtgtaggataaaatgtcgcggtgtgctgatgttatgagaaatgagagcaataagattgatgggcaattgcagcttcctagcttcatctcaaaattatgcatagtaaagtttcacagttaaattttacttgaatgaaaaaaaaaaacagtggatgttgcacaaagaaacatattatttctctatctgacattccatgagattcgtggccaattttatttagcttattttgttgtgggctgttttcccaccattgactaatcagtataaactcatctggaggaaaagtttatggagacaccctttgtgtttttatgcatgggaaaactagtatttatttgttttgtacagaacttcaggttcttgttttttatgcatgggaaaactactatttatttgttttgtacagaacttcatgttctgactcttgcaagatttttttaaaaaaaaaaattattcttgcaagtttcaattgacataattatgttttgccaaaaaggaaaaaggattagaccactgctgttattactgaatcacaagttcagtacagaaaagcatacatcagatcctgtttgctcaaatataacaatgttttgatgattgctgcaggtcctggagagaatgagacgacaagttggacccaccgcaaagagaatttgtctgcggaggacattgacaggtccgtggtaaagctatagacatgtacggctgtacctagcagcatcactcttgaaggagtgtacatagtaggtgaacatgagcatacaatggccagagttgacacagccattaatacagagcttcagtctcgtaggcggatagattgcctgtgattttcacttcataggttttggccattcgcaaaagaaaggttcaggtgaatagaggagtttgtatgtagattcagtcgggtcagtttattgacccaggtatagagtgcttatactccatactgcttcttcaggcttttctggtttggtgtgatactatatgactgtatcattatccttgtgctttgtaaaaccaatttgtttatgatgtagactttagaactgcagatgttcgctgtgcccaaacttatagacattggtcaagaaaggagtatgttgttgtatgttccgaactcttttactttatatataaattcctgcaggggctcacgcccttccagttctgtcaaaaaaaagttgaagacgtttggttagattttgcaaccaaattgacaaggtgtatgagaggtgagtctgcaagtccattccgggcatcgtcggtgatgctcgccgctcgccggtggcgtcgcttttgttgtgcttgattggaagggaatcagtgagtgccttcaatcatacgatgctacaaacctatgcatggtccctgtgagttcgtgtggtgtgcttggccgggagctcgtgtagtggttcggctggccagcactgggacgcgcaggcgtgccatgttcgctgtcgtggccgtcctaatcgcaattaacaggactcgccgtctagacacgtgcagtgtcggaggcatctgtcagatcagttggccatctaggcccgcgtaaacgcatcgaagagccctgaactgaaggcatctcacggtgctcatggaatcggtcctgaagacgcctgctgcactccggcacggtgcagacgccacaagctgaagacgccgtacgcctcgggtacagactacagaagaaccatcgctcgtccagtccattagcgctggctcgaggttactctgaattatgaaagacgagactgcattagcgctgtaaccacattgctgtctgcctgtctgtacttcattagttgattattaggcaggtgctggaccagggccaaacagtgcagtttaacagactgcacccagcatcggcattgcttgcttgctagtgtcaatgccgttcgccattaaagaggagccacggccggcacggcgcacagcactgagtggactccggtgcggctccaaaaaagctgaagtggttagcggccgggaccttgcacaaacaaggtgcgttactgtgcagtgcagcagtggctaccgtgatgcggccgtgcgcaccccacacccctgcctgcccctgctggctgttgcagtcggcagcagctcaacgtgacatgggcagcgagcacggagacgagcgaagaagggagacgagcgccgcagcagctaaaagacaagcttcgctgcgccgaaacgacagaaagagacagccaaattccagagtgcagacgcctctcttctctttcccattcgtccagacggaccacagcctgtcgtctcactcttgcaacgcaacgcgcagcacagggatgcaggatgcggcagctgcatcaaccacctaaatgcaattttcccaaccgatcaaccacacgaaggaatttctttgtgcctctcctggttttgatgaaaatttgtctttaatctgcacaaacaagacatcccaaccgatgcaaccacatggagttggttttgatgaaaattcgtctccttactcttgacttgcagattgacaacagatttcaactctgaattgaccacaggtttgtatcaaagttaacacaacagatttcaactctgaattgagaggtttgtatcaaaattgagcaactgagaatatactatgaagcatttggttaaaaaaaaaaaccaaagagaaaaaaaacatagtatgtgcgtattcatttatcatcatcatccgcagtgtaggagagagatggtaaaggcactaatcatcaattgagatgacgaaaattaatctgctcttgataggtttatgtacatacatggagatgaaaagctaatacggattaagagaagcaatagaattgaaaaactaaaacgaattagaggaagcaaagtaattaggcatgatagttttgttttaagcagaatcatatcatcataatgaaagaaagttgattagtccaagataagagcaagtggaaggcggcggcccaccaaacaacataaatttctttctttttccttctgctagcgtctgctcgaggtgatcggcgagcgggattccttcccccaatgcaaggtagcggcggtcatagtgccgccgtcaccaagagccaagagctcagtggcggctcagcatggaaagcgcaaccacctgcgcccactgcttcagccgcatcttcaccgtctccggtggatcgcctgcatgaacaaacgggtgcatgatcgaaactaagaggtcgattttttacatgaacatcacgtcgggcgtcgcatttggatcgacacataacaggttgttgattgcatacaacaaaatcacatggcacaggtaaaaatattggatttgatgcgagcatcacctggagataatatggacatcgggctgccgagcggcgactcttcggaggagacctccgacgcggcgccgcacgagcacgtcggtccctcggcaccgccggcgtggacggcgtagtagaggtcgagcgccggcagcgtctccaggaggcggttcctcccggcacagccgcacgccgcgcacccggacccggcgacggcaggggccggctcaaatccgaaccccagatcgatgcacccgcggagctcgtcgagatcgtcgtccgtgacactccggacgcgccgcagcgccgtgccgccgcggcgcatgccccggcgccggcgctcccatgcctcatcgcgctcgatgtccggcgaccacgagttctgcttctgcagtccaagcgcgggcgccgcggcagaccccgccttcttccctccgccgccgccgccgcctccgataagatggcgttgccccgccgccttatccatggccacgggcactgccgctgccgtagaccctaccacctcccctccgccccctcgcaaggggaaggggggacttggagaagcggagcttcgatgtgggtggaggcggccgcggcggattttatccctcccctccgtcgctgcgttggcgtagcggatgcggatgcgggcgcggtcagctgcgtgacgtctgccgacgtaaccagccgtatatatggagattggagagagatcgtaccttccttgtacaccgggtataacatcgaatcgaacggtggatttttgaactggaaggcagcaagggttaattattaggcattgatttcggtcacgggggagggtggcagggatgagaaaaaggacggcaacaaattttgcgctgacacattttgggttataaatggcatttttttgaatgagctgttcgagtttttccgtgtacaaaatggaaaccttcgtcaatcgatccaaccatgcagcacacattattatggttcaaccaccccttggtaaccttccattttgagctccaatacgtaccaaaattacccttcgcaacatttttttttcttttcgtggcgatctacccttggcaacatgaccaatgccaggcatgaatttgcaagcaaattccaaaatttttagttcaaaactttgatctcgcgctgtataaacgaacatagtttaaccgcgagtggaaaaaggcgacaacaagctaggacacgcggtaagtaaggcggtaactgctaccggtccttgacagtggagatggtgaagtgcagcttttccggcgctagcgacgtgatcgatcatgt

SEQ ID NO: 4551 - DNA, 5194 bp, Sorghum bicolor
atcagctagaagatgtttgtgaatatatacatgatatccctgtgcaattagggttttcaattttggtatcccttgaaattaccaaacttttagagaatttattccaattttttagagacttaagaagaagtatgatttttctgatttttttagaactaaacaaactattagcatgatttatgactacatatctatatattgaatagaagaatatgcaacatatataaccaatagtaggtctagatttatatatttacagtaaagcatatgcattagtgtaagaggaaaatttggatttttttcagctaccttgaaattactgaaatttgtgaaattttgctgaaattttgaaccatttgtgcaactgctccaacttgaaaggagaagagtccaagcagacagtgctccacatatattcttgaaatataattaatcctacaatagctcgatcttgaagatttggtgatttcgtatggggctttctctgctgaagagctggcgatttttcctaactagctaaaaaaactaataaaaggttatatatttgtacaagtcagagatgtcgcagtaagcttttacttttatgctaattagctgtgtgattgtctctatacatgattactacatgggtaatatatttatgcttctgaggctaacaatataaagagccttgagatctattccaagtccaaggtccacaagcaacaacaagggttagccagtttttggttccaacaaccagttgacctgaatcaccatgagtagtatataaagcgagaataaaagaaaaacatgatcagatcgaaggtgtagtatattacgaaagagagcatagttgagcataaaattagtgcacaaaaaacgccccgtgaaattctgtgtggcccaagcaaagttgactcaagattctgtatgtacggtgccaacttggcctgtgcctggtgttcagttggtactagctgagattagaatgagaggcactgaaatggctacagctttattagtttgcagacgatggcatgccatgggtcaacacattgcagaggtctgagtaacagagacatcgaagcaagtgtataaaatctgtggatcacaaagctttaggaaaacaaaatggccacgccttaattaattagctacttttctttctccaaaccatcatttgtggactttgctaggtttacatagacgcaacacagtcgtgggcatttcttaatacagaaggcctgcaatcacaatactttcttatttcagaagacgtacttctaggcgtccacaagtagtatatattttcatcaaatgcatgcatgtttgcatttccctgtcctgttgatgaagtctctacagctatatatcttctccatcaaatcattaacattgtatgaaccactgggctactaaactattgtgacattatggtgagtcaatagttcgaatatagcagatatacaacaacacattgaaaggttgacatatgtggatgcatgcctttttaaaaaaactgtgctacatatactagcccacaatttgatctgtcctgtcctaagatcaatgggggaaattaaggtgggtgatgatagcaacgtcagcccctgatcagagaaattccaaagagttgacctgggctccatacaataccaatccttggcgttggaagcgctcctcgcatcacatgacggagcgcccaacttgactgggtatccttgtcatttggatcacaccaccgtgcgctacacacccttcagactaatcgtctatcgccattgctcatacatcgtctcattgacttgtgaaaaccaggtaccctctgtatctctctgacatgtgtgccctccaaatagataaagattgcttggtaggttgtgtatgcagccatgcatgtaccaaagcaggctagctatttgttgaataggaaatgacatgagataataggattgatgagaggagtctccccttctcattgcctctttaatacgtcttagacacccggacattgacttagatgcctcgggagaagcagcattgggatttaagacccttcctccttttattagctgtacaaacggcagagagacaaaggtacacaagctaactagatagaggtcaagagcatgtcatccaagaagaagagggccgcgatagatctctccctagaggtagagaggagtgacgaagaccatggcagcggcggcagaggcaaaggcgatcgccgccggggcaaggatgatggtgaggtggacaagaaagaagaacagttcaaggagcaaggcgaggaacccaaagaggaaaccggcgaggaggagaaggtggtagttgaagtggttgtagaccaaggaggagacggcaccaaggagatcaaatataggactcaacaaggagaggagatggaggacgacaagcaatcgccagcggatgcccacggcgacggggagagcgatggggccgaagctcgtgcgcaggacaagcacgtggtagaggccgccggcaacggcgacggcggggacgatagctacaccaccatggtgcaagacgaggtaagcacatacactagctcgaggctgctgctagctagatgtactatatatagtgttgctaattgagctttgcagctaataagtagctagtgttaattcatcttgtttaattcctccagcaatataatgacatatgtgtgtgtaatatgtcttcaggtaagtgcgatgcaggaggagatggagaagatgaaggaggagaaccggatgctccggcgagtcgtcgaccgaaccgtgcgtgactactacgagctgcagaagaaggtagaagcctgctatcagcagcaacaggcagatgagcctaaggtaatagaggagtagctaataatcctacgctaatcgattaatcttatctagctagctagggtgttatccaattgtagcctacgattctaccccatgttccatcatctagctagcgctgatctcgtgccgcttttaaaattcttccacgtgacaccataattaccatgtcaatttgattcgtggttttatttgatttctaattcgatgcgcgcgcaggagcccgaggtgttcctttccctcggtgccaccgccgccgggactggcggcgccttcccggagccgaagcggaaggagcggcaagcagcgcggcggccgtctgtggggagcgatgacaccgacgacgacgacgccaaggaggaccttgggctgtcccttagcctgagagcgtcgtcgtacgaggaagagaagctagaagcggggcacgacgacgtggaaggtgcctccgtggtcggcgccgacgacggcaaggcgaagggctacacgctgctggagagtagcaagctcggggcaccggcggccgggatcacgagccagagtgtcaacccggccaaccgcaaaactagggtttccgtgcgcgtccgatgccaaggccccactgtaagacgcatctcactgttcgagttcttccagcgcatgatttcactgtcaaattgatgatgacgagtgatctggttcgcgtgcatgcatgcagatgaacgacgggtgccagtggagaaagtacgggcagaaggtcgccaagggcaacccgtgcccgagagcctactaccggtgcaccgtcgcgccgggctgcccggtgcgcaagcaggtaaccaaacatttgcctcgccacttcagcgcatgcattgcagtctctgccactaaatttcgtcgcaccggccggctgcgcttggccggaattatatatgtgtgtgcatgcatcggtgcatggagtgatggttactgattcgtgatggtgtgcgcgctcgatttgcaggtgcaacgatgcctagaggacatgtcgatcctggtgacgacgtacgagggtacgcacaaccacccgctccccgtcggcgccaccgccatggcctccaccacctccgccgcggccacattcatgctgctctccagcacgacctcttcctcctccatctccgaggccggcggcggctcagcggcgcctccctacctcagcactccatacctgctcaactccacctcccaccactccgccgcttcgccgctgctcagcgcaccaccgtcgtcgtcaatgcccagcagtacccctggcgcggccagtggcgtgcagcatctcaacatgttcgggcattcgtcgtccatgctagctcagcaggcgccacatttcggcagcaacagcaagtacccatggtcatcggatcctttgcagggcatgggtggtggtggtggtctgccagcagggagcaagaggccgttttggagcaccggcggcgacgagaagacggcgacattgccggacaatgtcggcgcagtcatggcagacccaagtaagttctccgtggcgatcgcggccgcgatcaacagctatatggggaaggacgggcaggtggtgggcggcaaggacggggagagtagcagcagcaagagtagtaacaagtggggggtggtcgaatcacttccacctccatgacgactactagtaatcagtagtgtaaggcaccaccgagagactagctaattgtggacaaattaaggggttttgctttcttcataatttgttgtgtgtgtaaacaaatcaagatagggggcaggcaaacacaaattggagggattttttgggccattggttgtaatcatttttcaggtttgctccattggaacagatcaactgcaattgttgttaactgtaaactgcaatatctactgttttattatcacgctcctcaaagtcaacatatgaatttttgcaatatgcacatagaacttggcgtcttaaagaggtacgcataaataatatatatgtatagtcagagttctctcaaaacaacaatgtttccgcgattcttcggccacgatcgctgagctgctccatatcgtcaagatggatcgctggatcaaggctggcgcatgcttgcagtgcttgccggaggatagctgcgccatggggctaagcaacgttgttgctatctttaaaatgtggcctcagctgttgccggcacggtcagcaaccttttgtaacataaactgcaccaaaatgatacgcattgcgtattcaagaaaaaaaaacaataatgttgacctgattttatttgcttatttcatcaaaaagcaaaaaagtcaagatatatgtaggagtagacacagagcataagtattaattttatatgtgtttttttttaaaa

SEQ ID NO: 4552 - DNA, 4108 bp, Sorghum bicolor
acctcgaggaaggtacttgaggaggaagcctctccgattccgctatactcgcttgcggatttggggtctccggcgtctgatctgccgcttgatgcaagaacctcgcgttccccagcggtgaaggaggaagctgggcggcgagatggagcgggccggcgagaagaggcatttcttcccgctcaccagcttgcaaatcgggtacgtctttcgcggggattttctctaatgtgctcggaattcgtcgtgcgattgttgctcgtttgcccgcaataagaccgctggccgccggttgccggcgtgctgttgttgctcattggaataatggagcggaatgccttttggcgttcttttttcctccctgttgcgaatttcgttgttttactgtttataaggtcgttaagattgcaatgtggtctggttttaatgttgatttgttgtttctatccggatgaggcatatatgtgcacaattcagattgtttttttccctttttcttgagtacaatttaccattagttcttgcggggaaactggcattaacccgattacctgaaaaaagtgacttgcttgcttgtgccgcctgcagaagataattctaacatactgtttttggaaaacggacaggaattgccacaaaacgggaaatgggtagttttattcgcatctatagatgtttcgggaggtacacttgcgtggtcgccactcgccatatggaaaggaaacccactgttggaaatattgctagttgaagcgacaggtggtcagtgccgtgcactcgaggcttatatatttttttgccattcatagcgaaaccccaactttgaactgtgttcgactgctggtagagtagtagtaaaatttgtccagtggtcccagcaaaaactgctcaggcttctgttgcgtgtgtgcatatattggtttatgaagtactgtgttttcagttttccactcatatttgaacttgagcgtccacagaccaactgaaagaaaagctgaaaaataagcaattcaatatatgttcacagctgaatgtctaatatgtttttcccggcgctggtatctgcaaacgagaactagtgctgtgctggtgaccattttgcactgtcagttccgtggttgcgtctatttagttttgtgggtcttgacatctcaatgtatgtgtcatctgttactatttgtcctagctcatgtaagatggaatatgctttttagggtggggcgtgatttttacattgatctgatacactgatattgtttgtaaattatagtaaattttcattcctatctagtatgaacaaggaactaaacaaagttttctttaattttaaatgcagggatttacagtcgtatcttgcagaactgacaatatttctgtgccctcataccaagaagttccttatattgcttgacaaccgcccatggttgctagatcaggatacaaaacctgctcatctatggcaattgatggttactaaggtctgttgttctcgctgctttatgcacacctatggcagtatctctttcttgcttaagtttcactgcattgctaacaatctgattcttttttttttctccagtcaaggttttcccctttcgccaactctaggactaggagaaagagagatgaaactgatgggaagcttgtattctcaacaagctcggtatctgctgcccatttacagaataaatcttccaggtggtattccttgatcgatgaggctatgcgggaaaagaagcttcaagtaaataagttgaaggatgcccgcatactgaacagggagcttcatcagactttatatggttttatcatttttgaggtagattgggctgatgtgcgtggcatcaattatttgaatgaacttcaggtacagtctattaatgttgatagtcttactgttagggatcatattgatgacttttaattcatggaacaaagcgacaaacttatttcttttagtatcattgtagacggatacatcaatggttgtggagtctaaaataatgaagagatgggaatttgatagtgttaatcaagcttcaacattgatcacttcttggttctcaggaaatccctctgaatgtcagctactacaggactatttgaacagcatctcttctaatggtaaaatcactgatagtaaccctttcccttttctcttcattactggtagtacagagcacttatacgcttgctgtacaggtggtatattttatgatgctcagaatgatttcttaacacctgaatgggacagtgagaatttaccaagtgacagtgatgattctagccatgttcaaatcattagagagtcatcaggtttcacagactcatcttacactgcacctccttcctctggaccttacaagagaagaaaaataacaaaatcagatgatggaagtagttcgactgaagaatcatacacagaaattgtggcctcgccaacacatttgtcatcttcatgttcatcgtgtgacagtgataatgagaatgttaagccgctattggagcctagcacatataaggatgtactgatctgcttccgctttgatgatcatgaccttccattcagactgaaagaagtcatactatctgatgtcagactgttaacactacttgaatatggccttccttcatgggttatatttcttcagtcatatccagtgttttgcaagatatatcgcccatggatgtgccctcttgccagagcattgtatgtcttgatgtcattaatcactgttcttataggattttatgacctctacaagaatgtgcccatgttgaaggcaactgcctcaagattatttggccctttctttgattggatagaaacgtgggaaatgatatcaagacttaagtatcttggaactatgcttttcctgcataactttcagcaggcttttacatggtctcttaagattgtgggtgctgctaagtctgttcttagtgttttgacaaagccaattgcgggaccaattgtggaggttttggaacttaccatgccaatgtggaacctttgtgctgagacagcaggacatctgagttcagttgtcatggtagcactggagacgtcttggagtgtagttatcggtacagtggagatgattatctggccattttggtttgtcttcagtactatgattagcgttggtatggttgctataacctcttacatcatctatttcgttttctttccatgttttaattcttatgccatgctaattttgtttctgtcaccagtaaattcaattctgtacccaatcatttggctacttggagagatactagctgcacctttccgactagtcattgggctatcaagttttgctgtggacctttttgttgatattgtcagtgttctaagggagagctggtcaacactaactgccttatatcaagttggatctgttcccagctcacctttgcttacatctgataatagcatctggggctcactctggaaagatcttctgtatcaggtatcagaagttcgttggcactgccgaagcatacatcgaactatcgatgaaacttactttgaattttttttctttcagattttccgagcactacggagcattttgtggttttattgccttcttttcaacatgtaataggcaccggctcaggtatgtttttttcttcagacacctatgctatgcaatgctacagttgtaagatctgaagaacattaaataaaaaatcaaaatgataccttggtttactgttgagttcaaaaattatccttcaaaatggcttttatttccccctgactgtttaagtgaccttttcagcatctcttacacagaatagggcttgtttagttaatccccaatccaaggggattgaaagggattgagggggattttatcctctacaagtcaaaatccccgtcaaccccctcaatcccctccaacccccatcaaactgcccaaaacgaattttgtcgtcttcttcccaaagttaggttgcattataacttcaagtgtgctaggtgttaactactactgcttcctgcagcatttacaatcacattcaagtgtttctccggcgcatatctcatgcctcacctggtgcacggtataccgcttaccgtgatgggactcggaagtat

SEQ ID NO: 4553 - DNA, 10947 bp, Sorghum bicolor
ctgaatttggagcgcatccatcttcagaagaatcatgtgtaattgccgattgccgtttcaactattacatccaggtatccaacaaccatcgcctgcgaggtacaatttgattttcatatacagtattacgcgctaaaaatggagtgtcattgcaattcaccggccggacaacagctgtacttgacaaaaagaaaacgcgaattcacttgaaacacgtacaggagttcaggatagatgcagctccatgtaccatacatataagctacatgaactgatgtgtaatttgaggcatttaaggcttctgtgtgatggctccagtcttgttaatttaagccacgtcattataactagcccctgcaaggtctcagttatgctccacaaaaatgcagtctgtttaagtttaatgagggccggggtgaacgcagatcctcagtacggaccacaaataattgtggagacatatttgacgttacttgcagagcagcttggacaccacatattttcaatttcattagccaaatataagcagagttaatatgatctggcttgatatccagaaacatgtatgggattcccatcaaatccaataaactagacacgaaaaaaaggaaacgaggagatgtcttttgaagaacttatggtgacacattgaccctgacgtccattgctcgcccccccccctgagaatatcattcttctgcaactgatgctaatgttgacgctggtattgatttgttgtgaaaagcatactattctgtagctgaaaaaagtacgactgttcctggctgataagttcatatctgaaaataaagtgggagaactttagttcagccttgctaattgaagtgaaggttgccacgttcaaatatgaaagccatctccttctttatccaaatctggtgtggagagagagagagagaaaggcttacttatattctccatgtccaaatcatacgaaagccttgcttatatatattccacgttcaaatatgttcttgcttggctgataagttatgactgaatgtactgttggctgatttattatgagagaaaaatattgttgaatggttagcagattcggcagataagctcaagcgaacaaatggtactagaaatctgtttcttcagtactgttctgttttttcttaaaattatttctctctttctctatatacttcaaattctcagatatttcctcctttgaccaaaacttggagaccactggccacattgccgcccaggaaccatagacagctggatcagaaatcagttttgctcatcaattggttgaataataagttgcagccttgcaggtacagaaatgccattttaggccctcatcaattagaaattccagttttagttaaaatatatatcaatttattagcataaagttattttgaaatataagataatattatctctccatcccacaaaatatgtatgtctaaaaatatgaaattatgcatgtacccctgctatctttctctcgacacacgcctcgaactcaaaagaaccaattacatgtgtatcaaccatctagaaccttcactgaaagtgtagaaacatgttttttcaattgcatatgtatttttattaatgggtcccaccataaatcttatctctaatttagaattacatgttttctgagataaagatttaaacttcaggatcatatgttttttttctaatcctatgtttttcgcgacggactgcgtttcggtggaatatataagccccctttaggccctcaacacctctctatctatctaattttggcccaggttatttcacagctcattgtacgtctctccgctttatctaaggtcggccccatatatctatgaagtaaaaagaagcccatatattttccaaaaaaaaagaagcccatataccaaaggcgtccgcccatagaggcctcatcgccggtcgcttcgaagaggcttggagccgaggaccccagcggcagcgcccctcccgctcgacagctcgaacccgccatggagccctcgccggagccttcgccgccggtcaccacggccaccttccccgctgccggcgaaggacacgagacgtacccgcccacggtgtcatcctctctattcccacttttccccctctctgcctccagctcctccgctcccacagccgaatcccagtggctttcaaaccctagcttctccttcgatgcctcctccctgaacgtcccggctaccacctcctcgtcgctcccgccaccgctaagcccctcgtccgatgaggacacgccgctgcagcgcgcccctgcgaaatacgagctggtgccttcgtcgccgtcctccgacgaggagagggggtcgcggaggaaggagagtgggaggaggaaacggaggcgcgagaaggagcgctatgatggggcagcggcgtcgcggaaggctgtggttcgcacctgggctgggtcgcagacgaagccagctaaggattactatgtcgacgcgaagggcgaccatgataacctggcttttggatcactttacaggtctgatcgtgaactatttaatgcagcatacaaatctaatttctgttctgtagcaaatctatggtgttgaattcgtgtttagtttcctgaagttatttatttgttacatgctgacgtgttcagaaattttagtgtgagatcaaatgtctcaatatcagtaattcagtagtatttcaaaacgtcgcagagacctgccctaggctaaccaagttgtctaaaatcctaggcctagttatttgtacacgggattctgaaatgttctccactaaacccagaatgatgactgcaatcccctgccaagtgcagggttggactagcattttgaatatactttacgcgttaaccatggttcattctatgcaacttttgcacattccgtacttgtgtttgatacatctagaataatctaatatcagattatttcaaaggctgttgaatcaacataatgatatgacgcgccatgtcttcatcgttggtaacactacagcatgtttatatgaagtgattgagcttgaaattgtaccacagaataatataatacaaatactgtaaactctgtttaaattactccctccaagcaaatacttgaggttttgggcaatggcacagagtccatacatagctttgaccaatattttctattagagtataaatgaacttgtaaaaacttatgatttcataaaaatgtacctttcaaggcaaattgacacatatgaccttcaaaattttgaacaagatactttaaaagttgaactcaatccttgttcaaaacatcgagtatgtacaaaccagagggagtacatgaacaattgatttgatcaacctttaacactactgtatagttagctattatcttctacagatgtcagaaaatagcacaaatttagctactgacatttctggttttttatatagacctggtactttctatctccaactgatgcactggtttctcatccctagtctgttttaacacaaattaggagtcacaatcttcaaaatcagcatatcattgaaccccctttggttgagaaatatgcattgccactgttggattgttagcaccaatgaaggcgagtgtataagtataacatgaatcccaattaaagcttgtaatatttggactaccaccaagctacaaaagtttatgtattcatttcatggcctggttagaatatcattacttacctatgactgatagttattaccagatcttaaatcttctgtttcagtcttgtttacttgaacttgttttgttagcacatcttgacatgctattcactgaagtctaacacctcaaggacatctgcagaatggatgttgcacgctacagatcccagaacatgctggaggcacttggtttaaatcgtttgaggtttggttcatcacatattgattttgattcagacttggatggaatagataacaaagtaagagctggaggccgttactattcagcaaaaaatgcagtttttgaaagaaataggggtttcaagcatctgaaactatttaagggaaacacctctgtaatgcttgctgaagattttgtcccctttgatacacaatcacttcctgtgaaaagcacagctgcggaacaggagctagaggaatcttgggaagatgaaatacttcgtcggactagggaattcaataagatgtctcgtgaacgtcctcacgatgaaaaagtttggctggcctttgctcaatttcaggtatcatgaatttctatggttttatttatgatgtttcttgcaagaagctatgcttattctgccttagtgctacattgtcagttatttggctcaattcattctgggacaaaaagtttgttcttagaaatgaaattgtacaattttgactcaccactagagttttgtttcactcattatttcacacttctcttctgcaatttcctttgccgctgaactacaggacaaagttgctagtactcagccacaaaaggctgctcgtttacaaactactgaaaggaaaattagcatattggagaaggctgtggagcttaatccagatagtgaggaattattgctttgccttctgaagtcatatggcaagagggacagcactgagactctattggctaaatgggagcaagtacttacgaagcatccatgtagctgtaagttgtggaaacagtatctgcttctgtgccaaggggaattctccagattcaaagtttctgaaattcggaagtcctacgtgtatgctgtacaggctctatctgcagcttgcaccaagctatgtaggcaggtttaacttcaatgtctctctgtaaactactttgtctgtatcccatacccctacgaactgaaacgtcgataatggtttctctctcttttttgtacacaggataatgaaagcatggattccaaatcttcttccttagttcagctagaagtggggttagtggatatatttgttaatctgtgccgatttgagtggcagacaggacatcgggaattagcaactgggctatttcaggcgcaaatggagtttagcttatttgcccctcctctgtatctgacgacaagcagtaagcaaaggctctttgaacacttctggaacagtggcggcgccagaataggggaagatggagctcttggatggtctgaatggttagcaaaagatgaggagagtagacagaagttgtctatgcaagaaaattcacaagagactgaaacaggaggctggagtggttggtttgatccttctgtgggtaatactgacgcaaatgatttgtcaaacaaatcactggaaccatcattgagcgatggaaatgatgccgaagatcttgatgctgaggactcacctgcacaagatgatgttgaatccttgctaaaaaagcttggtatcgatgtagatgcagagtccaatagtgaagttaaagatgcagaaacctggaatagatgggccttgatggagttgtctcgggacaatgagcaatggatgcctcttcatgaaaattctggtgatgctccatctggggaagacaatgaccagctttccagagtaattttgtttgaggatgtatctgagttcctgttttcgctatcttcagaggaggcccgcttttctttgatgtgccaatttattgatttttatggtggcaaaatctcaagatggtattctttttactttcttgcttatataagctatgatcatcctcttgacacaacagaaaattagtgaagacattctttcactggagatgtgttcaaacacaaagttaatatattgtatcaatgactctttttcccccataacatagtgcatatgtcatgcatgtaagttcagtttttgttgtcaaaacccattccttataagccatggagatatgctttcagccattttttatggtcagcctatatgtgcaaaaggaattgattttgccatttgccaatttggtgggaggcgcccctaccaccctggtatgggtccttgaattggaattggatgcttttattcttaacttaacccagttccttttatgtactctcatttttagtccacggtcttaaaaattcatagaatgtaatggtatccctagttgcttacgatatgacaatatattatctaatatcaggagctatttgttggtccctactaattattttgttcatgtcatgtgctggagtattggttataagtgttacttctgtttgttttaactctttgcaaacatacgtcaatctaaagtagtgacagaaaactgtctatgtaatttttcctcagttatgaactttgatattattattggtcagtgaattcaccactaattcttaaattccaggacatccacaaacagtccgagttggcttgatagaattttgagcttagagatgattacaaatgacatcctggaagatctaagtgctgtatctgacgttgtaaacaagaaccaaagttcatatagttacaaattggaatcattactgggaagcatgcatgacctttcacaaaggccaggccttatgaagtttctcagaaatgcgatactgcttctgcttggtgttttccctcgtaatcatgtcttggaggaagctgttcttgttactacccaaatgtttgctcctcaagagaactcctcctctactcaagctaacgcatcacgggctttggccaaaagtatgttgaagaaagacagacaggtatgatttgttctttttttttgttgaattgctttgttgaggagtgtaacatgctaaaactcaggtggtaggtgcctagttgtgtggctagctagctatagaagacaataacacgcttgtcatttttcgaccagcttattcatttgattagtttgtcatttggtagtattaagtgtaatctgcatcgtttgatggactgaacacatcatgcacttttggaactaaaaataagaaatgcatctagagatttgtgacagaattctatccttcatattctttaaaatttaactgtactaataattctctatgtgcatctttccagttctatacatgtttttatttctgaaaagagaacttgcattcacccagtaaaaactgaactgacatgctttggttgggataatttcacatgaacccatttatggatgattggtgtaaaagttttaccataattgtttgtttggcaggattttttgctttgtgggatatatggacgaactgaggcaatgaatgggaacattgaacaagcaaggaagatatttgacacagcactattatcaactgaagcaactactgaggtaaaactatgaactattatatctatttttaaggaagctcacatggttacttccaattatcctgtactgaatttgcagttgttaattgcaatgctgctggtttagcatagtttgtttcttgaatgcatgtttacaagcatgggttcctgttgttaaggttttctcattttgtctgggtaacaaccgtgtgctcagatgagaacattatggctcctttcagtccaaagtatgtcactttaggaaatctcttttgatttatgaattgatgccattctagatttacactggaacctttttttttacagcaaaagagatttattggtagtattgtagagtttattactagttataactgggagatgggtatacacttaacatgggcaagctttatctaaaatactaaagcactagcttattcgttgttttcttttacggagctaacaagtaattttgactggatgaagacaaagtagatttaagtatcttgatgatagtgtattgtctgctctcttgaatagtccctcagttcaaacttacagatcaattcagttttgtcataaagtcgaacttatgtaacttttaccaagtttttagaaaaatatattaccatctacaaattcaaataaatgcactatcaagatatttcatggagaatttaatgaagctaagttgtttagatgtattatttctatgaacttggtcaaagttaaagaagttgtcttaggacaaagctgaagtgacctataatttggaacggagagagtaaatctctttaaggaggtaatgctattggcaataagctatatcagcaacactgttatttcggttacagatggcactagcttcatggtcaagtccctttatttcaagtagaataattttgtttgtactaattgtgcattaatggtcattgcctttgctgggcaggatcttaggaagaaggttcctatcctttatctttggtattctgagatggagataacagtgtccgcttcaagaaacaactctgactcaatgcatcgtgcagtttacatcctatcctgcttagggagcaatctaaaatattccccttttgttagccctatttcaaggcttcaggtcttgaaggctcgccaagggtttaaagagcagattagaagcttacaatctgcattttcctgtggtcatataaaagaagaatcagttgctctgatctgctcagcttctttgtttgaaagcatgacaacaggctgttcctcggggcttgaagtgatagaggagaccttcccaatggcactttcaggtctagcatccttctcattttcttatattgctagatttttgtggcattattttaagcttctatttggctattgtacatggctacatatttttttatctgcatgaaccaagtttaatccctcttgtactggtttgacagtcagagtcaggactcagttgttgcattgcactgtagtcactcatatttgtgtaaattctgtattgtttttgtgctgtgctattcgtttagagtactctatgtccttgataatttctgtttttgttatttttctcctttacaccctttaatttttctgttgcttcacaatgtctgtgaactgcaaatttgttctcttctgccgacattttcaattggtaaatgctcttatattaattgtatatctgttcggttcagagagcagtcataacttggagtgtgaggatttgtgggtgtactacatcaaactgcttcagaaaaatcttaaccggttgagtctatcaagggtctggccaagcatattgcaaggagtgcacaaatatccctacaatccaaaatcatattcagccatgttaaccctgagctatctttacagtgtatccaacaatctccgtctcacactcgacaaatgtagtcaaaggtgaaatttccactttttttccattttaattctcttcatattgttctctttctttctttctttctttctttcttttttgaagaaacctctttcttttgtttaccatcatcattacttgctgtctctttgcaaataaaggtgaacgtgactcttttccatgaatttttttgtatctatgttccaacttcttttctctattcagctttcattaatgcatagccttgttttctgtatgcagttttcatgggttatacgtgcattttcttccattaaatatcttgaagcatatttattgttgtatacctgccttttgactttgttatttttatttgaatgcaacagggatccttctgtaatcaccttgctctttgctttgtcctttgaatggagtaaagccggatctgacaatagaatacacagcctctttgagagagctctagctgatgataagttgcagaagtctgttctgttgtggcgctgttatctagcctatgaggcagaaatagcctgcaactcttctgcagcacggcgtgtgttcttcagagctatacatgcctgtccatggtatgatgctgacatgtagtgttctaatttgatattggtgtggttttatgtctgccttccacttctcctaaataattgttatgtagtcaattgaatataaacgaagttattttattgttatggcatttgatctacaatctcctgatactggcccatgaaaagttgatcttattcgagtatgatatttcctttttcagctgttgatacccactcaagtgcaacctgctctttcaataaagttcctgtataaggaaaaaaaaaatgcagtcactattaatttatgttgtcacaatacctgaacagcttatgaactgtttgggacatgttgcagcttttgcattccttacttcccatatgatttgtaaaaaaaacgatgaggacaccaagtgcattttagtttcatcctgtttataaattcttttggcagctgtcattatctgatattgactatccctttatctgtattttttgttgtggtcagttctgaatgatgattggatccttctgtggttgctcattttagcttctactgtctattccttatcaattgtaacactaatttttttcaggtctaaaagattatggcttgatggtttccaaaagttgggctcggttctgacattgaaggagctatcagatctccaggaagtgatgcgtgacaaggaactaaacatccgcactgacatctacgagatactcctagaagacgaaacagatacatgattctgtattgatctggtttgtatgaagatcctggaactgcctcgcatgatgttggggatttgactttgcccgaaaacatatagccctgagacttcggagttgatcaacaaagttgtatctcaaagtttgcttgcaggagtcaagggcaaaggagaaatttcgacttcgcttgaaacaagcaaaagaggtgaagagattcaagtgtgaagacaactttttgacttcgctcgacatgcaaagacaacaagattcagtgcagggactttcaagtcaaaagatgcaaggacatcactgatgaaagcaactttgaggattgacaaggtaacgcgaagaatgaagttagagtaaaaagagaacttcgcccctgtagtttaaaggggttgtattgatagagagggggtataatagtcaattgtatacaaattgcgaagactaggacctctataaatacctccgctgacatatatactgtacgattataaggaaatgaaatataactt

SEQ ID NO: 4554 - DNA, 10540 bp, Sorghum bicolor
aagtcaaaattacattatgatgcgtcgactcgactagaagaaagaaaaaaaaccaaacaacgacgacgaagaatccaggtctccatcctgcaccggccaggaccctaggtgcggtcgtggcgccgcagccgctggatgctgctagcgacacttccaccatcccatgttcacaacttcaaactttcacggacaatgacgagacggtccccacagatccacacatccctcgtgcccccgctgtcagtgacaaaagttcacaaacctagcacgcctccgcctccgcctccgcctccgctcctgctaaacgagacgagacgtctttttgactcgttgctccttccccgctctgtcatctcactcctgtccctgcttagcggcgaagccagagaaacgggagtagtaataatagattaaagaaaaagaagagagagagagagagagcgctctcgcggtctcgcccgctgtgcgaatcgaacagctcgaaagcgatttgctgctgcctgctgctgcgtgcgtttcggctgctgatcccgaacatttcctggcctcgcgacgaacagctcaggttaggcactccgaccttcgctttacccattcccgtgcttctctcggaagatgtggttggagtaggtgcagctgtactagtgacggcgggagttgatttttagttgctcatctttgtgcaaaatctggggggcttttctgcgggggtttccgacgcgctgcaagtgcaaggctcccgcaacgcgggtctggagtaatttctgggattgctttcggttccagagtttcctaacgaagggtggcgccgcgggtcgacgcgttttggatggatttactgtccttcttttccgcgcattttccatatctcatcacgggtgggcgggaggttgagatgtgcaagtacagaatgatgattctgctcttgcttgattgggactttgtttgtttttgcatctcatcacggctgtgattttttgtcgtggtctgtctcttctggggtttacgggggatgcttggtaatcttttctactagttgcccattgtttcatcggattctctctgcttgcgcgaaggggcctctaggggcaatgaattgcttctgttcctgattgtctgtcttcccccacctctctcaaccagatagaaaaaaaaaacagaatcctcgttagttatgttctcttcattaacggtctcatgtgcatgtactgcctccctcccaaaatagttgcaatcgggttttagattgagtcaaaataagttaggtttgactaatgtctaaatatatttcatggtgaagctaattataattatttggtacatttttttgtatatatttggtcaaaattgagatagattgacttgatagaaagctagaattgctcaattgcatcctttcttcggttggagggagtactgcacacacaattcgcgcaccttttatctggctcatgtttactgtaatgtgcacattatgagattcattgttttctatgactcttcaaaccttatttttcatgctgttgcgtttgcagggccagcagagttttagatgaagacttgatttattctttcagataatacaggtaggcctgagtagtgttagtattaatgcagtttgttttgttgtgttgatattgcttgtattctgttttcttggatttgttttatgttatttcagcagttaccatttatgtgcatttgcaagctaatgatactagtaattatgaagtcttatttatttcgatgggtcatttttaaccttggacaccacatcattattcttctgttgttttctcacattttttactgttatatcccactgtaattaaccagtaaatattggctaacctggatatccatggaattcttactttctaaataaggataatctcatttttgtataaaggatacatgcatgcttgcagagaatctatattttcgctgtttaattgaaagtcatgtgctaatgtaatggatctgtgctgcagtgttttaaaatgactgaccaggagcgagatgacattcccatgttgctaagaaatgttgagctaccaagatttcctctaagaagtacttcaatgtgtataccagtcagggatgatgaatatgaagaagacacctttgtaccccatactggtcctctattcgttcagacgccaactcagacggcaccgggaatttcatttacaagtagagacacacctgataggcttcctagaccttcacagggaaaacaagtcagcaagccacatgcaatcatgcctgaagaaattagaggaaataggtggtcttacagtggacaggttccaaagaatgaacatttgatgatgtctggacctttggggcaatgtgataatcctgattgtgtgaattgccctcctgcttgtaaaaataaaagacatttccagagaggttcgaatgctttagacaataaggtatgcccttgaaatatgttatttgagctaagttgcaaataatggcctgttcatctgttgaataaggtactaacatgttttcctttgttcctgttgaagattcataacattctttatggtcacagtggtggatggaagaagaaaattgagcagatcatggcatacattccgattatgaacccacatgcaaagccggttcagcagtggaatcaattctttgtcatatcatgcctgattgccattttcattgatcccctgttcttcttcttactatcagtacgccaggtaatgttatacaaaattttcagtatgcttcagatctatgtccagtgcttcttatatgcgtttgattacggcattttgttagtcacgctttaattttaatcagagctaaccaccttttgtttatttgattttgacaaatgcaggatggcaactgcatagtgttaaattggaactttgctacaggacttgctgttgtgagaagtgtgactgatgctatttatttcctgcacatgctgcttcaggtaagttcatcatccttttactcttccagatcagcttttacattttatcttctatacaatatttatcgctcatacacaagttgttacaacgtacaagatggaatgcttggttgcagatttaagatgattattatgtgcattctatattaattatattcaggacacttctttgtgaataagttctgcagtttctttaaaacaaatcttcggtcagatactgacttctggaaatactgaagttacactgtccagaacaactttctattgtttatgttgcatatccttgctatcttgatcttactccctccgttttgcaataattgtccacagcccaccatgtgcagagaatgaggaagtactagcttcatcaagaaaaaacaatgtgaaacaaccaaccgtacccctattttatggaattatatagaaccataccttttctatcagcgtttaattagggagagtggaaatactgcaataacgataggtttctctttgttaatgatcaagtatttgtcttgtcaaaagaaagttgaatcaacctgcttatgtcactatattttcatgaatataattagatatttgtctttcagttcagactggcttatgttgcgccagagtcacgagtggtgggagctggagacttggttgatgagccaaagaaagttgctatacattatctttgtggttactttttccttgatttctttgtggtgctcccactccctcaggtaacataaagcttcccttctgtgctaattctcttgctttagatactataagtttcttcttcttttacttaatgtattcacacatcttattttattggaaaaaaaatattgaaactctacatgttacagacccctttttgtttaattatgttgtctttatttctgtaaggtctgagtgtgagtattttccattacatttaaggtcaacaagaatataaaaaagacatgaattgtggtttcgatagccttgtatatacccaggcatggcatgactttttcctgttactgaacttgtgacatgtaagcatctgggaagaattgatgtcgatttagtcatgctcacatctaaccatagttttgaggaatatattttcgtgtttatcaacaacttgctgctgccttacctgtttgcagctttgctccatgaaccttgtctgtctgtgtagcactttatataattttacttgcatgaatgccatgtatctgtcaacagctaaagttcgttgtctaaactctaaactgatgacctgttcttttccgatgtagttaacaacaaaaagaaaagtaaaatatttttacacattttttcttcgtactcgttatgctctttgctaatatttttctttgtttattgatcaaggtgatgatactgctagttgttcctaaagttgggttatctgctgcaaactatgctaagaatttattgcgtgccactgttcttcttcaatatgtgccccgtatcatcagatttgtgccacttcttgatggtcagtccgccaatggattcatatttgagtcagcatgggctaattttgtgatcaatcttctgatgtttgttttggcgggacatgtggttggttcatgttggtatctctttggcttacaggttagctgatttcttttgtaggttgtttacaaaagttggtagtgcacattgattcaaatgttccaatttgatcatcgtacgaacaaatctagtgtgcagcatgtttcactaatgaagaatgaggaatacatgttgtacctacttaaagtggaaaatgtgcggctccaaatacctatgttaatctgtaacatgttcaatttatatattcaatcacaacttatttggtaactactgattttaactgatactgaatgtccagatcaatcgtatcattttcttttgtttctcattttgtcacagagggttaaccaatgtctacgagatgcttgttctgcatcaaccattccatattgtgactcctttatagactgtggacgtggcattgggagtggactgtacagacagcagtggttcaatgacttgggtgcagaagcttgttttaacactggaaataatgctactttccaatatggaatttatgagcaagctgttttgctaactacagaagacagtgctgtaaaacgatatatatattcattattttgggggtttcaggtatttgccatcatttgcttgtgcctttctacttctgtaggtgtctttttgttgcatcccaaatatgtaacaatttgactgtcatgtatgatgtttaggttaatatcttatgtgtcatgctaactaataaggttccattctatttaaattcattacaatctaactagtgtttttactcatagtttatggtttgatttcagcaaataagtaccttagcaggaaaccttgtcccgagttactttgtatgggaagttctgttcacgatggctattattggtctgggactgttgctttttgcattgcttattggaaacatgcaaaattttctccaagctcttggaagacggtatgtggttatactactggcttatttatcgtgctacttaacccaaatgtagatataagttcatctaggtttgtcctaggtcaaaccttgttttactttgactaaaatatctaaatttttgctacatagattgacaacataagattaacattgctgtattcattatgaaaagtacttctataatataagcttcatttaaactaaaatacttttgtagatgttggtgttggagtatcagtaatctaggcccatgaggctaggcccatgaggcccttgtatggaactatatggctaccctgtctagggttggcccaatctgtgtgtgtgtgtgtgtgaaaattctaacagttggtagtaaaactgtcgtactgaagaccgtgtcaattttgtaattttgattggagtaagtatatgcttatatgcttgtatggtcatgcactatggcatgtcgtgtcctgggtactgaatagggatgtcaatgagccgatctcgcgtgagcctggcacctcaagctcaagtttgactaaatttctagccaagctctaccagagcctgaactctagagcttctagtaaggtttgagctcgggcgctcggtttaataaaagctcgaataaggatcaagctcgattttagcatgctagattgtagccaagaagatgacatattgagatggttgacagtcgtcggtgcttcccaaagctttgggcaccagcattgttgccgaaggaggacaacggtgcctctgggcaaacagtgttggggattctcttcaactacatgaataagctgagggatcaatcatttatggcagctagcctgctaccatgctcagtgctgatggagtagtccatggggtattaggtgactgcagtttgcattgtagctggagggaagtgtaaggatcgtttcccttcagcagggaaggagatcgaggcaagcaggcagaaccatgtggagaacaaaatggtggcattgtgttgtgaagaaagaacatgattaaggatgataagatttctctttgtttatttatcaattgagtggagtgtgtgacttgcatattatgggctgagcatcatgtgtgacagggacctcgaaggaggtggttggcttagaaaagttgaactggctggagggaagtagtagtaaaaggtgggaaattttattgtgctatgtgtgctggcgagtgagcaattcaaattaagctcgtgaaactcggcgagcaatcttgagtttggcttgattagcagacaagccaagctcgaatggagcttgtagagaagatcttcgagcttctttgacagccctgccactgaacaactgcaaggaattgggtagagtttagatggcgattagcattcgatttgtggtagacggcaggaagaggagagatacagccatacagggattggaggagcaattggaaggaagacgaagctccggttggtttctgttcactcagctgctgtttggtgctttagtacctctccaccttcccaagtgactggcctacatagcaatctgatcccaggggcatgcgtacatctctaggtgaaacgtgtgctatcagccccttggctcaagaaatctctataggcccctttatacaagcccattaaagtcatcagacatcagtagatcaattcactcagcagttagcagtagtccaaagcgcagtgaacacaggaaaacccatgtgattgattaaatcatttttttaattgtaactatcttgatgtttgaacgttttactccttttaccttctgacaggagattggaaatgcaacttaggcgacgtgatgttgaaaagtggatgagccatagacgattgcctgaagatttgagaaggttcctctgcagaacttactaagcaaatctttatcactattttttctttcaaaaaacaaagaacttagctagcatgtttcaatatctaatgcagccgtttgctactatactgtcaagcagtagtaccgatctggttgtggttcatgattgactagggcccttgtgacagcaatgatatacttcacaaatcttactttgtagtcatgaaaaaaggtgtatgctgtattgtcagatagtctgaaaacataacaataacaattatttgattagtccagaattgacattggcaattggggtttcaatgtttcatatccacaagatgtaccatctagtatagtgttaatgaagaaactgaatgtgtttggaatgttttttttttgtgtattgtaaatttgtagtcacgtgggcttgtttgggtggaggtatttagagataaatccttagcatttagttcaatcaatatttgagctatataccaaaactctctgatgaaataccctaacctgaaaggtagtcattttattcttacagtcgaagataacaacacctgcacctttgtatatgtgtaggagggttagacgagctgaaaggttcacctgggcagctactcaaggagtgaatgaagaggagcttttgagtaatttacctgaagatatccaaagggatatacgtcgccacttctttagattccttaataaggttagtttctaaggtgtcaacaaatattactccaataccttgtatttccactcgcatcctttctttcatctaccatgtccatagttagttctgtgcttatatgaaattctactgttttggaatctttgctactgctgtttggttcttagcattcacaacttgtaaatgtaactgttatttagggagggagaatgggaaagaactttatctccaggggaaaggggtctgaattgttgtgggactacaatcaaatgtggtgctgagctaaacatatggttcagcacttccaaataagcaatagcccaaaatattcagtgcgaaccaccccattcagcagcacaattatgaaaccccccttgaaatatataactataatttttttttgaaatggtgcaaactcaatgtacaaaaatccatgtgaaaataacaaacttcagatggcatgtgcactagaaggcaaaattcctgtgattatcttctacatatgctactggaatttgtcattttcatatgaattttcaaggaaaaaaattgcatgttaaacttttgcgacaatgtatacatacatctatatatatgcactatggaggtgcatcatttcaattttttttgagaactatgtgtttcaaggggttttcatgattgcaccacaagtgtggttgcaccgtatagttttccacagtgatgatggaaactggaagaagtttaagaaaaaaaagtagctacctgtattttctcattcacgttgtaggttgcctcatttacatgatttcttctataaatgttgtctggtaaagataactcttacaagtttcaattaagagttgactaatttttatcttattatttgcaggtccgattattcaccttgatggattggcctatcttggatgcaatatgtgacaaattaagacaaaacttatatattagtggaagtgacattctttatcaaggtggcactgttgaaaagatggtcttcatagtgagagggaagcttgaaagcatcagtgcagatggtagcaaggctccattacatgatggagatgtatgtggagaggagctcctcacctggtacttggaacactcttcagcgaatagaggtatgcaatttctgccctccctgcctgctgtttgtcttttggttttgtagttgttccatctcatgagctactgctgtttcagatggtgggaaaattaaattccaaggtatgcggttggttgctatacgcacagtaagatgtttaacaaacgttgaagctttcgtactcagagcaagtgatctggaagaagtcacctcacagtttgctcgattcttgcgtaatccacgagtgcagggagcgatcaggtaatcacatttttgtttaatttattacgtttttaccatattcctgcccaccagaatagttaaggctgttcttataattgttttttgctaattcgtggcaaaatatgataaattttaataatcatgcatcattgtgacttaagacttgttaattcagttccttttgaaatactgtgtcgactgtcaattgatgcttgaacctctgcgtccaatagatatgaatccccctactggcgaaccattgctgcaactcgtattcaagttgcatggaggtatcgaaaaaggcggctgaagcgagctgagaagtcgaggttgagcgaagaaacctatacctcacatgggatcttgacacctgattcttttcagcgtggacagaggggatgatctctacctgactaggcactaacttatcagtttcagttctgcatctaaagcttctagagctctgaaattctccggacatgtctacttagtggaacctagtgcatggggcaaatatttttggctttggtgttcagagtacatgataagagaatagttttttttttcatgcatggttgcccctgttagagctattacacgcacatatatgttgcattcggatcactaggagatcagttatttgcctgccaaccaggatgctcatcagctgtaaataaatattcattataaaagaaaattatttggcatgaaacagctcctttttcagagtgaagagccacacaatatttcaaattttcaatccatggggattgcacgagatttgcagttaggcacagagataaaagtgtggatattccaagtgaaatgtccaatctctttgctatgttattcattcaaactacatgtttacaaattacaggaacgtctgaatcctagcgaacaccagtattagccatagtgcaccttgccaacgccataatttttcttgaattccacaggaatttcgtgtcaggtgagcattacaaaggtcatttgaaactggagtatttctctaaggccttgtttagtttcccaaaaatttttgcaaaatttttcagattctccgtcacattgaatctttagaagtatgcatagagtattaaatataaataaaaataaaaactaattattgacgagacgaatcttttgagtctagttagtctataattggacaatatttgtcaaa

SEQ ID NO: 4555 - DNA, 4526 bp, Sorghum bicolor
tcgtgatgtttggaatcctagtttttgtggtaacctacaatattcttgaaggaagtccactcagcgatacgcaaggggacagattttatggcaactagtaccagtatagtatgctgctggaataatactctcaccgtccctaacagaaatgtcacgttttagtataccaagtttaactaattataaatttaaacaaatataaatatctataatattaaataaatattattagaataattatgaaatactcactccatcctaaattatgaggtgttaaaaaaaatcttagagagtcaaattatttcaaatttgattaaaattatatgataagataacaatatttattatattaactaaagaactattaaattctttattaattatattttcatagtatatctatttgatgccataaatctttataatttttttataattttaattaaatttaaaatactttaactctgtatgattcttggaatgtcttgttgtttagaatggagtgagtatatttttataataatttaatttaaaatcataaatataaatactatttactaaaaaattgaccaaatgtaaagtattttaactgacacgtatattatagttgtattcttttggggatataggtaattagatatcaagaaagctagttgattggtgtcgtacggccactaaatatccggccggcaccctcctgttttccttgaaaaaagaaaaagaaaaagatgaagaaacattcggagccagactttgaattgaatcaaatagttgttgataatcagagttgatggacgagtcctgtggcaaacttgtacccgtgaaattgtgtttgggattgctctgcttctgtttttccagctttattatatgagttttattatggagcagctttatcgtagagtttgtgaggtaggtggtactgtttgacacacagctctgcttcagctccataaatagtttgttttcatgaaaatgatccattatatctttggttagaattgatcttgatttttctgagaaaaatagaaaacaaatgatagaatattaatagaggccataattcaaatataaaaaattatcccataaattctaaatgatagaaaattaaacaaaggctataactcgaatataaatacttatccataggtaagcataacaactgcgaattctagccccaaggaatgcatccatagtagaagcgttggggaaaatatccgtgattaatgaatgataagatgggtaattatctcagaactctatgtgaaggtataaaattcaaaactaaaatacctctagaaaaaatataaagttgacttctagctttatgttttttttgagtggagttcatggagttagaagtgtttggcagcatagaggtctcttaaatctactcatgctcgagtacaactgctcatcgtcaacactcaaccgcaactacactaatgtgctaagcacgtaataagcttatccaccaactcctaccaatatcaaagtagtcttttgtaacacttgtttttagtcgttgacatcgtttccatgaaactctacttcatcgatcgcatattcgcattgtcaaacatgatcgggtcagcaaccttacgcgcattcgcttcattagtttgactttggcatccttccgttccatctccaccgtcaactccacgcaccccttgcccttgccctgtcgagcactgaggccttgtttagttccaaaattttttgggaaatcgacactgtagcactttcgtttgtatttgacaaatattgtctaattattgactaactaggctcaaaagattcatcttatcaattccgaccaaactgtacaattagttttaattttcgtctatatttaatacatcatgcatgcgtctaaagattcgatgtgacggaaaatatgaaaaattttgcaaaattttctgggaactaaacaaggcctgaagcgccgcaagccccacctctcgccgccgacaaacggcaccggcgagccatcgccgatgaccacctctggcgcgcccaagcccccaggcttcaagcgctcctcgcccaggaagaagtcgcggctcagaagccgccgcgtcgccgccggagacggagagggcaaggccgaggccgaggcggcggggaccccggcgttggcgagggcattgcttccccacgcatcggtggagttggacgcggtgccgcctgttgggtgcacattgccgcgagacttcttcgaggtggatgcgctcgacctcggcccccgcctcctcggcaagctcctgcgccgcgacgaggtcgtcctccgcatcaccgaggtcttcttcttcttcttcagaagtctcgcgtcttttcatacgaatcgagattatcgtactctgttacaatacgagtagcttccaagctcaatttcactgaacatgttagcgtctatctttgtttggcaaaatggcgaaatgctcttcttctctgtgatgctaagctaatcgaaaacaccatgttatggtattcggtactctgaacttccctgaaatttcaggtggaggcctacaggccaaatgattccgcatgccatggccggttcggcatcacagcaaggactgctccagtggtaggatcagtgcttccttgcattgttctttctgctcaaggcaaatttggggctttgtagcatgagtatgagctaaaatctgtgctcctctgtgtgtagtttggaccgggaggccatgcatatgtatatctgtgctatggactccacatgatgctcaatgttgttgccgatatagagggtgttggtgctgctgttttgatccggtcatgttctccagttagcggtatgcattgttcatcagcaaacttttctcacaacttggataaagagtgaatatctctatgtggattctgctaggatcataagatatagcataattactgtgtgacataaacagtctgaaaattgcagctgaatggaacatgttcggttaatgctggacttggtcatgcatcttgctttgtttttgtttatatccaaactaaattgctctgttcaacagatgcacctttgcaacctgtgacaaagattttgtactaactttaaacttttttttgtacaactagataattatatgtgatcaagagaaatataggacgtgttgagcgattttacccacatatctccacaacaatttattctccatgttgcttccaatttgaggcagaaaagtaaaataaatctctttgattggcaactagagcacgacctttgtcttaaattccaattctactaactgaaccacatgcccctgcttggagttcccttatcctgctatcagaaggtctttaagctcgatgtgacaacatcaatcagtttcctgaaatatctgtagttcttgtagttcccctatctgtcagttaaacgatttttctgtagtttcagtgtttctttgcattgtcaatgtaattgtataacataggagtatttcaaatcggacttgtatcaatttcttgaaactgtttcaggtcttgcaactattcagcagcgcagaggtcaacaaacagagaaaccaatcctacttacaggaccaggaaaggtaggttttttttacttacaggaccagattcttgttttcactgtttttttaaaggtttcttgttttcactgttccagcacagctgtgttagcattataaaaaattaaaatttctgttcaccgtattcaggttggacaggctctgggcctatccactgattggtcgaaccatcctctctacacacctggtatgcttgcttgactgaccttcaccacgacctgaaactgctggctgatttatccattttcaccctagcgatggcattgtttttgtcctcaatctttcaggtggtttggaggtattggacgggccagagcctgagagcattttggttggtccccgcgtcggcatcgattatgcatcccccgagcatgtcgctgcgccgtggaggttcgccattgccggcacgccgtggatcagcgccccaaaaaatacactccgggcacgctgaggacctggcatagcacgggaagggaagcatgaggatgaactgagcaatgcctgaataagaaaccgctcgagtcccctttccacccaacccgaattgacatgtgtttgtatttgctagacacttcgtagtgctgcctataactggctcttgtaaatgtatcgctgtctttattatttcgtacgtacaagtattacagaaagcagcaaaagactccgctcttcagccaggatgaaaggggccttcctctgttttattctcatctcttctcttcttctcttgttctctttttttttttccacgaaatggaagagaagctcaggctcagcctggggctccagtgcacgggaggaatggaagcgggcgcgcgtcaggcccaattttcaagtctgtagtggtaggacaaaaatgggagtgggaaaaaaaatgaaaaaatgggagtgggaaaaaaatgaaaatgaaaaaaaagaagacgacgcctgagacaaaaatgggagtgggaa

SEQ ID NO: 4556 - DNA, 2923 bp, Sorghum bicolor
gttctcgcgccctgatcaggggcgtccaaccttacatggttggtcggctcccatcgcacagcactataaaaggaaggtgggggctagggctcgaggtacgaagtttactgcgcagccattctccccaccgacatcctaaccctaattctatacgagaggggcactaccagcgacgggaagcaccaccgacgccggaccaccagatctacgcgccgccactgacgacttcgcggatccgatggcttcaccagcgaacgacgctactgcgaacgccagcggatctgcggctcctgctccgagcgatggtttaatctatttctcgtttttgttttctatttctagtagatcatgttttagggattcccatatactcgtttaattgattatgaataaaatagtctcgatctatgaatctcatgtattacgaatcctaacaattcgggcttcaccatgattgaacaattcttttcttaaattagggttttcactacaaagctcaacaggggaagaactcaagaaccacatcatatcatagatgctagttgaatggattttggaaaggatatccctaaagatgttttcccacgtctcagcatattggtttaccaagaaatcaccctcaaattgcaacaaaatgcgaagaccgccccccaccatcccaccctcatgaaatcgccctcagttttctcttggccttgccatctgatgcgacttgatgaaatcgaggagatagctcttcacctccaaacgacgcacccccaactccatgtattcttgctgttcgcttctgttttgggattctgccggtaattctaggattacctgcgagtctatgggggtgtttggcactgctccacgaactctgctctacaaactccactatggagcagctccacaaaaaactagagttcgtggacaactctattttttttctcgaactgagtgcgtggagctgaaaccgtttggctaaaaaaacgtagagcagagctgaaaaacgtggagcagagcagtctcaaaccgcctctatgggggtgtttgtgactgctccacaaactctactatggagcagctccacaaaaaactgaagtttgtaaagtacctctttaggtgccctcacaactccaccctttttcctcaaactgagtgcgtggagctgaaaacgtggagcagagcagtcccaaacacctatatatccgtgtgtcggtctttctttggcctttcaaaacggattaaagatccgatcgggaaaaaacctccaaacgacgcacacgaatggcgatttgtgatagttcagatcgtgagcgacgagaacgaacggtcgttcctctaacgggctgcgctaggagtacaaaggggtaacctttaggtgcatctccaaacctctttagttcaaatatttgtactactttttaattttttttgaagaagtagtataaatatttgaactaaagaggtttagaggtgcatctaatcatcactcatttacacccctagcctgcgccacagcgcgcgccaggcgggcggctcccacgactggaactctctcgttgggagggaacggacatctgctgagcatgcaagagaggcagccgatcgaccagagcttcattagctgtgtttattgttgctcgatttaatttgctcggtttgattgcatgcgaacgtacaatacaatatggaaatcagtaataagaaatacagtagatatcagtaattgctttctcttatctatatatagaaacattcctaacatactgcggttgattcttagggatatatgatcgcgaatgaaaatcatttaagaaatagatttcagtgtgattgctttctctatgactccagcatgatgcagagtgtatccaaatatataactccagcacagcttcgctatatataacagccacgaccacgtacgagtctgcggcagcaatcaccgattcacacatcaacagcacactccatcaacaactcaacacctttgcaacaaacccagcagcaagatgagaactagtcgcctggtgttcctattcgccatcgccctcctgctactgctagcatcttcaggtactccaatgtccttgtgggttggggacttcgatttcgatttcgacttcgtgcataatgttttcagagccggtaatgatgtatgttcttgccactcttttcatatcgaaaactctacagatttgacgacgacaaaggcgtcggccggatgcccacatccccgttcgacaatcctgtacccaaacttgccgtgtgatcccgacgtctgtgcgaagagttgcgccaagggactgaacaacggcaacggcacctgcatgggtcccattggatgtgattgcgagtactgcgtgccagcaaccgtcccaaaacgcccgcctttctctacgcgaaagtccaaactgcacgtactagctgtgtaatcaaatgcagtagaagccgattggagacccggtcaattggctggcgttcgcgactgagcaatgacagagatgtaataatcatgtactaggggcagacagttttgagcagagaaactgtgaaaatttgcctcagataatatgtagttgggcaatggaaaattgtttttctacaacgccattcggctgaactggattgcgcgcaactcatatacaaatccatgtgtttctgttcacttgagcgtatctactaaatatgttagtcatttaactatagttttctcttataataaatcagcaaataatatttttaatcataacttatgagccaaacgaataggtttctactgggcctttgcatcataacgtgggcttctactgggcctttgcacagtatctctgtaggagtacgtgtgattaatttgggagtgccaattcaaggtccacactccacaccgaaagcagttcctctacatgactgctctttgcacttttcttcatgt

SEQ ID NO: 4557 - DNA, 4826 bp, Sorghum bicolor
gtaacaaatcaagtagaaaagctgccaattatattaataaagaaaaaatatttggactgctcaagacaaactatgtcccagaaagattattttacgatggaaaacaatagctaccacaacttaaacaactctaccaaaataatccgcatgcaacataaacagttaaagaggccgcatgttttgccagagatgtgtggcatgcaatgcaatatattatgtgctccacagcagcaccagtactaattaccacctgatagatgagttggtcttcatttaggctgtttagtttccaaaattttcaagattcttcatcacgtcaatctttgcacctatgcatggagcattaaatatagataaaaaagaactaattgtacagtttaactgtactttatgagataaaatcttttaaatctacttagtttatggttggacaataattaccgaatacaaacgaaagtgctacaatagttaaatctagaaaattcgcgaactaaatgaggccttacacttgtgtagtctatagtcttggtaggagcatctccaagagttccaaaaaaatatgattggtaaatgaatgagtttttcaaatggctaaaaaagttaggagcacatttgttagctttctccaacggtttacaaacctctcttttaaaagatacaagataattttgcatcagaaatttccgactatttccaaatcatccaatcacctgggccgggcttcaagaaggaatggctcaagagacccaatgatccacactacactggggccaactgggttagcaagtaacggaccaaaagggcagcccaactgtgtgtaaacgttgttaaaaaaatgcgtgtaaacaaaaaggaatgcaaacagagatgtcaataccctctgaacaagggaaagcttaggctacaactgggatatacaggcgctgccggtggtggaattggaggtgaattggttatctatgactatcaaattctctcgatctcagtcaaatccagtactaactccctaacatctggcatcacagctaggtccttcaattccaccctggatccatgcaccccacactcgtcaatcaccatacatatctggtaaagattggagcaatggctgtcccaaggcggatgaactgattttgcagatcctagaaaaaattgaggacagagggacgacatcgagagaggcagcgcatgatggaagactcaaagatttctccgcaactgcaatcccaatagagaagcttactgccaagcagggtgaggtggacaagtggaagcccggcgtcgacaagaaggtggacgagctccgcgacgccatgttcaattcaggtgactgttaacaggcaagctgcccaacgagatgatgatccgccggtggttcggcggcgagatcacaacaaacgagagaagggcggcggtgacacgttaagttccagttccgtgttgaacgattcgagtcgatgcagagattgttctgttcggtgccgagagagagagagagagagagatgtagacgtgataaatttgtaaatctcactattgagtattaccaaataatcaaattttcaacttaggctccacccaaagagaataataattaaaaacaatttaacaacccccccccccccccccacccccacacacacacacctaaaaatagctgcagtcaaaaaacaatttcaaaagctcacattgtgaccatgaatatacattaattatcatgataccaagactaagagcaagtattatagtaggctataatccaactaaatactgaggtggaagagagagtaaaagcggacggtaagtttacaatcagcttagacataatacattaatagtgatgagctaatcactatatgagtgagatgcaagaaagctgcttaccgctagcagccggctctctaaatatgcccctacataaccccttcccggtcaggtccatgagcccacgcccacccggcaatacaagcaaaaaccaagcagccgcgccggcgcccgagatgaagatgggtctcatgacactactgctactcgccatgtttgttgtgttgtcattgcctgcaggtatggtcgattgttctctaaacacaacaattaactttaagtgtgttttccttctctatcttgcatgtagtggtccaaacgagcccggcttattcgttgcagatagcacgacggacagggttgggccaaactacttccaggacacctgctcggcgacgatttccccagggacacagtgccaaccccggaagtgctccgacgactgcaccagccgattcaggggcggggtgggcgactgcgaccattccgtatgtaggtgcgtgtacacctgccctgcgaccccgccggcagcaaagaagaaacaaccttatgtctgatgttaaggctcgatcgatcgtgtagccaatctctcttgtctcgacgtacatgtagcgagcggctagtgtgtgcccaaccgcgacagctttattttcttctgatgaatgaatggaatgaatttgaatgggttgagggtgatgacaccatggtcacaacccacacaaaaagattatgaaacttgtatagtagtgaatcatctccaaaaaattatgaaacttgtagaaaacttgtctaactcatgacgaatataataatccaacaatatctatataaaaagattcgtgttagttgatctcctttctccatatgggtccaaaggcctttctggccttgttctcgcgccctgatcaggggcgtccaaccttacatggttggtcggctcccatcgcacagcactataaaaggaaggtgggggctagggctcgaggtacgaagtttactgcgcagccattctccccaccgacatcctaaccctaattctatacgagaggggcactaccagcgacgggaagcaccaccgacgccggaccaccagatctacgcgccgccactgacgacttcgcggatccgatggcttcaccagcgaacgacgctactgcgaacgccagcggatctgcggctcctgctccgagcgatggtttaatctatttctcgtttttgttttctatttctagtagatcatgttttagggattcccatatactcgtttaattgattatgaataaaatagtctcgatctatgaatctcatgtattacgaatcctaacaattcgggcttcaccatgattgaacaattcttttcttaaattagggttttcactacaaagctcaacaggggaagaactcaagaaccacatcatatcatagatgctagttgaatggattttggaaaggatatccctaaagatgttttcccacgtctcagcatattggtttaccaagaaatcaccctcaaattgcaacaaaatgcgaagaccgccccccaccatcccaccctcatgaaatcgccctcagttttctcttggccttgccatctgatgcgacttgatgaaatcgaggagatagctcttcacctccaaacgacgcacccccaactccatgtattcttgctgttcgcttctgttttgggattctgccggtaattctaggattacctgcgagtctatgggggtgtttggcactgctccacgaactctgctctacaaactccactatggagcagctccacaaaaaactagagttcgtggacaactctattttttttctcgaactgagtgcgtggagctgaaaccgtttggctaaaaaaacgtagagcagagctgaaaaacgtggagcagagcagtctcaaaccgcctctatgggggtgtttgtgactgctccacaaactctactatggagcagctccacaaaaaactgaagtttgtaaagtacctctttaggtgccctcacaactccaccctttttcctcaaactgagtgcgtggagctgaaaacgtggagcagagcagtcccaaacacctatatatccgtgtgtcggtctttctttggcctttcaaaacggattaaagatccgatcgggaaaaaacctccaaacgacgcacacgaatggcgatttgtgatagttcagatcgtgagcgacgagaacgaacggtcgttcctctaacgggctgcgctaggagtacaaaggggtaacctttaggtgcatctccaaacctctttagttcaaatatttgtactactttttaattttttttgaagaagtagtataaatatttgaactaaagaggtttagaggtgcatctaatcatcactcatttacacccctagcctgcgccacagcgcgcgccaggcgggcggctcccacgactggaactctctcgttgggagggaacggacatctgctgagcatgcaagagaggcagccgatcgaccagagcttcattagctgtgtttattgttgctcgatttaatttgctcggtttgattgcatgcgaacgtacaatacaatatggaaatcagtaataagaaatacagtagatatcagtaattgctttctcttatctatatatagaaacattcctaacatactgcggttgattcttagggatatatgatcgcgaatgaaaatcatttaagaaatagatttcagtgtgattgctttctctatgactccagcatgatgcagagtgtatccaaatatataactccagcacagcttcgctatatataacagccacgaccacgtacgagtctgcggcagcaatcaccgattcacacatcaacagcacactccatcaacaactcaacacctttgcaacaaacccagcagcaagatgagaactagtcgcctggtgttcctattcgccatcgccctcctgctactgctagcatcttcaggtactccaatgtccttgtgggttggggacttcgatttcgatttcgact

SEQ ID NO: 4558 - DNA, 13149 bp, Sorghum bicolor
gaaattgtgtaattagtttttattttcatctatatttaatgcttcatacatgtgaacaaagattcgatgtgacgggaaatcttgaaaattttttgaactaaacaaggccttactttcacccaaaaacccaaattttttcaagattccccgtcacatcaaatctttagacgcatgcatgaagtattaaatatagataaaaataaaaactaattgcacagtttggtcgaaattgacgagacaaattttttgagcccagagttgcgaaattttttagactaaacaaggccatagacgtgatcttccggctgcatgtagttgtaggtctgtgcgcagagtgtgggtttacgtgtattcgcatatgttcggatactaccgctgtagccagttaagagacataaaaaaaaaaaatgactgtcgagtgtcgaccgggagcgccggctgctcagatccgaaaagtttttctttaacgatagcattttcgtttttatttgacaaatattgtttaatcatagagtaactagacttaaaagattcatctcgcgatttacaggtaaactgtacaattagtttttattttcatctatatttagtgctctatgcatttgccgtaagattcgatgtgacgaagaatcttaaaaagtttttgatttttagggtaaactaaataaggcctaaagcttaggccttgttttagttggtaatttttttggttttggactgtagtacttcgtttgtatttgataattattattcaatcgtggattaactaggtttaaaaaatttatcttacaaattataggtaaattgtataattagttattattttatttatatttaatgctttatgtatatgtcataagatttgatgtgatggaaaattttcaaaaaaatttgagcaccaaaaaaacaaaaaacaaaaaaaaaatcatggagcgctcggctcgcccttttctccttccgtccggtgaagacaaccaccacctgttcggctgttcttgtctttcacgacaatgtaaacccaatccgacgagtgatcgcccagtgcgtgctggaatgagaacaccacatcgtcacgtgttggttaagagtgttaaaatttaacagatattatcgcatttttattttatttaataattaatatttaatcatagactaattaggttcagaatatttgtctcatctagttgtgtttttagttttgtaattatctattgttaaacgctctatttgccacgccgcaaactagacgcaccataatttcttaggcatgcatttagtttatgccataattatagcgtgctgaattatcttagatacgtgctttatatgtcatggactcgttttaatacgttaattttgtttttttttgagaaatcaggcgtcaattttttttgaccacacctttggtggttgagaaaattatgcatcaaccaaacatgccataatcaaagttcaagaggggcagagcgcgatcttagcccctgttgttttcgagaaaaaccaaaaatttttactaagtccaatcagcactcgtggcttgtgtgagaggtaataactggactacgtctaaaaaaaaatggacggggttagttcgatataatacggctagtgtgttcgccgctgcaggcttacagggctgttgcacagccagctctttcgagcacacaaggcccaggaaaacgatgttgggccctacctggccgtgggctatctttcttttctcgaaggaagtgacacagcccagaagctttacaccttgctcctacaaagccatggcccatcttatgtgtatgctttcttcttaggcccacgagaaacgcagccaaaaaattagtgaaactgaggccgcgccccgaaataatttggcgggagaatccccctccatcgggtcattccggcgttttcttccctccctgcctccgacggaaaatctgggtggagagagagagaggaaaaaagaagaaaaaacaggtctcgggtcctgaaccctagcggcggcgatggcgcgcggcggcggggggcggtcgaagaaggaggaggaggagctgcagggggcgatgcgcgggtaccatgaggcggtagcggtagggaaccgggaggaggaggcgcgctgggccaacgtcatcggcgacatccacaagcgccgcggcgagtacgtcgaggcgctcgggtggctccggacggactacgacgtctccgtcaagcacctcccgcagaggcacatcctcccttcctgccagtcgctcggcgaggtacacctccgcctcggccaattctcggaggcgctcaaataccaggtcactcctctcctctgtggtgtggactttctggtagtgcaactgtaaattgtttgaaatgtctgatatttagtgatgtatatgtgaccccctgcctcgatttggcctatacttggctcgcagtgttgggtttaggtacatgctgattgttttagttgtttcacacgcttattgaccttggattgcattacattacattactaattatgctgtatctaccctgtcacagtacatgtacatctatcaaggtatgatcattaggtgatttagtcactgcctctgtggtgttaaatactaacatcttgttgttataattgggatgctaataattagaataatactcagacctcactttataaatccaaaatttacattttgctgattctgctacatgaactcaaacttccatttcccttgatgtttgttggcttgacagaagaagcatctacatcttgcaacggattctgatgaccttgttgagcagcagcgagctaccacgcagcttgggagaacataccatgagatccttctaagatctgaaaatgaccatagtgccataaggaatgcaaagaagtattttagtatttcgatgaatctggcaaatattctgaaggagaaatctcctcaaaagtcggactttctaaaagaacttattgatgcatacaataatatgggcatgcttgagctggaacttgataattttgaagaagctgagaaactacttgtccagggtctgaagatatgtgacgacgaagaggtagattcatatgatgacgctcgcacaaggctccatcataatctaggaaatgtgtatactgaactacagaattggaaagaagccagtgggcacatccagaaggatatacagatatgtaaaaaaataggccatcttcaaggtgaggcaaaaggatacataaatctgggggagttgcattatcgagttcagaagtatgatgaggcacaacaatgttacaataaagcttttcaagtagcaaaatccttgggagatgaggatgctctaattaaacaaattaaacagaatattaaaactgttgcaaaagcagttgaagtatttgagcagttgaaggaggatgaacagaagctaaaaaaacttgtccgagacacttctaatgctcgtggaacgtctaaagagaggaaactcctccttgatcagcatgcatggctggataatcttattgagaaggccagtatgatatgtgcatggaaaaaagtaagcggaccgcatggtaactagtacatgatttttagttaccttgctataaacttggatattcatcataatttattttattaatttttggatcttattacaagtaagattttttttttcatttcttatcctattttatgcatgtgcatgagtaatcagcatgatagcttttatgactgaaagaactgagagtctgagacacaattgttcttgtttttatcttttgagttgcagttctggaactgtatatgatctctccaaaaaataattggttagctgaatctgaacataaagtttactaaaataggaaatactgttttgtttgtcagaaacatgaatgttttatttggaacgtcttagtaacttatctagacaattagggattaccacttccaacttaattacctgtattctatgtttgcactgcactctgtgaaccggaaacttttctgagcaatgcaaagaaaagtaacctgatttgagggaactatgtgttagtgttctaatgttagattggtgccaagggaaatggtttggtacatagtctttgtgtgaccagcttcgtcagaaaagtcacactgcccattcccattttgatgtcctgagacataacataaacgtgggagcctgattttaattaaaaccaatcatagataactttcatttgctatattatgtttgaaaaccaactattgatcagtttatttactttctgaatttcagaactgaaaagattaaaacattgtgcaaatagggcaaatgcatttatgcttacctcactgatatcaacaatgcactgaggtgcaatataataatgtcatgactcattcatgtaactatttgttctccagcacttggaattctcaaaagggaaaaaaagggtagcacaggaactttgcgatcaggaaaagttgagtgattctcatctgttgctaggggaatcataccaaaagcttagaaacttcagtaaagctcgtaagtggtacatgaaaagttgggacatatatcggtcgattgggaacttggaggtgagtcactagtctatatatttccttatttgtatttgcgaatatgctgtctcgcctcctagtatgaccacctttccattgtacttgtttacttgatgattcttttttctttttttgggcgagcaatcaaattgtagtcatctaagagatgtcctctttcagggacaagcattagcgaaagtgcacattggcaatgttcttgattcttgtgctgactatcctggtgcattgcaagcttacaaagaaggctacaggtattatcttgacgtcttcctgtccaaaagtcagaagatcttaactaagcatgcatgctgtgatcttaagtaaatggccatgaacaacacataggacatgacattggaggctttattcactaacatttattttaggcatttgagaacccatttattgtattaatggaaactatattttttaaagtttacgatttagaaatgagaaattgttagtgctaatatcttgattatagctgcatctttagttctggattgcagcaatcttctagggaaacactttatatatcaagggattgagcttgtcctaaacatccagcattttttatacttttaacatattgcagagtttatttgtttaatctcatattgccgttttagtttttgtgttacattattgtgttgggtctgtgcccgtgccaaatgtctttttaataattaactgctcttgtgcttccatctttagtttctgatgcttgcatcatatcatatgcaggattgctttggaaggagacctacctaatgtgcaactttctgcccttgagaatatgcattacagttatatggtcagatttgataatattgaagaagccaagtaagttattaagaacagattttgcacaaaagaatattatttttacattttatgcagactaaagggacttcattttttaggaaaatgcaggaaaaaatagacaatctgaagcaaacactgaatcaatgtgtagcaagggctactgtcagtgactattgctcagaaactgatactgaaggtggttgcgcatcagataatatgcttgatgctgagaatgactatgggcaggctgcaaataactactctgaggaacctgatgatgatgttacgcttgcttcacttgttcataggagtggaagctcatccaagattaaggcacccaagatatggagttcttctaagaaggttgacgaactatgtgatgtggctgaagacatacgtaattcttctaagaaggttgatgaactaggtgatatggctgaaggcactaggacagttttaagtaaatcacgtgctgatcactctgttcgccgaaaacgtgtccgtgtgatcttatcagatgatgaatccgatgagaatcctgaaatcattcaatttaaaaggacatcaactagtccagtagatagtatgtcaatctcaggtacagtgttgattagcattgcatattcatatgttgggatggctaaaatttacctcctagttgtattgacgtctcatttttgtggccagcagatcatggagcaaacagcagcaaaaaccaggtaacaaaacactgatgatcctttaggcttatgttcttgaatgggaattgaaatctaagtcatatttgtcagggatcgagctcccatgggcatagagtttgtaggctaatatatagcagtttaaatatatattttactttgcaatgcaaaaagaatttcttcacccaaacaccctcaatatatccctctcccaagctccaattccacgaattcttgtctagtatatccccatccaagaaatttttgaagctggagatatgccaaaagggccatgatgtggtttacagcatctgctggttctctttggttacaccagatgttgatggcaatttaaactttaaagcagtcagttcttgactttttattgtacttctcctgaagcactagatattgagagcttctatccatctgcaggatactttacaacctaatcaaacaagggatgcaccctgtcctgctgaggagagtatttgttcattcaaatcaagtagtcctattggtcatgcttttgaaggcataggattaggtgcttccagtataggaaagggatcaacctccaaatcagcagcaagtggttccaagttcagtactcctggctcaaacagtctgcatgagagccaaaatgttgttggtcttcaatccacagatgctaataatgtaagtattatagctacttctatctttccatgcttttaaaattataatttctcgagaatgccagcaagtgaaaagcatcacaaattattctatcccccagtggaaagtttctatgacagtattatgttcatttcagccaattacctctgatatgtctacacatgtgctgatgtgcatagaagcagctgaccccctcccccccccccccaggcggatctggcatctgagattgagccatgcccatagaccagagtaaaattaacataaaatcgagctgctaaccttctcaaaggatgcttttagccttttactaccatcactctggatcactttgcctcctttgtgtatgtacagttacatgtctgagacggtgttggttggagtgcgtcttgttgtcttattgtttgtgtggtgtttgttcatgcaaactccttttttctcctatttataaaatggcacagttctcttgcatgtctgagggaaaaaagtaagaggcacttcgtgatatttatttatttatttgaagaaccaggaggtgcatagttaaatctgatggatctgtgcatactccttagcctcagaccctcatcaggcatttacttgcaagttacccagttactccaactatggatattcttctgtagaataaaatgggatgtttcctctgcagcacttttgggccttcagaatcggtggccatctggtttacttggatggacgcgcttgtgtacatgaaggtgcttttagcattgactctctcaaagttgaagtagcatgtgtatattatcttcagatttctgatgaaaaaagggccaaaggtttgtcttctaagttctgctttctcgtcatttactgtttactttgttgcctctgcatttgtcctacttagcttggttggtcttctattattgggacactgatgggatcttacgttcatatattactttctaggtctattgcctatcattggggaactcaagttttgtggaaaggtattggaagatgcggcatccatatattatgatgatcagcttatttctgaacagaagtgtgttgatgttgttattgatggtatgcatgttcattgtctttatagaatggagtgccttgttctcaactatattcttaggactactactctttgcatggatactaggacacatgaaaatcgtttggcatgtttgtttcccttgctctccttgcctagtagccttgctgataggcaagaaaaaccttccagtggagaagagcccatttgtctattctcaaatgcaagcaaacccttgcccagaaacccaccttcgattccttgttgctagcataggatatgcattaacaaattcaacagttgaaaaatgtacataaatagaatagtgtatgcgatttatatactgcatcatgctagcctactagtacaatggagtgccaaatagaaatatataatatgcaatttatatactgcatcatactagcctactacaaatctacaatgtagtgccaaatagaaatatagaatatgcaatttgtatactgcatcataccaatactagcctactacaatgacagtgccaacttaccaactcttccaatgtcttgtaatgacaataggaaaaatccttaactatgttcctatccatccaatgttaagaaaccttcctctttagctgtgtaaagtttccagtgcaggttattacttattacactgcctcatacaagtttagactatcattgactcatggtttacagtactaagttcactcttcaggggctatggaaaaatggcatgtagcagcagctctcaactttcgggtttccttatttaagagcactaaacttcttcgataagaaaataaggtcctcactctattttttgttagtagttgctgtgaggctttgagttctggctggaagacaagcttttacctctatccactttaaatattcttggattcttcagcacccattgtgtacttgagcttgtcacacaaagctagcacctgctagatctatatgttgtctgtcccccaccaccaccctttcccccgcgtgtgcccctttccttctccctggttccactgatgaagttcattatttcgcatagaaatgcatcatgatcaaactgtgaaacataatttccatatttttaccagttaatatcttctgacataccatatttgtaatgaagattgggtgccaaagcggcttatgaaattgtatgttgatttctgcatgaagtcctcagatgcacccaataagaagctgctgacgaaactatataatcttgaggtaaacattttagatattgcatggctcgtatgtctgaatgagtgtcaaaaagcagctctacttaactaatgccaaatatgttcctttcttctattttctgacaggtatctgaagatgaaataattgtttctgattgcggactgcaggatatgtcaattgtgtcctttcttgatgccctaagatctcataaaacaatagcagttttggacctttctcataatttactaggtagccttttttccagtaactacagtcatttcatttcataattacttcaacagtgctctataaatcagttacagctaattggttgtttctttaggcccttgtacctgtagtgcagcacataacatgttctagcagtccccttttatgtagtgctttgtgctattccaagcagttaaagccgtgacttttgtagcttttcaaggacattattttgaatgactcagcagttattaattcattgatgattgtatggcttattggactgatttgttattcctgcccacaaatttcaggaaaccaaacagttgaaagacttcagcatatatttgcttcatcgagtcacacatatggtggcttgactctggatttgcattgtaatcgattgggtccaactgctttatttcaggttttcacattcctagaaacttatctgtcaaagtgaaataatatgatactcctatcaccccatcggggttttggcttgaaattctgcattgagcttctgcacatatgtaacatgcgtcctgtttaaaaaagatgagaaaaatcattctaacatgtggtaatctgatacactttcttaatggagttatagtacaagagtgcaagatatttaagccatttctttgaggtccactagtatttatttatttatttatcaatggaagaccttgggtcttcttgcaaaatggttctggaacaggatacaaaaaacctgatgaacaatctgttagtttctaaagatttcttgatgctttggtatttttagaaattaatgtttcttataaaacaaactctagaatcctctttgactgaatctgctagggattggattttagctgcttacttgttttagttaatttggtttttgttccaagtgatctcacttcttgacccgactcaacataatttctcttgcattacaatatatattctgtaaaatgctaagccactttttacctctttatttactgaatagatatgtgagtgctctattttgaccaatcgattggaagtacttaatctatctgggaatcgcctcactgatgcatgcagttcttatcttttcacaatcctgcaaaagtgcaaaggtatgtagcacttgatacatcagtagaattgtagaaatgcatacaacttcttttggtgacttgggggggggggggggggtaggatacggctactcggctagccaggtctttccctgttttttattgttttgtttcattgactgacataagccatttttttgggaaggagacaatttatttttgcttcataaactgtatgttatgtatttgctttgtttacagcactttatagcttgaatgtcgagcagtgttctatcacgtcaagaaccgttcagaagatgacagatgcacttcatgaagggtctgtcctttcacatctctcattaggtacttcttgttttcataatggcctacttctcttctgatttgtatattagcagccaaagggtgcttggtctagtggctaagacactcgagcggcactccacaggtcctgagttcgattccccgtggaagcgaatttcaggctgtggttaaaaaaatcccctcgctcaccccaggccaaagcacaggtaaagagatggcccacaccccagggttacgtttccctgtgtacggatggggcgcggtttcgggggttttctcggtcggggtactgagatcttctctcttaagtacaataccgtgggggcggtctttcccccaccgtcggtcggggtactgagatcttctctcttaagtacaataccgtgggggcggtctttcccccaccgtcggtcggggtactgagatcttctctcttaagtacaataccgtgggggcggtctttcccccaccgtcggtcggggtactgagatcttctctcttaagtacaataccgtgggggcggtctttcccccaccggcgagtttgatttgtatattagcaatgtccatttacaaatgctcaaaaattctgtaccctcgacaggaaagaaccacccaatttctagcaatacaatgcttaaccttctatccaaacttgcgtctctcacaaggttagcagaaactgtccatatgtgttgataaatactaaggtgttcgcaagtatagaccacacgtgcatgttgtccctgcaggttttcagaactaagcctgactggtataaaactgaacaagttaatggttgataagctgtgcctccttgcacaatcctcgtgcctatcaggacttctgctgggtggaacttccattggaccggtaatttgctttccattttcttttgttcgaaagaaaggctttgcgttcgagaaaaaagaaaagctttgctttccatttgtggttagtgtttgcagcctgtacacaagcaatatgtcatctcatctggtgctgctgtttatgtaggtggagacaattaagcttactgaggcattgtcttgtacatctcaagaattactaaggttggagttgtctaattgtgggcttacaacacctgatttgacacaaatctgtacaaatctctctcggatcaatattcttgagttaaaccttggaggaaatccaattaatctggaggtttaattcctactctcatatgctttggtaacatgtatccccatatttcagtagcattgatctgttgcgttacattatattatgcagggctgtgatgctatacagggaatgcttgtaaatccccaatgcagcattagatctctcacccttgacaaatgcaatcttggacttgctggaattgttcgtgttattcaatcattatcaggtgaggaacaattttgttgaaacatcaatctctacatttatctaataatcttctactttcagaaaatagccaattagaggagctgcgcatgtctaagaacacgaatttggagtcagagagaacaataaagtatgatgaagacatgcaggaagtatcaacaactgctgagcaaaaacaatgcaataaccctgaaacaaagaatgatatagctccaggggacatagattttgcgaacatgcaggttccagatagtgaagatgaagcagataatgatgcccaccatgccatatctggtccacataggagctgtgcaagttcatcgcagaaaaactcttactcttcttgtcagattattgaagaactggcggaggccctaatttcagcaaagcagttgaaggtgcttgatcttagttgtaacggtttgtcggaagaggccatacagtcactgtattctgcttgggcttctgttccaagaggcgatggaatggcacgaaaacatgtgaataaggaagtggtccacttttcagtggatggtatgaggtgctgcggcctaaaaccctgctgcagaagagacctgcaaatgtgaacccctggacggccttccgatgctgaattatggttgcactctgtaaataaatcatcagcgaatcaactaggcgttgacgcattgtcaatgtaacttcacactagtcacaatagctgggtgactcgagagaaatctggctttcaaggttataatcatgctgatttgcgggaatgtatacactacatgcttgagattttggcttgcagttgtttctgaggtgcagttactacttactaggatgcgacgaatctggttgggtacagtcaaattccttcagaggtcttggttaaatctagttgggtaaagtcaaattcctcagaggtcttgcgggaatgtatacatatatattgttttggatggggaggggcagtgaggggtgataaattccttagcatgtttgaagcggtgaggtgcaatttctatctcgaatacaaacagtgatataaacatttcaattcgtaaatcatggaacagaatagtcgtaaagataccacattggt

SEQ ID NO: 4559 - DNA, 7806 bp, Sorghum bicolor
tacaaggtatttcgggtcacccaaatcagctccttattttgactgaaaattgtttggataccatgtattttaggacgaatagagtgaatagcaaataacatatagctagagcaactgttggttaaagaatcatgtcctaaagaaacccatcatgcatgcctattaattaagcttaagcaatatatatttcttataatcttaagctgcattagaactttgtctatacatataagctatcaacatcaacagtttgctagcggatacaattgtaacagctatctattcatacaaagtatccacatcagcacgccacattattatctatactaatatgttgatgcatgcacaactaatctaatctagacaccctagataggcctcgctgggagtcatatggctaacgactacatacagagtatacagagtatacacacagtgatgagatgaggcacactgagtcagtagtgacgactccatgggcatcgccgtacgtgactggtttccacattcgtgcgtggtgtgccgccgtgtagtacccagccgcccaggcaagcgaccagagccgggccgagccgacccggagcggacgaaccccgcggtgtcgcgcgataaatcgggagcagagcaggagcagagcctaacagaaaaggcaagccgcgtgtcgtccccgccaggcagccactgccaccctccccccacctctctcgaccccacccgacaccgcgcggacccggagccgcacgcccgcaccgcctcccgcccccaaaccggcgccgacgagccccagcgcccaatggcggcggccttcctcgacctggaggcccgcgtgacatgatccctggccctccgaggaagggaatatccgcgcgcgcgcgcacccccgccccacaccccagccagagcccgcccacacagcccccaatcctcgccttccccaccgcaaatccttctcgactcgtccgtctctcctccaccgcctcgcgcgccgcccggcaggcggccgcaatcggctgctcgtgctcgcgtggccccggatcgccgccaggtgctctctctctctctctctctctctctctctctctctctctctctctctctctcgtggattctctgaatttgtttccttctcatcggtcgttttgttctgcttccgcgtccattcgttcgttttggcccttccccttactccgggtccgggggaatttaggaggggttggttttcgtaggtggcggtttgagattttgcgggagggggtgggtcgagattcgtgggagtcgtggcatgcggttccgcagctccgctcgaggtgctccagcgagattgctggagctcgttccatgaattttttttggagtctgatcgcaggcctttgatttcagcgcgcgtgcgttagtcttgcttggcccttgtctcggaaagttgttttagttcagcatgcatcagcttcgtttcttacgtatctgtatttttgtgggaatttaggtcattattagtgatcagtgaaggctcaccctgtgtgggatcaaaattgtggcttttccctctcgacagcagatgacttctgcatttttttctgaaccctttattatttgcggtccttgtttttttatggaaaatcgttggagaactgggtctcagctagcggtaggatttttctgaggtgctattggatggacttggaaaataaagtactcctaaatatgtggtaaaataactgtgtgatttggtaacagaggttcgtgtagatcagtaactgtgtgatttggtaacggagcttcgtgtagatcagttacctgtgtgatggagatgcacacctcacttttttcctgtcttcctttaatgcattaataataactgtttctttgccccctttcaacaggaagtgactaattggtggtgcgcataggacttgctggatttcagttgtctgatatactcaggactcagtgctgatcaagtgaacctattcgcttcaacttggtttcagtctcacacaagtatggcgccctctgctgcagtcccgggcggttctgaggctgagggggcaccacgcatggccaagttcctctgcagctttggaggcagtatccttccccgaccactcgatggctgtcttcgatatgttggtggtgagacaaggattgtcatgttgccgcgtgacatatcatatgccgacctagctgcacggatgagagagctctataaggatgctgatatcatcaagtaccagcaacctgatgaggatctggatgcgctggtctcggttgtgaacgacgatgatgtggtgaacatgatggaggagtatgacaaggtcattgccactggggaggccttcactcggctcaggatcttcttattttctcagcatttggatgatgatgctgcatcagtggctgtgcattacaatgtagacgagcgggaaacagagaggaggtatgtagatgcgctcaacagccttggtgatgttaagtcaccttcctcccctgtatctgtggagcagctttttggcattggaggcaatgattcaggaattccagattttgctggcttgagacatttgaatgtccctcgtccatcacatagtcagaggtatggagagatggattccccttggagccctgcatatgtctcgcctggccagtacggagtgcatgacccaagggattttccaatttcaccatcatctgcaaggttccaagtaggagcggaggattttgatgagaggattcctgacgactttgtaaggcagtcaccaaaatatcggcattatgaggcccagtcaccatcacatgtggataatttagtctggcttccacctggtgctataattcagcaaaatgcaggctttcccggtaatttgagccggtccaacaatttcttggatgggaacagcggatgtgatcactgccgttcaccattccagaagggtcaaggttcagtgagtgatcctatctatatgaaccctcgttggactcggccagtccaacaacattttgaccaagcaagcatgattagtgattatccaagtcaccatgctagttcttgttcagattactgccgccctggtgagcattatgtgggaggtcaagatgttagattggaaaatggtgtttatgttaaagagcaaaatggtggccatcctcccatgttttataatgagtcacatcctcatgatagagtctggcatgcacataccaaccaaagtcatcagcggtatgaggatccaaggctgcatcatcctgctaatggtagagtgattgaaccatacattgtcgatggcaactctgtcaattcagcatttgcaccaaacaaagtatatgaaatgcattcagcatctcttggtcgttctagtcatgaaagtcctcaccattttcatggtaccagtgagctcataaatgacacgtaccacaaccaacaagttggaggcagtgggtcgtatgtgcaaccagcagggtttgaagaatcctctgggcagcattacaaccactcttcggcctatggtgcagattccttttaccaaatgcagcagaatttgccaccgattcagtccctgaggaggagagcgaacagccctgttcacactgcctcaccatatgattccccacacctgccaatgccaaatgggagcattagcacaaactttgttagaaatacaggtgatgttagtcccaggataccaggtctacctggatatgatcggatgccaaacccatggactcctcccaatggcaacataccatatagagttgttggacatgatgttccttctgccatggaaaacactagtgcttttgcacctaggtctaatccaactgctgctcagtatgttcagccttttattgctcctgaatcaatccagcatcaacctggaggtccattgattcatcctgaaagagcataccctgaacccatgccggcatcatatgctgatagcaaagtagctgtttctgcattgcccctcactgatcaattatccaggttggatgcaaacacaatgaagaaacttgaaggtccagatgataactctactcgaaatgtgaatgaaacaactcctttgcatgctgtgaatgaaccaagtaccttaccccaccatgttggagctgtgcatgaagtcagtcctaagcagaagccaaccgaacatgaaagcaggcaaaagcaacatgaagctggggctacagcactgcaggaatgtggggatatttcagaggataggttgaatttccttcctgaattaattgcctctgttaaaaaggcagcactggaagatgctgctgagacacaaatagtccaatcagatgctaatgctgctgtttcacctgttcctgatgatgacgataatggaaagaagttggatgaggcaactgctgttgtaagtaatgcttcaaggttgagctttttaactactaaactacaaatgatctccactcagatcgttttgttttgcagaatacagatgcaaatcaggaccctgatttgcaaggaagccttgatcggcagaagagctccaagattgagtccacaactgctgaagctgaagctttgtcaaaaggactacaggtatgtttggtgatctccttttgtgtagtactgtttgaattttaccttatgttccatttataatctgtatggatcatgcagactatacaaaatgatgatttggaggaaattagagagctgggttcaggtacttatggtgcggtctatcatggtaaatggaggggatgtgatgttgctattaaaagaataaaagcaagttgctttgatggaagaccatctgagagagagcgtttggtatgtttaatttgctttgttgataggtccctcaaatttagatttttgtgctttcaaatgtttgcactgaccttacgttactgattcatcgaagtccttgacagtattctgaacagtattttgagttattcaactggtctgagaagaaagtaaatttgaacttctgcctctgtgcaaaatgattctagttcagatttatccaatttttgcagattgcggatttctggaaagaagctctgatcctaagctcacttcatcatccaaatgtggtttcattttatggtgtagttcgtgatggtccggatggaagcttagcaactgttactgagtttatggtcaatgggtctctcaaacagttcctgaggaaaaaagacaggtactacatttcttaattcaagaaataagaatatatgtatcttttatttctcctttatcaaactctaaaataaagcacttgtgcaggacaatagatcgccggaagagagtaatattagccatggatgctgcatttggcatggagtatttgcacgggaagaatatagtccattttgacctgaagtgtgagaatctactagtgaacatgagggatccgcagcgaccaatctgcaaggtttgatcccttccccagcctttccctttactgctttatctttctggggaattattttggcaatggtcgatatcttctcctgacttttccccaactcaaatactttctgatcagatcggtgatctcggactatcaaaggttaaacaacatactttggtatctggtggtgtcagaggaaccttaccatggatggcaccagagcttctgagtgggaaaagtaatatggtgtcagagaaggtaagactactttgtcttgtaagtacatttatttgaccatattaaacaatgccccacttttttgtattctgacaaaaactatttttatgtatcttgtagatcgacgtctattcgtttggaattgtcatgtgggagctgcttactggggatgagccatactctgatatgcgtgctgctgaaattattggtaatgtcaagttccctatagtaatgtagaatgctatgccttgatctgttatgacactttccaccacatttcgacattatgttttggtatatcttagttataataatttgtggacttcagaactctgaacagatgttcagtgaaagttatcttctagaatttacttgcatttggatttggatgcagctttgaaagaataaataaggccgagctaatagaaaagaaggtggtatctatagtggacatataaatgggtcagttgtaagtccccagatgtcttgagtagtgaaggtgggacatataattaaatagtggacttcatacaaagccagattaatgtagttggagttgtaccttgaatcgggttattggaactgaaatgatgatgaagattcaaggacttaacaatatgtatggtgtagttatgtagttgcacttgcagaatttgtttccttttttggattttcctgtgatagcatgactttttctccttttgcatagtaacattgacaatttggtagctgtggatttgccctacattgtgctgtgtcatttcagtacacataatacagataggggatttatgttaagttttttgaatcttagtcataaatatatcgccgaggcttgttattatgtcacagaagtgatttcattgtaatgcatttttctagggggcattgtaaacgattccctacgtcctcaaatcccttcgtggtgtgatcctgagtggaaggggttgatggaaagctgttggtccagtgatccagctgagagaccgtccttcactgatatatctcaaaggttgaggaaaatggccgctgcaatgaatgtgaagtaaaggtttggaagccataaatggatcatgtaagtgttcccacatccaatatagtgattacaagaggaaggcagagttcaaactggattatgagtatgtttcaaatgtcttggcagcatctcagtttaccctactccaagtgattatttatcaagtgcttacttcatggaagaaaaagtatgtcatggagattccaaagcatgtttaatgtgagtcagctattgggtttgtttattccttgtatgacccactagtaaaaactgacgtttctgttacctgtttcaggatatttttttttaatcctgcagtaaaccggctatcaaatgccttcggtcgaaaacaagtatgctatatagcgtattgtcttgatgggaactgttggactgtaattgtaaataagttttgacttgcttcatcttgctggcacgtattagatgtgcaaagtaataggcacgatcaaagctggacacagttatcctttttccccatacaaattgtgtcctaggagagatggatcgaacacgactagagctatccttgttcagattgtacatagtctaaaaataatagtataatactgtttccctgtatatatcaccacttcctatttgaatgaccatatgtttgcatcgtccttgtttcacctccatgtctggttacaatatatatcgcctgtttttttgtaaaagttatcttgtggttttgctgtacccccatttatttggagggagagtagagtagttttcctgttcagtcctcatcgatcaggtaaagccactgtctatccaaggagaccatggagcagcggtatcaattgcattaccattgttatgctccattgcttgtcactctggatgcaatttgacttctaattttaaatatggagagcatataattttgcagacataatggagaaggatgtttaggtagctctgctccatgaatgtataaacagtgtgatgcctgtcgcgtccaacattctgactttctgagattctcatttgttagtgtcacttacctgccagttccgttctcctcttttatgtaggaatacctgattacagtttgattaacaaggataatttcaccaccttggtatacataattgtggcctggcctggccaaaattacagtgtagccta

SEQ ID NO: 4560 - DNA, 5004 bp, Sorghum bicolor
caaccgccacactacttgtgtgtttgcaccaattgtataggagtatgaaactaagaaaatttataaacataaatactcaagacggtgagacatgcctccatgtctattacttcacaatcgtgcaaatgtgcaatactccaatgctcactagaaaagccatataaagtcgatttgatccttaatttgtatgaacactaagaagtcaataccatcatagatagactttaaatactaacctactccctccgtccccaaatactgctatttctagcagatttcagacagattagtgtggcaaacaaaagatcattgtaccctcaattaatttgggttccaccatttaatcatgcacgttaagtcatggttctctagttccaatgagctgcatttaatgccaactaaacaggcttaaacaattattatcatgtgccaatgtactactccctagaagaaattaaatgagctggtggactacggaagtttccgggagaaattaaatgggctagtggactgagtatgctagtagaaatagcagtatttgtggataaaatttttttctagaaatagcagtatttaaggacggagggagtattaatgtaaattttatgaggtttacgatgcttgggtgcttggaggaacctgtggtttctgtccgtggaatttttttggccacctagaagacaacaatctatccttgggctaattaaggtggagtaggtttctagagcctagccgtatggcatgatcgtgcatgcccgctccaccactgggcacttgcattgcccgcacggccgtgcttttgtagcacacggcgtcacgtcgggtccagcggttcacagcagcatcgacgaagggaccgactgtagtagagtggcgggcagcagcagcgcgtcctgtgttagcggcggcacgtcagtttgttgcccacgaaggcctgatccaccaggcggcggccacactccacaggtgtgtcagtaacgaaaagcaacatcaacatttgacttctcagaaatccagtaggaggaaactgctgagccacctacagggggccgtgcatgccgagagcctccgcaccagacaattttacctaataaaattaatctacgttatataaatattgattcacttttaaaaccaggggcatgtttggttccttgctaaattttagctagctaaaattattttagctattcttgaatgactaacggaactaaactgttttagctccttttagtcaatgtgtttgaaactttagctactaaagtaactaaaatttagctagctaaaatttaacaagaggaaccaaacagggctcagaagatagttgggtttaaactttaattaaatataagtttaaaaggcttgttacggtgctggaggctaccgtgacgcccaactaggagagggttgaaactgcaggagacatgagagaactagaaagagaaagcaacttctgaagcgcggaattattcatctaccatttaaatttaatctaaaactagttcctgacccataattttggtttcagcccataactttagttctttcgcatcggtttttttcatcttataacctttagatctccttgataatttattccaagcaccgtaaaaattctcaaattttatgtacgaaacttacgtgtacgtgtgtaattccgtgttaaaagagttataaaattatttttttagtcaaaatagtcaggtattccttcaacttgatcacatctagagaagtttgatctaaaataaaactgaaatttctcacaatttggaaagactagccacgtagacgtaggtatagggtaattttgtgctcctcagtcacaatccgaccgcgaccaggccaccgtgtacgtgcgggcgacccgttacaaaaagcttcaaaactacccaataatcccaagacgcaaacatcttccgatctacaaatcgccgacgcacccccaaaaaacctaacacacgcgcgcagcaaaccgcacggagagagggtcatcggcaatgcataagcagcagcagcagcagcatacggagcggtggggcgatctcctcgacgacgatggcggcgacttcgacctcggcgtgctcctcccgccgccggtcgtcgtcgggcccgacgccaacggcttgaagaaggtgatcgagtaccacatcgacgacgagggcaacaaggtcaaggtcaccaccaccacgcgggtccgcaaggtgcgccgctctaggagggccatcgagcgccgctcgtggcccaagttcggcgacgccgccaaggaggccgccggatctcggctcaccatggtctccactgaggagatcttcttcgatcgcacacgtgcagcatcaggtcattactgttctatgattcctttaaaacttataaatctgctttggtttccagattcgcttggcgtttgttgagttttggttattcatctgttctgtttttttttgaaaggcggcaagagctttgccgtatttttattagacgagaaaaaagaaaaacagaaagtatttacaacaacttacatagcaactcgactttaaactactatggcacacatgccaaaaaccaaaagactaaccaaaccactgtattgcactgtattgcactagtataaacacctactcaaccatagtgctaggtcttgttgccatttggtattgttgaatttcatccttgcacagctgggctacttggatcggttgcagatgtttttgttggaaagttcttctattgcgttccttccagacgttccaccaaaaatagatcatgacaccatctatctttctacgttcacttctatcaaactttgctcgacatttgcgccagtaaccatgtaaggatccattcattccaaccgagtttagcgcgtatagattgagccattgttttaaataagaccagacttgctttgcgtagatgtttagtttagtcaaaattcgggtgatttggtcgacttagttcatgataaaacggtatgatagggtgcacacgttcatgcatgatatatatgatcaagcaaattggtgtttcattgcatttgcatagcgacttggagtctatacagtcagttagatcaactagatatccaatcccctgaacgtacatggtcggtttgttgggattgttatcgatctctagtatagcttatcggttggttgttggaaacttagttatcgtagtcaagatcttttggctgggattagcacgcacaaaatcattctttaatgcaaggagcatgtttgtattttaaggcaatatataattgtacatttgatacagagcacgcacaaagtcattatgtgtttgactttgactgaaagctctgttagcacatcgaatatacactgttgattttacattattgaacgaaaataatgactgaaattaattatatatggacagctctactatgtctagtagacatatttggtttgaagatacagttaggtgagcgtgtacgtgtacgtgtatgctattatgcagatcatgtaaacagtctcgtctcgttgctttttttttcctattaggtcttagttactttggatttctttttgaaagacaatggtcattattgtctctatttgtattaatatatataagaagagtgaattgcatgcttgagaagtgcaatgtgagaagtcacttagtagctacaatgctaagacaggcagggaaagctgactactcgcaaaatgtggggatgattaattaattagtggtgccaagcgatttactttttgttaataccggacgaatgaagtgttcagtaatagaaatcagccactgctaaattctacagtagcagtgacatgaatcttcgtaaaatagctgatagtgcatattccttttgattttgtatatacctctctgaattttctgaatttctttttatgtttttgcttttgtgctctcattttgctaactgctcatttgtttggttgcaggaaacacaggcgacggagcagggccatctacttccgctgattcactggccaagggaaacgataaaccaggaggaggcctcctcatggtttgcagaacctgcgggaagaagggtgaccactggacctcaaagtgcccctacaaggatcttgctccacagcagggcgaaagctctggcgacaggcctcctagcgccgacggctctggcggcgcagccggcggcaagggtgggagtggagcatatgttcctgtgttcaagaggctgggtggcgacagaagtggagcggatgtgatgaggcgcaggaacgacgagaactcggtccgcgtgagcaacctctcggaggacgctagggatcctgacctcgcagagctgttcggccagtttgggcagcttagccgcgtctatgtagcaatagacagggtgactggagagagcagggggtttggcttcgtcaactttgttcacagggaggatggcgagagggctatcaacaagctcaatgggtacggttacgacaaccttatcctgcacgtcgaatgggcagcgccaaggcccaactagctagtttctaatactacactggttgtgtaaaatcgcatgtttaatgaacagaagtttatatatcagtatggtggttcaaacttgaagtaatataggccttgtttagatacacccaaaaacctaaaactttacaagattccctatcacattgaatcttgcggcacatacatgtaacattaaatatagataaaaaagataactaattgcacagtttaattgtaaatcacgagacgaatcttttaagcctaattactccataattagataatgtttgtcaaataaaaacaaaagtgctacagtgtcaaaatccaaaaagtttttgaatctaaacaaggccatagttgtgttatggacaggccacgtctctcaaagctgaattgtcttattttgtttcggcgagaatacttgtattttcgactgtttttgatgtcttgtagctatgagatgtgaatttaggaggaattgttttggcttccaactcgcctttgtatagcttttcc

SEQ ID NO: 4561 - DNA, 9216 bp, Sorghum bicolor
ttaccacatagtatttgtggaacataacaatatacaggaaaagaaacggcatagtaagacatgaatacttggctgggaaagcataaggttctcctaaagttcttttgattagcttcggacttcagaaactatccattccaagaatatagagcacgctcaaccactaaatagtcccctcttatgtccttggcaacccgtatgtcatcatccagatagacagtgtcaaacctgaatgttgatatacacaatccattaagaatattgaaacagaactgacaaactgaacaatgtctaacacagacattccacttttctagccagcaccaagatgccaattagcaagcttctttttggacgtgaaggccagaaacctaacattatagagtgcttagcctacattatgagatattttatcagcaacacatagcatggttaaagcatacgagcttgtccatttcaccttaaatattttgcatttcccccaaagcactggctgaagagggtcagattgtttttaagggctcctaaatttttcttccaaagcacaactgcatatgtaagaatggaaaacattctaaggtggatcaaggacaaatttgagatatttttttattgaaaaatgcagcagaattgcgcctctttgaattaaggagaaaacagattcagttcttacaatgtatcgagacaagctcgtgcggatttggccacttgggtgacacaacaccaagactacaatgcgactttggcaaggaagtgcaaaattttagttcatctgatctgatctgctagcataaactaaacacacacagaagtaaattgaggaactaacaaaaacacattaggcctcatgtggtaccagaaacggtagcagcattgcggaatttagaagctgtcagtgattccacaaggaagcatatgaacctttttttttcaatcacccattcaattcaactgatctgcccacaaacttacttttgatgtacacgaacttataattttttctagattggtacactgtgttattggcactttgctttagttcctatgtgctaaatcgattaattgcaactaaagatatatagatatgagtatatataagctaaggggcgaacatattgcactcaccatccttttccaaacggcggaaaaggaacctcccacttgtttcctctcagagcagcgcgggtgaacctagaacaagcacatccacattccatattaagatgtctatcagtttatcatactattaaacaaatgctagattgctagtgaagcaccaaaaacctgcctgaaattgactcgctggggcggctggacctcgatttcgccattgacaacgaacgcgcctgagggaggaaacgtgatgacgttgttaagggcgccgccggggacatctatgacctggagcacgtcgccagcggcagtgcggaagaatggggcgttacgcacaatgaagagctgctcctgctccgtagtccagaggaggcgccaggttccggagagcttggcagcgtcggatacggtgtccgcgccgggggatacggcggcgagcgcgtcgatgcaggagacgatgtcggcgaggcgggaggggtcggactgcgtctcgaggccacgaccctggtcggcgatgaggcggaggaggtcggccttcgccgccggcggcttggtgggaaaaagtccgcggaagaaggccgcggcggaggggggtctgggcgcgaggcggcggcgagcgcggggggtcggtgccggtgccggtgccggtgccggtggtgcgaacgttttgttcgggacgaagaggagtggcgccatcggtaaagaagatttggctcgggtggccgtggagacgcgaagagcagacgagccttcccctcggagggaaattgggccgaataatgcaagtcatgggcctctttttctaccttgatgggctgcgctctgtttcgtcgttaccgcaagcccgtcgcctcattgaaccctagcccccatccatggctccccgcaagtcacaaaacctcatttgagcgtgcgagctctttcgcctcgaaccctctcacgcttgcctccgcgctccagtgctcccctcccacctcgccgccgcagcagccatggcgatcacagcgacgacccccgacatcctcggcgagcgccagtccggtcaggacgtccgcacgcagaacggtaaccgccgccaccccttccttgccaccagattccgccgcggcgtggcggggtttctgagatctagtggcccgagtagccatctggcggcgcgctggtttaattactgttttggtttgtttgatcgcagtgatggcgtgtggggcggtggccaacatcgtgaaatcctcgctcggccccgtcggactcgacaaggtatgcgtaccttcggctctgatctatttagtgtttacatatctcgcccgcagcctttggtgatcctaactttatgtttgtatataaaccgctgcatggtcatgatctgtgttgctagaatggtatttattctcctccaagttaaacctattgtgctgaagattatgctgatttgaaaacatagttagctgggttttatcttagaacacattggatgattaattcatagaatgtattcagtgtcatcactttcttaaaaaaaaacctaacaaatgagaaaaattaccggtacataaagagatgggtctatgatgtatgcaatgtactctaataaggagaaatgaaaagtaattcagtacattctgcttacagatgctagtggacgatattggtgatgttacaatcactaatgatggagcaaccatacttaagatgttggaagttgagcacccagctgccaaggtgattcatggctgcaaaatctgaagaaaaaagtttatgttttgattgcttctttgtgtttatttatattttgctattgatttctaggttcttgttgagttggctgagctccaagaccgtgaggtaggagatggaacaacttctgttgttatcatagcagcggagttgctcaaggtaattcatattttgctttacttactattgtgaattacagttttcagatgcacatgcactaacatagttttgtttcttattgtcagagaggcaacgatcttgtgaagaataagatccatccaacctctataatcagtggctacagggtgtgttatcaattcttgttctacctgttttagtatttgaattttaactggtcatttcagtggcaagatgactgtagcttacctttgtggaatgcttttccttcatattctaccagcttgctatgcgtgaagcctgcaaatatgttgaggaaaagttggcagtcaaggtaagggaatattatattttgagttaatactggaagaatgcttcaccattccatgcttatcgtcataccgatttgattattcatctacaccttcaggttgacaaacttggaaaagactcccttatcaactctgcaaaaactagcatgtcttcgaaattgattaatagtgacagtgatttctttgcaactctggtaagttctatggtaattttgacttgttacttagaactagctgattctttagttggttcatttagctctgttgtttaatatatacacatggtattgcttttggtctaaatgaatcagtgtgaatactaactgtaaagccctttggaacttgatgttcgttgtagatttgttctaattgtatttatttaatgttttaccaaatacatgtcttcacttgtgctctgatttgtgttttatagttttctagagaacagagattgttaattatgctcttgtgtgttttctgagtgacaattttttatcccaggagctaactgttgggtttcaactatctttcaattagcactgctttcatgctttgaacagtttgatatcttgtcctgacattgagttcttataggttgttgaagctgtccaggctgtgaagactacaaatgccaagggagaagtgaaatatccaatcaaggtcagtgaaaacacatttgcttctagcacagctccacttaatctattcaatcataaggatttgctttgtgtgaataaggcatctctgtgtactcctttttgaaccattcgatccctgattcttactactttgtactggtccttgctgcccatattactgtttggacaatatgttatgcaataatattcaatgaagatgttacgtacagccagggttggagccagggcaggtactgccaaggccctccccctcaaagccagctagctagctaggctgaagcacattcttgtcctggctctacccctgcctactacagccacccaactcctgtctttaatgccattggacccctaggtggttgttgctaagctaatgacaatagatcaatgtctttgatgatgggatgctcactacatgggtgacaacttctaaaacttggattattgttctctttaatctccttgatttttgtgttaactattcttatcatcaaacttctccataaatttagcttgtaactattgtattatctgatccgcagagcatcaatattttgaaagctcatggtaaaagcgccaaggatagttacctgctaaatggctacgcactaaacacaggccgtgcagctcaaggaatgcctacaagagtaactcctgctagaattgcttgtcttgattttaatcttcagaagacaaaaatgcaacttggtgtccaagttctcgtaactgatccaagggagcttgagaagattcgtcagaggtatttgcaatccgtgttccaatactttagaatttgcttgcctatgtctggtagaatcagcactgtaaatcagtctttatagcttcttgcatgttacttgtttctaatttgttcggccagatctctccatctttaaaaattttcggctagaaattcattggttcattctgttttgaggtctcaaatggtaatccctattacttgctccttttttcagagaatctgacataatgaaggagcgaattgagaaaattctcaaggctggagctaatgttgtgttgaccaccaagggaattgatgatatgtccttgaaggtatgtttttcattattcaggcagaaagtgattctgttgagtttcctattatagttgtcttgcaccgaagcattttagttgctctggctgactttgcaacagaatggcacattttgcttccttactagtaattttggttgtccgatgcattgtccttttgacattgtgtgtttcatttaactaattcttgtaaaacttaccagagcttgcactaacatatttttgtctacctgctctcctgtggttcatgtgactttcgagatctcaaaatgaagcttctcttcatgatttgaattgattctgatgatgtcattttaacatgagtaaagtatacggccggttctcaaacttgtagcgatatgtcatcccggtctataactaaaaaagtgtgttattacagtccttgaactttgtttgggtctcatattcatcaaacgggtatagatccacgtgtcagatgtatcttccatcccgcatcgggagccggcagcacagaacggcgaaaggaaggggaaggaaccggtggcagcgtggttgcagcggcgcagctgcatcctccccctcgggcctcagcggcacgcctcctcagtggctcggccctgcggcgctgcgtgagtgtgacctgcgctcagccccagcgactggcacctggccccggcggcggcggcgacgcagccagcccggcgccccggcagcgcaaggccgcgatggccacggtttgagagcccggtcgcctgcgtggctgaggaggcggcgcgtgcttgtgccctgtgtggctgctcatgcatgctgctcgtccgtagcccgtgcggctgctcgtgcttgctgcgaggtggctgatcgtgcatgctgctcgcccgtgctcctgtggggcgatggcagcggctcgcttgcggcctgtgtgcagcgccggcggcagtgatgaggaacaagacgagtgttttcaaaatagttcctaatgaagtttgtaaatattatgtaatttatgtgtctgagcgattttgttattaacccccgctaatcttctaatttaaacaattaaatctcgtctatgcttgcgggtataaatctgaatccatttggataaatatgagacccagacagagtttaaggacctgaatgacactttttaagtttaaggaccggaatgacacaccctcacaagttcgaggactggccatgcactttactcttttaacatctattgggaacttttgatctttacatgctaatatttgtacagacatctcatcctgatgactgtcactgaatcattttgttactgtgtcatggaacatatttcagtactttgttgaggctggagcgattgcagtaaggcgtgtgcgcaaggaagatttgcgccatgttgccaaagccactggtgcaactatggtaactgatttattttatttattatttaaaattaaaatacaaaattgaaaatcgacctgttagcattctaaggtcaaaagtgtagtttaaattaaagtaaataattgctttgcgtctttatgtatatgtatatttaaatcataaaaataggggtaaacagagtctctgatgtttcatagaaactgtttcttacgtcataatcagaagaaactaattcagagaagcagaattttcgacgcaaaatagatttgttttctttgaattttgaaataaaggttcatgtcacgcttacatacaaaatttgcgataaaaatactggcagaacttctaatcttgaggttctctagaagtaacgcagaagatgtgtttaaccaagtgttaatcatgatgctgtttgactgggaattattaggatttttggtggcttaacaattgaacctttcaggtgagtacatttgcagacatggagggtgaagaaacatttgatgcatcattccttggacatgctgatgaagttgtggaggaaagaattgctgatgatgatgttattctggtgaaaggcacaaagaacactagcgcggtttgtaaattttccataccaatcttaagcaagtttgctataagactataagaggaacaaatttaatttgaaggtaattgcataatgcttgattttctattgtgcaggtctctataatacttagaggtgcaaatgacttcatgcttgatgagattgaccggtccttgcatgatgccctgtgcattgtgaagagaaccctggaatcaaatatggtaatccttttgcttccattctttcttgtcatcatgtgttggttacctacagctaaataagtcaatgcttagtgacaactttcactgttcttctgtggcttgtgcaatgaggatttttcatgccaagaagaaactacagttcaaaatgcaattgattttatttatgagtggacaaattctaattgttagaatcattgatggtgctagtgtctccaacatgttttgtattggctatgtaggttgttgctggtggtggtgcagttgaggctgcgttgtcagtttacctggagaaccttgcaacgaccctaggttctcgggaacaactggcaattgctgaatttgctgaatctttgttaatcataccaaaggtttttatctgttctattttactaatactcttacctttttcaccaatcaacatagcatattaatgagctgaccttgcaccaacaggtactatctgttaatgctgcaaaagatgcaactgagcttgtagcaaagcttagggcatatcatcatactgctcaaacaaaggccgataagcaacattattcaaggtaatgaactaatggcataacattgtcttcagttatttgattaatagagcccttggttcttgtgtttcatctctaaaattttgtggatgtgtatttggttctatttccttgtaaagtttctatatatatgctattttatgtactatttagtatgctgttaggaaaagaaatatactggctcaatacttgcgtggctaaacaaatattatctcactatcttgcgctgcgctcagctccctaaaaatccttgcattgaacttcgttttataattactggcaacatgctaaattttgccagtgcaactacacctagatgaattttataaacctggtagagttcgttttccataaggccttgttctaggtgtgatttacctctgctacctgttctggggttgccattaagtttacttctttgctgtgcagtatgggtcttgacctctccaaaggtatcattcgcaacaaccttgagtatggcgtgatagagccatcaatgagtaaagtgaagattattcaggttggttctcttgtttctttcccgtcatggtatttgtgatgtcagagttctatcccatcatctttttcgatcctattgcagtttgctacggaggctgccattacaatcctgaggattgacgacatgatcaagcttaccaaggaagagggtaacgaagaagagtaagcagcccacccgtaggagggtagtggactcttgtgtgatggttgtcatagcgtgtaacatttcttttaaatttttcgtttagcttttgctagctgtggcctgtgggcattcgtgtaggttgttgtaggaaaactggatgtgtatcagtgtatccctgtgggggtgacgatgactcacggatggatcaaattttgcgtatattgggggccaaaacagttctatttcaaggatttaagttgcaaaatggaatgtttcgtgtacttagcggcacatgcggtactctgaataaattcagtacaacgaaaatctgtgcctccttttggagaattcaggggtacagctgcttagaagcaagcgtagtagcatgttagatgcagacaaagcaaggcttctggcctcaaccgtgttataccgacaactgggcgaccatatacagggaacaaatgaaaatgtgtgtatacatcagtaattgacccagtgcctagcagcagcctgtaggtgctccagtaatctgaagatttcgtcggaactccgaagtcacctgaagattcatgtgtatggtaatctaaagtatactctctccgtcctgtaatgtagcttattttggcatccaaaatttgttctcaaatataagacattctagaagataaactagttttacattaaatattttttatttatcaactaatcatcgctaatcgtgttgatgatagtgtcttctaaggaaataaagtgaagcg

SEQ ID NO: 4562 - DNA, 3341 bp, Sorghum bicolor
ccagcttttggttcaatggctgtcccaggtttcagagaacatggagggctgttgccatcaccagctaatgtgccccctatgttgtccatccctctacgtaagcaccctcaccaatctgcaactgcaagggtaccttatggtccacgtctggctggaggctacaatagatcagggcaccgaggacttcgtaagaagcctgtgttgacaagtggtgaagcccctacagaaacaaacacgtctgcccccaaggttatgaaccctaatgccccggagtttgttccaggtcaatctcggagtcctaatggtcatccagcatctccaaatggtcctttatcatcaccaggtggtattccatcttcaccacaagaccttctatcatctccagatagtactgtggagtcaccagtaactccatccccacaagtttctgaatgtagccagattagtcctgaaggaaatgatgcatctagtggaataaatgttgagggtgggggtgtaaagcagaacgtggatgacacgaaccacacaaaaagtaaagatggtgaagtggagcctgatcaaaccaaagctcctgaagttacagaagaaggggcggcggtaaaagatgctactgaagagtcgattgcagccgagcagcccaaatcctgggctgactacagcgatggagaggctgaggtcgttgaggttgcaagctaaggaaaatacaaccttatcagatagccaacacattcagaaatttttactcgaacagatgagcatctcttcttctcaatagatgctgccgtttttttggatagaattaattgctttccagtggcactccgtgacctttggtatttggaattttgaagactttccagtacgtccaccgcccatgtttcatgctgctttttttttgctgcgaagaatcttgaggaagaagagcacctcaaagtatcagcaagagagatgcgtcgttaacgtttcgtcatttcctcatcttgcccgtgatttttgtccccttttcgaatgtactgtcgacttaacgtcttcatagttatttctttgttataaaatagactttttgaatcatgtataaaatataaagaaagtggtgttgtatttccacacttgcggttaatccgtccgagctgtatagcatcgagatcgaactaaagaaaggttcctattgaatttcgcttttaattctagctagtgctgatttactggcggctgctggctcatttgaatgattcctatcattcctgtgtttgtgagaaactgtgaaattgcatgagaataggagttctaattttttttttggaaattgacactgtagcactttcgtttgtatttgacaaatattatccaaacatggactaactaggcttaaaagattcatatcgtcaatttcgaccaaactgtgcaattagtttttattttcgtctatatttaatactcgatgcatgcgtctaaaaattcaatatgacgggaaatctgaaaaatgcaaaattttttaggaactgaacaaggtctaggaatcccatgcaattacggccttgtttagttccgaaaagatttcggatttcggtagcattttcatttttatttgacaaaaaatatccaatcatagattaactaggctcaaaagatttatttcgtaatttacaggcaaattgtgtaattattttttgctttcgtctatatctaatgctttatgcatatgtctaaaattcgatgtgacggagaattttgaaaagtttttggtttttggattgagttaaacaaggcctacacagcggagccacgaagggcactggatattccgcaggggtaactggcgcagttggagtagctgtctcgctgagaggtgggcccatgcatcgtgtgctgggactgaagtctgaaattgaagaggcacgttccgctcataaatttcaaaaatcagagcggcacgagcggggtaccagccgtccagcaaaaatcgcatcctcatccgccgccacaaaagctaggtcaggatggcggcggatccgagcaggcggcggccggtgcaccatccggcggtgagcgacgtcctgtcgacgctctccgaagccagcgccaccctcgccgacgtgcagcgccgcctcgaccttgagttcagcgccgcctaccctgaccatgtcagtgttctcgtcaccctcctccgtaaccgctcctcctttcctcgctgacgggatccgccggcggcggcggttgcaggcgaatccggcgaagctggtggcgcgggtgaagcgggtggtggaagaggtggccgtgctcaaggagatgagccgcgacctcctcaccgagaagcaggtagcctctttcccctatgttttcaccgatccgcgactgatctgctgccgatgctgacaaccatgctatttttttttaaaaaaaaatcggctcgacacttctgaaattctcgatattttgtatgtattgccatgtccgattatttttttttgtgctggtattgtacctttccgtctacccgcagaggctgatcgaccaaatccgcgtgagcttgatggcgcagcgcggcatgacgcagcggctgctcgccgcgtccgggctgcctcccttgtccgatgatgacgaggccgtcctcaacagcctcaacgaggtgatccaagaatgggctgctcatgtcagtcccatcccaagtggaagtaggcatttcccctcccttttgcgatcggataattgatagggaatcggagattcatggtgggctgtgaactgatgctgactcaactcgtcatggtcgcaggggagatcgaggacctggacaagaacgatgccaaccagatcctcttctcgactactatcatttagagagagagagaggttttcatgggaatgtggtccgtgaagaagctgcttcttgggttgcgatgctgttgggtgctctagctagcttgtttgctggtcaagcatgtggactgttggtagtttactgttttatgcctcaagcaaaactagtatgtaactgcaaaatttttcattagaaaatcaaacatgattgagggtgtcatcggcctaagtaataagctggatctggtagtgtcagaatgtgcataaagattgggccattgggatcaacgcatcaatgcagtactccctccgtccctttttaattgtcgcttgcgcttcccgaaaaacaactgctgacaattatatattaaaaagtattaatatttataatacataattagtatcattagaaagatctttgaatttagtttttaacaaatttatttggagatacaaatgttgcacgtattttctacaaatcgagtcaaacttatggcacgcacaccaacaacgtcaattaa

SEQ ID NO: 4563 - DNA, 6683 bp, Sorghum bicolor
cggcgcaagactccactggcatcatccctcacctatgcgggtgtcaaacataattagtactgggtaaatagtaaacatggtattgttgttggttgttgtttacatatataatactcaatccatctcaaattataaagatgtttaacttttttaacaccaaatttgaccactcattttattattatttttttgcaaagtatcactccttttattatgacttggtttattaataatggttcttcaaaaataacttgaatttgattatatttgtacaatttttcgagtaaaataaagatcaaatttgagataaaaaaatcaaacgtcttataatttagcagagagagagagagtactatggtcccttttgatttcttggtcaagctccgcctcttcccgttggtggcgtgacggagcgtgaccgcgagcgttgcgtcaggagcggccaggacgacgtatgtgatgaccgatgggagtgaggcctagtttagcgtgaacaaaaaatttcacgacactgtaacacttttatttgtttttgttaattattgtctaatcatatactaactagactcaaaaaaattgttttgtaaatttcgatcaaactgtgcaattagtttttattttcgtctatatttaatacttcatgtatgcgtttaaagatttgatataatggggaatgttgaaaaaaaataggttttgaagtgaaagtaaacaagtcctgagattgagcgtggtgaagctcgattgtttctgctcgtccatcgcgtttcagcttcaatcactaggttcgacaggactttaggtatggagcggattcgtgagatgtattttaggactttaggtacgaggttttgtttacttgactgaaaagacatagctgaaagtattatttgttgatttattgtgagagaaaaatattactaaatggttgacagattcgatatataagctttagcgaacgaagccacgcaaaacatgcccctagacgtacttcatcactaaataattgttgttttctgtaaaataactttaactaattttatatgaaaatatattaatagatatataattaatatcatttgatagatcgttgaatttattttcataataaatttatttgtatatataaatcttgcacgtaatttttataaatttagttcaatttatagtatgaaaactaaaaataacaattattttggggacaatgagagtagtattctgtgttcagatttaaaaaggagttaaaaaaaaagatgaaaaagggaagacaccacgccaagaaaaaagctttgacagtttccctggagtgaggtagcagtagcacgccaagaattaccgagtacttgcagagtacaggtcgtcgtatcgcttggttgcattgcacgacgcagaggatcactcacgcctgtaatcatcagttgtttgcttgtgcatgctcggggcccacttgtatttgccgccgccacctccattttgacccacgtatatcaatcagccatggatgagcccgtcccgtgccttctcgcagacattcccttgccactctccaaccccaaccacaggaaccaaaagctactaccagtccctcgcgttccaattccatgcaccatgccgtgaccgtgagcagtgccgttggagaagagacggaggggggagctggtgtggactgtagtggctgctgcgagcttgcttggtgtgggggtgggaaagagagagtgagagagtcagagacagaggtggcttggttcatctgcaacagtcgccatctctgcctgcttttcagctcctttgcttgctttccctgcacatctcttttgttttggcctccatctccatctccatctccatccatccaagccggccgcctccaactccctatcctcctcctcctccttttgctttcccacatctttgctccaataatgatggggtggtggtgggtttggtcgtgaccctgccgctgcatccccaccctcgccgctctctccctcgtccaaatccaccggccgcttgctttcctctcctctcccttccatcatccccggctcgccagtcgccaccccctccttttcctcttttcagctgcagttgagcagcagtaggttggttctgcttgccttcccctccccacatcccttttccttgctggggatcgggaggccttcatcaagccatctccattttcctccctgctgtccacatctcgctccttgtgcggggtggtgccggctggtggtgccgctactgctagctaggagcccaatttcttgataggattggtgcgtgccaaccacaggtttctcctgttggcttaatttgcttctcggctcagcggctgctggttctctgctctgctgggagcaccaactgcagcgtgttcttgcgccggtttggtttcttgccgtgaatcgatcgggtcgagattgagaggctctggctctctcccgttccgatgaggccagaggagagaaatgctgccgtggggagggtcagggaccagttccccgtcggcatgcgggttctcgccgtggacgacgaccccgtgtgcctcaaggtgcttgagaacctcctgcgccgctgtcagtatcgtggtaagaatttctgcgccacagcgcggcagcgctgtcattttcattctgtggcctgttagtatatctctggttcagtgtagtgtagttagatttctcttttcctggattttgccgaattatctgctttcagagtactctctccatcccaaattacaagtcactgcaagaatattggagagtcgaagtatctcacgtttgaccaaatttatatgataacataataacatttatgataccatataagtatcattaggttattcattagttatatttttatagtaatatatatttgatgttataaatctttctatttttttctgtaatgttggtcaaatttgaaatgctttgactctccaagatttttgaaatgacttataaattggaatgaaggaagtagatgctaaaaaaataaaataaaaatatgttgtttgtgtaattgtgttgtactagcttttataggtatatactatgtatgtacttgtcatgcataaattcttccgctgctacagatttgtttacatcaaatcaaatgatcaaaatagttaggccctgaattaatgacctcactatcaccatgtaactgtgaatgctgcattttttggagcttttactacaaaaagtagttacgtagtttctcatgcagtatgtacaaaatgcttattctggctttcactatagctactcacctgtaagacggattgtttcatatttgcagttacaacgacgaatcaggctgttgtcgccttgaggatgctgaggcaaaacagggacttgtttgatcttgttatcagtgatgtgcacatgccagacatggatggctttaagcttctggagcttgtggggctcgaaatggacctccctgtcattagtaagtccaaaatgctatatcttacttactggtgccggactctcactgttgtcgatagtaatatgcagcttttatttaatgataaaccatctgcaaagcatccatgccatacagcaaatcttaagcttgtattagaggaatgcaaaaactttgaatgctaaccagtcattatccatgcagtgttatcggtgaatggagagacaaaaactgtaatgaaggggataactcatggcgcctgtgactatctcttaaaacctgttcggctggaagagcttaggaatatctggcagcatgttgttaggaggaaattcagtaactgtgagcgtgctaacattgatggctatgaggagtgcaccaggccatcaaatgcagattttgatcatgtacacagccaaattacaggtgggacacctgaccaaagtgggaggtccagcaagaagaggaaggaatatcatagtgaagaggaagatgaaggagaagagagtaatggccaagagaacgatgatccttcagctccaaagaaaccaagggttgtttggtcagttgaactacaccgaaaatttgttgctgctgtcaatcagctaggaattgacagtgagtcccactgccacctgctgttcttttttcagctttgctgctgttaacttatttaccatcattctacaacctaatcatttctgttgatgcagaagctgtgccaaaaagaatacttgagctcatgaatgttgagagactcaccagggaaaatgttgcaagtcacctgcaggcaaggcgcttatggacttaaccccactttgttcagtttagccgcctcactaccctgattaagcaatacgtacatgttttaggcatattatacagtggggattcatgacaaaggcatatatttaataaagttctttggtttttgctgatcaatcttataaatgtggaagaaaggacacgtagtttgttccataactgtattttcagtttatcatgtaacattttgatttggactacatcttgcatacatagtgaagctgaaaaggactcagcaagcatatctttatgcacaattggccctcttgttactgtacatatccaatgccaaaacaaactaaattgtagctgaccatataaattgtttgctttgtgtgccatgcagaagtatagactctatcttaaacggctaagtgctgtggcatcgcaacaggctagcattgttgctgctttcggaggcaatgacccctttatgcggatgggtgcatttgaaggactccagggttatcaatcttttgcctcttcagcagctctgccatcttttactccacaggggttgttaaatagaaatagcccaacatcatttgcgctccaagggatgtctgcttccaggccaattcagattgcaagcaattccacaataagtcattccattagcgatccaaataaatatcaccttagcttaccaggtactagtagccgacaaggaaatctggcacaaggtttgactacttcagttgggcaggtccagctgccacaaaagtggatacatgaagaaactgatgatctatctactatcctttctgtgagtggccaggctaataatggtgtgcccggcacactccaaagtgtcacaaacagtcatttgctgcagcaaggcctcgttgaatgtagacaagacaaagttgttatccagccttgttcatctgcaagttcagatcgtcttgaaggcactgttggagtttcctccagtttgatggattcttgtgcatcccagcagaatgttgttccattgtctgccttttctatcagtgcatcgccaatgaatggctcgctttgcagtaacggcgtagctgagttgggtgctacatcctctgtaggtacaaatatttgcccctccaatgatctcagggtagcaagagacaacaatgtgggagctagctcttttggtagtgtgatacttttgtctccagacactgtgccaaaccaaaaatacttgaattttggtggtggaagcaatttgagacaaagcatggatggagggaacacagacaatctgttaaattccaagctaatatggagttgtttgccgacctctcaaccatcgaatcttgttggaagtcatcatcccatgagccaaagactgaataacggaaaccttggtggcacaatggttggacagactacagcagctgctccacagacgaggatcgacatgtttacctccggagacacaccaactccaaagagcgcgtcagatttgagcttccctaaggtccacagtgagcttagctctagcagctgcagcttcgatggcctcctaaactctataatcaaagtggtaaggaggctcttgcttcactactagtttgtgcagggttcgtcacttcgtcttctgacgaaaggactgagtacctacaaaccttttttttttctctccaacatttcatctaacagcagtgctgatccccgtgcaggagaaggacgatgcttccttcagcgatgaccttggatgcgacttctactccctgggtgcctgcatatgaccgccaccttccacatatctgcatctgcgttcatctctcattgtctgctgtgcaactagtgttaatcttaggtgaaattgtagctgtgcgcctatctatgctgctcacagccaagaaaatactgtaactactaggttgttctgtatgtaatgtgctagcagtaagatatctggattctcgaaggtaatgtccatttgctaaatcgagctggagttgatgcgaatttcgttagacatcagcagaggctatatcgtcagagccgcaacggttgaaacacgcagtgtaggaggtctaaatggcaaggccaactagtagatcgataaggctgaaatatgcagtggagtgaggtttcattgtttcaatgacgaggccaactagcaggccgattcaacgctagttgggaatccaaatccaaagagataataataaacggtaaaaggagagtatatatagtagattgataaaagatcgattgcgttgttggacacctcaatcaacaatgtaccctatattttatgtggagcaagggtgattttatcccattaaaaaccaatttggtacaatttgatatcttttttagagttttttttttgggattgagctaaatctggaatgggttgattctaaaacagcttgggtccaatttgagtgccaacacatcgatagcccagactgtttgagtaatgacacgtatttcat

SEQ ID NO: 4564 - DNA, 6572 bp, Sorghum bicolor
atctccaaccattatgtatttgaagttatgcattttaggcaaattgcaaacccccaaatgaaaatggcaaggctaaaatcgggtgatctccaaccgttatgcaaaatgccaagtccatcatctttttttttcggaaattttgtttcgcagcactccttcccgcgcggccaatcgatcccgcgccaaacagcccgccgtcgtctcccattcaccaattcccgcaccaaacagccgcgcagtaccgatcgtgagctgcgcagttcgtcgttcccgttcgcagtaccgatcgcagtaccgatctcccgttccgttagttcccgttcaccgtaccagttcgtcgtctgttggccatcagttcgtcgtacctggccgccaacagcaaaaccctagatatcgcattgatgaagaaggcgtacctggccggcgttgatgaggaaggcatcgtagatttgtcctatcgcgcgttgcgtcgtcctattgtgcgctgcttcgttcaaacgcacgcgcgaagctggcgaaggaggacgcgcgatgcttctcctatcgcgcgaagtggtggcggcgcgaagggaaaccgcgcgaagggaagaaaaaagcccgcgagtggaaccgagaatcccggatctctatttgcatagccggactcctttggcatatatgtcaagtttctccctccaaatgcatagctatgtaaaatgcaaagtccaaatgcataatgattggaggggctttttttggagttttatgcattttggtaaatgccaagtccatttgcataatggttggagttgctcagagttgttttatataggccttgtttagtttcaaaaaaattttgcaaaatttttagatttcctgtcacatcgaatctttagacgcatgcatgaaatattaaatatagacgaaaataaaaactaattacacagtttggtcggaattgacgagacgaatcttttgagcctagttagtccataattggaaaatatttgtcaaatacaaatgaaagtactacagtgttgattttccaaaaaaaaattagaactaaacaaggccagaagaaaccctttcaaatgagacccaatattatgtataaaaaaggtacaaataaattatcaaatttcatgtttaatcaattttatttaaaaacactaatatttatggtattaaaaaatatcactaatatttttttatatttcatttttgagatatagatatagatattactttttataaatatagttaaacttggaattgactgccaaaaaaaaatgagcatatgcattaagtcaaaggcttaaacttgaggggacacttaaaaaaacaaccagccgaattatattcggttcactcaaggtttagtttttttcacgtaaacttaatatttttgagagaaatagagagtttgcaaaatatgagcaaccaaagaaaaaatacatccaaataatccttccatcctaaaataagtgtacttttagcttttttagaggatataggaggggaaaagactcagtctattccacatccaaagcacaagaattcgaaggttttctcgatctgtgtaaaaagatcttcttgtgaagtcaaaaaccagagctatccatcaccgattgagtttttgttcaatattatttattgattaaatatttaacctattaaatatattttagtatgtgacgattgcattttaaaagtagataaagtaaaaaaaatactagaactaggtggatcatacttaggagtgtacttattttgatacaaatttgatttttttttgataaggatacaaatttgatttaaaatggtagaagtgtacgtatttaattgtgcacgcagggagggagtacacacaaaagagaggtgacactataataatataaaaaaggaaaataagtaaggtagtataagagaaaatgccaaaaaggaaaacgaaaaagaaacaagaactccacctgtccactcgcttcctcataaggacggagggaagaaacgaggccgcaaaactccgcgcgaacaacagccaaccacccactcacgttgcgacctgcgagctccacctccgcccgcccgcgcccggaataggcagtggcagcagcagccagccagccccgccccgccatcgtgggaggaagcccatgccgcgggggcagcagggggcagggtagaatgggcaacgtcacgtcgtcggtggcggcgcggctggccttcttcccgccggagccggcgacgtacggcatcgaggcccaggacggcgccggctccctgctgcggatgacgggggtgtcgccggacaccggcgtcgaggtgcgcgcgctgcccaccagggccggcacgcgcgtcgtctccgccttctggcgccaccccgccgcgcggctcacgctgctctactcccatggcaacgccgccgacctcggccagatgttcggcctcttcctcgagctccgcgcgcacctccgcgtcaacatcatgaggttggtgagctcaaaacatacgccgctctgccctcccctccattgcttctgctgctcgatcggttcctctaagatttttatttctccactaatattatttctacgcgagtagatttggatgcctgttcgttgtttgtacgccatcccattacgaagatacgtacatttattttgatcaatgtagggcatgttgcttttattccaaaggggagttcaattggattatcttctctgttcgcaacgagtcagccagttgctaattgattgtgaggagatctgattttgtccatgttattgaacaatctgtgaactcatgtagtcatgtgctctcgtttaattttccttttcctgaatagttcggtcagagctgcaagcctgcaaaagtacagctttagtgtctccgttgttttctgcatggcagttataagctgtcctgatctccttaccacgaatccgaggctaggaaaacaagttctttagttctttttccttatcatctatacttggagaaggcatgtggaatcccatgtctcatgaacagttccaattattgtactggtacatcgtttcacaagtctttgttctgttgctgataaatgctgcaccgggtcctggtgtacctccaccattcttgccttcagaaatttcagttagttaccggccaccactacgacacaagatcagaatttgtatgctcaaaagcctcgaagtgtgccctaattatgttgtgtatatgcgaaactgcgaacccaggatcaattttgtgcctcttatcggtatgactctgtaaaagttgagatttgcagagtaaagcaaagagtaccatgtcctttgttcttgttctagcccattgtttctggccatccatagaaaacaaccaggatatatctgctaattttgcatcaaattcaagtttaactttctagtgatctagtcgatacctacaaagtttttccacaccagaaaagttgctatctggatttgatgggatgctttggtgaattttctttacaacaataaaaatattactattatgttggattgcttgccgacattttcttcaataattgttacattgactaaagttgtttcctctgttttattttcagctatgattattcaggctatggtgcctctacaggaaaagtaagtctcttaaatctaagtgattttaagggtagacgtgtggttctcttgttgcttgaatttgacgttaagttgtcctggattaaattgtcggtttgtcatgacgtatagtcaccaattttttattttttttcccttgaacagtcaccaattcctttttctcttgagaccatgatgtctcctgtatatgatcgtgccacactgttagggatgacgcctactagattggactgttccctatccttttagcactatgtttttcaatagatctatgggcaccgtttgtcatagcaaggaattattgaacacgctaccaaggtcaggactttggcaaatatctggttagcctctttcaattttcacctacaccatcaatactccccaaggaagcggggaacgactgaccattgctttcttgatctagaccatgatggcacctttgctctggtagccatactttttacaaaatttttgaactaagggaccatcagcttaggtaatcatgcctactcaagaactttcttggactatgaagaataatgttgcatgtgtacttgctcccataagtcgcacatagatttatgaactaacgaacacttcgatttagaaaataataaatgatggtaggcacgttgctgtctatgtactgtgcacctagctgtatccattttccaggttgtatgtaatgcagatgcagactaactgagttccctttgtggtctaacacagccatcagagtacaacacatacaatgacatagaggctgtttatgattgcttgaaaaaggagtatgggatagaagaagaggatttaatcctgtatgggcaatcagttggaagtggaccaacattgcatttagcctcgcgtttggagaagttaagaggggttgtccttcacagtggtatactctctggcatacgggttctgtatccagtgaaagtgacactttggttcgacatcttcaaggtgagtttgcaccataatttgataatttaccttctgctccagaaaagcatttattttgatatcctaatctggttaacttccatatattttacagaacatcgacaaaataaagcaggttgcctgtcctgtgttagtcatacatgtgagtaggcttctaacctcgttttcataatctgaaatcatctaactttttccttcactgtggttgcattctgcgtatctgaattagtattatcgagatgcatcatacaattgtatgattttgttccatttagaaacaaaattatgaaaagatgtaaccacaaatatttgactaatctgtctctcagcaacttattgacctcaagcatttttcttgcatattggtgtttcctgtgtctgttttgacttgcaaatgtatgtccaggaaccaggtttctgcttcatagaacttacaatcgcttgcatttgtgcgtgctgcaatgatcatctaattcaaatgtctgtccaatctattaatcctttgatttagacacctctcgtaccagtcaggaactgtatatgcatgcatgcccctatatatgatccctactctgaaccatgatacatttaatccatttcccaagtattattttcaaatgtgcattgctgaacaatgtctcctgcctgatgaatgaactaacgaacgaccaacaatgtcgcccagaccaaaagttctcagattctcagttaccaccaccaccaagtagtttctactgtttgtgcatatcttgatcgactttgtgaaccgacaaccgtatatccatatatggcagggaacagcggatgacatcgtggacttcactcacggcaagcgcctgtgggagctagccaaggagaagtacgagccgctgtggatcaaaggcggtgggcactgcaacctggagacgtacccggagtacatcaggcacctgcgcaagttcataaacgctatggagaagctggccaaggacagcaaggcggcccaggcgccgccatcgtcgagcttggcggcggaagcaagacactccaagtgcttgagattcgggaagaggtgaggccggcgggcgaggccgcgggtctcggccgtctttagctgtgtacaggcccagtcactaaccctgctgcattgcattgatgctgctcttgtcgtgtgcaagtcgaagaagagatagcacaggtcgtcaatgaggaaggcaggcaggcggatggatggatggatggatggggtttcctgttctgcaaatgccgacgacctgggaaggaaatgcagcacagcagcagcagcaaccctagttcatgtatgatgcctgtgagttgagttcagagtagccagagctgtggctgctgcagtgtgctggagatgaggagatgcctttgttttcctagtggacgccacggattagcctgtttgtagctctcttttttttttgctttttcttgttgattttggttacctgtattgtagtcactgtgcaaaagaattcgttgtgattgacgattggttgttgcaacaaaatgaagtgcgctgtgacttgtgagagagactgacgagtgacgaccatcatggatgcatgtccatgtccttgtccctcggtttgagtacgtaggctgcaggctgtgctgaggtttgtcctgggctcagaaagctagcccagttgcgtgctgaccggccccatctcgcgcgcgcctctgggccgtgatggaagagagcgtcgttgggctcccatggtttgggccgctggtgagaggaaggaatcacctgtctctcccttccctggtgctgctctgctcgagctctctccgcatgctggcagacgacgacgcagatctccatgcatgctatatgcttgtgtgcaggctgcttgcagttgcagcagggcaggcaggcacgctgctagaggctgcagcttctgctagccggcagccagatagcatgtccatgcggacagggattcggtgacttgccttgagcaagtcacggcgtaacttacc

SEQ ID NO: 4565 - DNA, 7032 bp, Sorghum bicolor
cactaatactcaataaaatctgatttgtgttgacacaaagataattaataattcattttattttctataggaagataaggacagacttgtactagttagaggtagaagagtgttgtctgaaattatcttaaaattcgagcacttaaaatataggagaaatgtttcaaaattagcttagttttcgctgatataggttgccatctaacttttatatatcactctggtcttctagcttgtgggattcatgtgagggtatagccaaaaaggtgaaaacaccaaccatgagacttgtacataactaatgtgccatagaccaaccatgttatatgacacacatagaccaatcatgctcataacggatctttctaatgttgagcatgttccataaaaaccatcattgtggaactgagcatggtatatatatgctacgcctttccaaactctatatttttacacgtatgagagttgtgagtgctacacatcgaggtgatgatcaaggtggtcaaatatatttttgaaaccaaaaaatattggcatgtggactaatgaagtaatgtgtcacacgttattcctttttagggtgagtcacgccttgttaatttgcttgaaatggcaggtgatgcttttatttattattactgagttcactcgtcgatgggtggcaaacttattgttcattttattggtgacttaaagtttatcctaagttaaactattataagtttaatatagtttatataacatgtagattaatatgcatcataagcgagtcaagctattataatttttttatagtttatatttaaaaataatttaaaaaatgcatcataagctagaagtcattctattataagtttggtcaatgtagccgtgcaatgagttatatgtaaaagggacaagagacaaataaataaatatttggagttcataccttgtttttgcaaacatatacaatgaacaaactattaatccgtatgcccatttttattttgcactcatcgtaaaaactaaaccaatcaatgttagactaacaatttcccatagaccgcttgttttatgtgccagaagagcaaaatgccaattggagaaactaaatactaagagtcaaatagatgataaaagcacatcatattattagaccacaccaataaaagaatacaaatataagaacctaataagatacataaatactaaaatcacctgtagaatgatacatgcatttattataatattaaagcatgtactacctccattccaaactataagtcgtttcactttttctggagagtcaaagcatatcaaaattgaccaaactattggaataaatacaaggatttataatatcaaatagctatactatgataatataatctgctcgtatgagttagaatcgactccgacatagtggagcgtcacaaaagtcaattcaagataaatgttgtagggcattgaaattgtagtctgcagacatataacatatacttatggttgcatcacatgtacatatgtttgccactattattccttttttagcgaaggtctcgttttgttagcacttactctctccatctacaataaataactttatatacatttgccagcagattaagcacgctgacaaagaacgcatatactctcattttctttcctttgtgtagagcatatcgcctgaatttggtacttagcatttacatgcaccataactagcttccacattagaagacaatctaatatagaatgatatatttttttgacaaattttaaatatcatataaagctatttattttggaacgggaggaagttgcaaccaatgaaggttcaagcttccatagaggcccacaatctcgaagccagcccagcccatgaatagcaggcctgtttaagcctccccttcctccgccaaccgcccaaccctagcggcgagcagctcccctcctcccgccaaaagctccgccgttttcccgccaaacccctcctctattacccccttcccgccacacccgaccccgtcccgtcgccgtcatcccagtccacgcccacgccaacgcacccgcatccctctctcgcctccgccgcaacgatgtcgggctgggacgagggcgccgtgttctatagcgaccaggcgcagttcccccgcggcggccccggcggcgacccagccgccgacctcacccgccactccgccctccgcaagttcaaggagttcctcagaggcttcaccggccccaccggcgacttcccctaccggtgcgccccccatcactctcccccctccccatagatttgacgcgtccactgcgaaacagagctgattcatgtgttcatttggttcagtgagagcctagtacacaaccgcgaccatgtcaccgtcgccatcgaggacctcgacgccttcgatgccgagctctctgacaggatccgcaagtcgccggccgattatcttccgctggtacgttgtttttcagagttttcgttacctgtctgggctgtggacttgtaattgactctcgcacatgggtccgtgtagtttgagacggctgcggccgaggttctcgcaagcctccgttcgaaggtcgccggcgagaccggggagatggaggagcccgtcacgggagatgtccagatcttcctctcctccaaggagaactgcctgtccatgagatctgttggggtcagtagcgaagcaatcctaaaagggatttcggtgttttgtgcattctagagaattcatgtcggtattgctctttgaaatgtcaggctgattacatgtcgaagctggttaagattgcgggaatcacaattgctgcatcgagagtaaaagccaaggccactcatgtaactcttatctgcaagaattgccggagtgtgaggacagtgccttgcaggccaggcctcggcggggctattgttccacgttcttgtgaccatgttcctcaggtacattcctcagcaatctactcaactgtcagcagcatactgaccaccctccaaaaaagaaacatttttaattattcctctgacttgaaacccaagctagtaggtccaatagaaaaactttgataaagattgtttgacatcacggctacaaataacatccaaagcctagcccaaattaatcttcacatataacaggaaagaacatctgaacagacttgttgtgagtctgtattatccttgtcgttaaatggttattttctgacagttatgtatatgatttcttacccttagcctggagaagagccctgccccctggacccttggattgccgtcccggataagagcaagtatgtggatctccagaccctcaaactgcaggagaatcctgaggttagttgctattcatccttgatgcaagttgctgagtcaaagcaatcatgctcgtgtcttgtaaaatgactgataatgatatccttttggccaggatgttccaactggtgagcttccaaggaatgtgcttctttctgtagataggcacctagttcagactattgttccagggactagattaactgttgttggcatctacagcgtctaccaagcatccgcaacgtatgatgaaatctaaagcttttcacttaatctgaacttgggcaagtacatgattaataatgccactgagaccattttgcagccagaagggcgctgttggtgttaaacagccttacattagagttgtgggtttggagcaatctcgagacaataactcaaatggcccctcaaacttcactctcgatgaggtggtttcttttttcaaggtttacattgataagggagatacatttatctgtaaggctgattttttcttgctgtcttgtaggaaatggaattcaaagaatttgcacagagaccagatgcatatgccaagctttgctcaatgattggtccttcaatttatggtcattctgatgtcaagaaagctattgcatgcttgttatttgggggatctaagaaggtatgcattcttagcaagaagctgatatgtgttcataaaaaaaatgccattccatttgtcctaattgtgttcccatgctgtgcttcaaactactcttattgcagaggctacctgatggtgtacgtttgagaggggatattcatgtcttgcttctgggtgatccatccacagcaaaatcacaggcaagtattgtttggtgttgtcatagcatttagtttgatggaaaatagtgtggcaacaagactcatctgtcataacttgtgattttgatgtgaattgtactgtaattcagtttgagtaattcgacactattctacatgaattctttttggctatttaataccaaaggtctctgattcagtgacactaatgtgtctttcaacagttcctcaaatttgtagagaagactgcacctattgcagtctatacatctggcaaaggatcatctgcagctggtcttacagcatctgtaactcgggatggtagctcggtaagtttgtttcactgaactgtttgctgtttactgaagtttggttatcataggctgtaaacatttcttttttttctacagcgtgagttttatttggaaggaggagccatggtactggctgatggtggagtagtctgtatcgatgaatttgacaagatgagacctgaagacaggtatgcatcaatttatgcatttggtggaactataataaacatatcacatattttccttttctggtctgtactctcgaaagcacattaacccagcccccattttcttatgcaattccagagttgcaattcatgaggccatggagcagcagacaatatctattgccaaagctggcattacaacagttctcaattcaaggacttcagttcttgcagctgccaatccaattgcaggacgctatgatgatcttaaggttggtaaacatgttctttactgactcattaagtataagctgttctagcaatacatgcaagacaattaatttaacaatttttaatattttgctgctcatcagactgcacaagataatattgatctgcagacgaccattctttctagatttgatctaatctttatcgtcaaagatatcagaatgtatgatcaagataaggtatgaagcaaaatcctttctacagcttttctattctagcagctgagactaagcgcaacttcaaaatacagcgaatagcaagccacattatcaaggtgcatgccagtggtgctgcagcttcttccacaggcacagaggcaagtgatggagagaattggctgaaaaggtgtgacctgcgtcttgtgtttctataaatttgactttgtttcattgtcttctaatgcataaaaccttttatgtataggtacattgagtactgccgtgccacatgcagaccacggctttcagaaaaagcagctgagatgctgcagaacaaatatattgagattagacaggtatgcagcggatattattcacacaattagctggtttaggattcttcattcatttgtatttatcttaaaattcattgcacagaaaatgaggcagcaagctcatgagacagggagggcagcagcgatacccatcactgtgaggcagcttgaagccatcatacgtttgagtgaatctcttgcaaagatgagattgtaagtactagatgatcacatgctatatgttttaatgacattgatcacatgctgcataaattctgcctcaagtgctgtggctgtaactctcgctttttgattgcattcatggctgatgtttgaatgactcttaggacaagtgtggctacaccagaacatgtcgaagaggcattcagactgtttaatgtctccaccgttgatgctgcaagatccggaatcaacgagcatttgaacctgtcaccggagattgctaatgaaatcaaggttagcctctgcagcccagagtacaaaattcagctcttgaaccttgcatttttctcaacctcttgcattttgtcctgacagcaagcggaagcacaaataaagagaagaatgggcattggaagccacatatctgagcgacggctgattgatgaactaaataggatgggaatgaatgaatccattgtacgaaccttttgtatcttaaacctgaactagttaatggcttttaagttagaaccattcatttttctaataatgtcttcaaactttgtttcaggtcagaagagcccttctgatcatgcatcaaagagatgaggtggagtacaagcgagagcgccacgtgattgtccgaaaggcttgaggtgcagagtccagtcagattcatgggtggcagacaacataaattgaaggcgtccttcctcttcagacgtgtgtataccttcactgaaactgcacctctgtccagaggacgaggcacgccttagttgatctctgacatgactgttgtaacctgcaaacgaatggatgcaacttgttgcttcgtggaaatgaagctgtgtagctgtaccgcagtagtttgttactgcctgtgatcttaaaccatctagtgtgtgagcattgtttcggaagtaaccaaaggttctgaacctgcattgtgctgtgtaaactcgtcaatcaattctgaaatgcgaaatatgttgtctgcatcaccaggagtgtaggacagacaatgtgtggagtttagtagtaataatcatacatgctttcaccaagacacgctgtggcctgtgggcattcacagggaggaagtggtgattgctacaacgacgcgccatgaattcaggaagagtttacaggagcaacttacaaggagggaggaggacagttagaaatcttcccggtgtaaatgaaaatacgaacgaatctttacaaataatatgtgtgtgtatgtatgtgtctaatccaaaagaaacctgagtttgagtttacacggtgtagctctgattaatggtgtcaatgtcgaggcccttgagcttgacgacggattcgacgtggcccttgagcgtgtgcagctccctgagcctggccacctcggcgcgcttggcggcctggtcggcgagctcggacagctctcggtagccctggttgtcgccgaagaggtcggaggtggcggtg

SEQ ID NO: 4566 - DNA, 3022 bp, Sorghum bicolor
gcgataacctcagatggccttttgtcagtagcggttgggtgcaagagtctatctactttccatcttgttgactgcattaaggtagacagcgtcgagtggctggagtaccttggcagagctggatcagtggttgaacttgtggtgaaggattgcaagggaatcagccagtttgacctcctaaagtttggtccaggatggatgaagcttgagaagtttgagtttgagatcaatggcaattattggttatcagggcctccccctgatcctgcgtctgatgctcgctacccctacaaatatgatatctgctgtgagaacttgaaggatttgaggttggcacatattataactatgcgcagcgacgatgagggtctcccagcaccaactgcgcaagagattggactccgttttcttttgagaaagtgcaaagcattagagaaactttgtctggactatgttgttggtctagatgaggacgagatgattgctttgttccagaactgcagcaaccttagaagcctttcacttcgcctcatgcctctgcaccaacgggactggcatttcaggacaccactgactgatgaaagccttaaggcccttggtctcagctgccctatgcttgaggttgttgagctgacctttacgttttgttcgagtgggtatccaacagaaataggcttcacacagaaaggtattgttgcactcattcagacttgtccaattcgtgctttcatgctgaatggagcgaacatgttttttgactcggggttggagggtatttcatcggcgccattcctggagcaacttgagcttttggattgcaaggggataacagatgctgggatgagtttcatcgcgcatgccccgcgcttgagtagtctcaccctccggaaatgccaagatgtgactgataatggaatagccaagctggcacattcagcgaaactggagtctctgaccgttgtaggttgccatcagatctcccgggaaggtgttcagggggctgccagattagttcgctactcagctgattctgaaagccatgatagtctcaaaggaatgaaactcacaggcaaaccaaccgcaccgcctgttctggaaacctttgcagcttagcctgtctggaaacacttgcagcttaaaggggtggaagttgaagaaaagacatgatatcggaatggaatggaattattattacctatatgcttctttccatttcttatataatataataatagctttaggttcggaactgtactattatataatataatagctttaggttcggtaatcggtgatttattcggattatttccttctcactgtatctattgcaaatgtaaatgagaatatatttgttagaaggaattttatgttgcttttccttttgtttcattacacgatgcattttctgttgggtgcttttcatgattatgatgttccattatcccccttagaagtatacatagtttgttttgctgttaactgaaacccattttgattggttgtttagcttcgtttcaacaaattcattgaatcatttagcaatttcttaataacaggttcaacccaagtacccaacagcgtttcatacaattgaccgaagccctacgcctggactctctgctcatgcggaggtgcctgtaaatatcatctccgtccgtcgggtcgggcctttccttttggcagcccacagaattgcggcggatagggaattcgaggatagctactccaaccagactccgccatactatgctgctgctgctcctcaaagttatcttatctgccatccctgtccccgtcactgcaccgtcaacaaaacgactgctgccctgccgcggcagccaaagcaaaccgaagcgattgctactcctatttaacagacggagcgcggggcagaggaaacgagtgaatactactaccgccaccattgctagtaacgtgcagagagagagagacacacacacacagcagcgcaggcgacgacgacagggatcggaatcatggacgacggtggcgactggatcacggcgaggtacctcctctcgtcgattcttgggcggaacccgctggtggtggactacgtcgacgaggagtccttccccgtcgacgaccctcctagtcctagtccctcctccccctcttgcgcccgccgcgcggagccgccgccgccgccggtgcgggcgcccgcgggggtggccgggacggtctgcgcggtgtgcacggaggagatcgccgcggcggacgccgtcgtgcgcctgccctgcgcgcactggtaccaccacggctgcatcgcgccctggctcgggatccggcccacctgccccatgtgccgcgccgagctgccgccgagcgaacccgaggccggcggggaaggcgcggggcgtgccaagccggcggcgcccgctcggggtgttgccgccgcggggaccagcaccggtgcgaccgcgaccgcggccgcgcgcgtgcggcgggaagcgtcgcacgagtacctcgccgtcgccggcggcgtgttgtccggctgatcccatcgatggccgcgtccaccggccggccgccgagtagatagattaggcgcgtggaccgagtcgtgtgaactcagagctcctcttgtataaagcaaattgggtataaaaaagaaaaagaggatatttcgacccaaattattgtcttgtcatttgccctgttctggaatgataatcgcgtgtttcgtattgaaatttggaaggagttaaatgctacaaagtttaaccaaccattattcaaattgcatcaatataattaaattcaaaatacctccactttttagtgggtcttatttagctttccatgacttttagctgatcagatttcgagtcggatagcgagtgacagaccaacttttgttcaagtctcaaggaataacttgtcaaaaaaaaagtctcaaggaatagtagtgtagtactgtagtagtacaacaagtaaacaaagcgacaacccaacgaaccggttgctggtgccgcgttttgcgccatcacgtacgttg

SEQ ID NO: 4567 - DNA, 4928 bp, Sorghum bicolor
atctataaatcaatttttttttgaggcagttgtatttcaagctgcctctacaaatcattgcctagaaatcacaaatttagaccccaccaagtagtcacatgtcacgcaatttttcacgtgcttctcggccgtgggggcacaaataacccacaaattcaagcctcgcgcgctccttccataaccatttcacctataagatacttgtgtccatttgagatatccctcattttatctttattcaattttgaaaaaaaagtatttgagatcctaaataaattcaaatgaaaaagttgtcaactataaagttctataacttttcgagaccgacaactttggtcgtttctctatctaaggtctaaagccgctacaaaattttgatttcaaatatgagaaatttaaacgtaatttttctcgcatagctgatttcaaatgaaaaggatgttaactaaaaagttgcataatctttgagatctacaaattttgttctagtcgtcgtttgaaaaatttattgtacaactcatatttttagatacggctctatttctagcttcctctagaaatcgatttgatgtggctggaaatagagccacctctacaaatagagacatttaaaattgattttgaaagagccgcttctaaaaatcgatttgtagtgacagctaaaaatagagccgcttgtataaataaatttctagagacacttcggttgacatctgtctagaggtggctggaaattgagccacctctagaaaaaagctcagttcggttgacatctgtctagaggtggctggaaattgagccacctctagaaaaaaagctcctgtgttactgaaaatcaattttgtagcagcaatatgcccttgagggttagcaaccctgtttgcatggtggaagattgagagtagccagctgagaaggatcagcaagcatgtgtgccaaatgtgtttcaattttgtagcagtgatatgccccttgaggattagcaaccctgtttgcatgatgaaagctagattgaggttagccagctgggtaggatcagcaagcatgcatgtatgccaaatgtgttctctagtgacagtgccatatatgctgctgttggctggacatacaatctataccacatcgtttgtatgtacacatcaagtggtggggcagcagcaagctagtttctctttctccagccaacaacacaagtttcttgcgaggctgggtctcctcctctcatctccctctcctcgatcggtcccttctcttctagagctccaccacttcttcctcctccttccccgcccacacacctatcggcggctgtcactcgatcgagttcgtgctgcgcaagcatcgcatcggcgaatgcgacaggcgcgcacgcacgcacgcgtcccctcctctcctagcctctccctcccgatctccggccccgccgctgcccctgcccctgcctgcgtccggcgcgcggcgacagcgacgtcaatcaaggaccaacagtgcgcctcatcgatctctccctctctctccgccgtatatagctgtagaccgatatgatggaaccatgtagcagcttagctctcgccgccgaccccggcgggggtcgccgatcgtcgtcttctcccttattagcttctcatcctgctcctgcatcgtacgtacacatcggtcgatcactcgagatccgatagatcacaccgacggcgtacgtcggccgagctagctataggtagccataggtaccaagctattgatagccagcctcacgcccggcctcctctctactagcttctccgtcctcaatctcggccccggccccggcccggtagtactagactagtaccagcaccaccctccgatctccgtcgtccggccctttgttgttgcttgcttccctacacttcttgtttaattccattctctatatatctatgaatctatatacatataatgattaaatagtcctggcaccaagctatatatatactcccatccttcctaccagccagaggccacacaaactcatccggctacagcaagcaacatcaaccatatagcagtagtagtagatgtgtgcagtgcagccaattccttcttactcctcgatctcatctgtcccctctctctctcatcactccccccttcttctcttcttcagatcaacgtgctgcagcctgcatatataggttcatttgtctcatccatatagttcgtcgttcttcgagctccaatatacagattgcatacaaaattaagttaggaggagaaggaattgaagatacacatatatataggtagctagacaggaaataaggcagcaggtagtagtagctggagcaggagatagccatggggctgagggacatcgagctgacgctgccgccggggttccggttctaccccagcgacgaggagctggtgtgccactacctgcacggcaaggtggccaacgagcggctcgccggcgccggtgcagccatggtggaggtggatctgcacacccacgagccgtgggaactccctggtacgtagttattggttcattccttgtcagttaattgacttgtttagtgcctctctccctctccctctctagcaagcaagctgctgccttctactagatgcctgctgggctggctaattaactcaattccgtgttatggaatgagtaattaggcacgcaacctctgtttattggttcagccttattaatccttgtttgttttgttcttgtttgtttattagttattgtaagaagatgctgctcatgcatgatcatatcaattcttcacgcatatttatgatcgtctctgagacgtagctagcagctagcttacgttaatctcattccaacagtgtttcttacttctaatacaagtcagcttgatcctagctatagcttcgacatcgataatccagaagggggctaatactactaatattggatccagtccttggatccacgtgtgcaattcgaggctttttttagggaaattcgaggctaaattaacaccgaatgctaaagattatcatgtgattgcttcttagctttgaggaaaagagaagctagcaaaagaaactgcggctgctgcttctaattcctatatatcagcaattttccctttcaatatacttccccctctctaatttggtttgcatctaatcaaaactacaaaattcccagccctgtttaagctatatgtcacaactgataaattgctctatatatttgaagttgtttttactgactgatgaatccatgcaattatattgcagacgttgcgaagctgagcacgaacgagtggtacttcttcagcttccgcgaccgcaagtacgcgacggggctgcgcaccaaccgcgccaccaagtccggctactggaaggccaccggtaaggaccgcgtcatccacaaccccagggccggcggccaccaccaccaccgcgccatcgtcggcatgcgcaagaccctcgtcttctaccgcggccgcgcacccaacggcatcaagaccagctgggtgatgcatgaattccggatggagaatccccacaccccgcccaaggaggactgggttctgtgcagggttttctataagaagaaggccgacgccatggactacgccatggccgacagcgagcaggacgtcggcatgcatatgcctcgcggcggcgctgactcgagcagctattcgcctcctccgttccccgcgctcggcggcagccacttccaccaccatcatctgacaccgctgacagaccaccacggcggcggctgcctgaacaacgaattccccggcatggcggcgctgctgcagcacaacaacggcatgttcgaccctcacgtcgtccagcctcaccttcacgacagtgtcgtccttgctgggccgccggctgctgcagcggcggcggggtcaacaagggacggcggcgagcagtgtggcagcggggtgctcatggacctaggactcgacgagcactacacctacaacagctacaacagcctgctgcagatgtgaaagtatatatggatatatcagtgtgctgcaagctagctagctggctgcgttacgttgctaatgaccatgcagcttcgatctcgtcatctgattttattattcatcgttcgtgatctctctgtgcagatcgattctctgtttgtgcatgtgtgctgcactcgtacgtgtagttaatctacatatcagtagtgctgtcaattgtagtgtttgatttaaattgctggattgatcgatcattataggccgtggttgagggtgctgtgactaatgtacatacatatatttgtttgtggatcagtttcagttgctgggaaaggttggaacctttttgttgttgtttttacatatcagtaagtatatgttattgccctgtaaaccatatatataattcagaattaacactgtatatactactttctccattagtaactatatatataagttctctccaaatgcttgccaatcaataaacatgtatagctttgacagcaatcaaatataaaaagttagatatatatatgtaagatcgttgttgttattaaaattattgcgaatatatatacacacacaaagggcatgcaagtgaaggttattctctctccccgtgccaatttgtattagacctatatttgttttcggaggggcatgcagtatatagtttgccatacatgtgatcagctaccctgcatctgtcatctggtagcagtttgagacgacagtgacaacgacgatgtctaaaaaaaataactgtcttgtagataccagcagcgctagcacttttctgttttgcacgcacgcgtccacgcgtgagtgaatgatttgatgtcaacatgcgtaaaaatctagctgacagcagggcaatgcaaagcaggatggttacgtacgttaataaacatggtgatgatacctactatctgccaaaaccag

SEQ ID NO: 4568 - DNA, 2689 bp, Sorghum bicolor
tctcgggaggaaaagtcgccaagtccaggagaggggtgaagaaacataaatatgtgaatcttgaccacccctaaatttaatcatcacaaaggctaggacttggccctaacgcaacaacaacagctgcaacacgcacacatttaacaacgaattattgctatctatgaagcaatggtacaacagaccggagcactatgaaattatgggatgccccaggggaactgttgacgaataggtgatattctgtcatttacagagtcgcaaacaagcattcttcccttctctcggatgcccgctttcttccttcccactatttccttttaccaccaccgagggacagaagctccaggctgcggtggagtggctcgtcgcgggagcctctcgcaactgcagcccgtgaaagggaggtagcccttgactcgcctggcgatggattaactctctgggtgctagatggacgactgccactgttgctagagaacaatctgcttgtccggttatactgctcacttggttccacagatgaggctggcctgctgcttgatgcaacagctctacgggatgcactgcctgtacgtgaggatgtacgtggtctctccacagtcctttccccagaccggtcagtgctatgcatctggagaaatgggtaatgcatgattaaagcacatgagatatgtgaggactgcacgaggaaagacacaacagcattgaattgaatgttcatagaccatacaagaggcgaagggaagtttaacttacaatttcctttaatgacatagatacggtctcacgtggccgttgtgcataattgtcactcggattcacagaaccactaggattccttctaccggacgcttctcctgcacaaaaaatcatgctcaaacatgtttccgattggtatcatagatttgttacacaatttttcaagagcaggacaaacctggggtcttctcaatcttatccattgagggtccagcagctccactagttctttcccctgcctaaacaattacaaacagatgaataataagtccaacaaactacaaaatgtacatcagacagaaacacaagacgattgcataccctcatccgcgggttggagcttatctgaggatacttcaaaatggtccagtcaaacacgtagtcaaactggtatcctgcattattaacacaattagaaatacaaattacaagatgtcctagtagaaaataccaaaagaataagcatgcgcactaaaattataccttcccggataaagagatcgcggaatagtctcttcaggtaagaataatcaggcttgtcttcaaaccgcaacgaacgacagtagtggaaataggagataaactctgatggatacgatttgcagagtacctaacccataataaacaatttatgaatgtctgcctactgcagttattataaaacagaattagcaagagtgaatttatgagccacctcgacaggagtaagcatctttttctcactgattttgtcatatttctgcttcttggttcctgctttcagcccctgccatggtaggctgttcaaagacaaaaacaccaatgaaatgttaaaaccattcacagaaccatgtgcggaaccaaccgaaccattacaacagacaggtgaaaagattgttgaccaactaacctgcccctaaggaagtacataagaacataaccaagagattctaaatcatctctcctgctttgctctgcacccaagtaaattgtgaggctatgcaaaattaaactcaactaattagtcagatgaaaccagaaactcaccaacgccaaggtgggtattgacacttgcatatcgtgcagttccagtgaggttcttgttctctctgcatattgaaatgagcatcccatcatcataaaactacaagaacagtgccttggcattgtaccattgtgcatgactgcacataacttcatacattttttttgaagaaaattcaacatgttgcatttactaagtgtatttagcaacccagatgagtaatgttaaccaacctgtatgggatgtgcttatgagtttgaaggtccctatatttcttcgcaagtccatagtctattatatatacctgccacaaaagccagtaagatcaacaataattagaccaagagatctcatttccatagggaggtgttttctggaatataacatattggcagctacatagttaaagaaaccatccagcattagccaaagataaagaaataaattatagttagcagactataaaatacaagcacgccaaggaaatcatcgtcgaatgtaaccaaatcactagtgcaggatcttttgggcttctcaattgcagcacaagcaaagcaagaggcggaatgtatgtaaaaacctttggttcaaatataatgagttggacagcgagaattaagcatatgtataggatcagacctgattggctttcctaccaagccccataaggaaattatcaggctttatatcacgatgaagaaaccccttttgatgcatgtactcaacccgattaatctgaaaggtaaataaggaatgtgttaacactagcaattcacagagttaagacaaagaggacagccctatgcacaactaactgagatttaagttaagaaacaaattgagacagtttggaaaatctgggattcagtgttcaccatttgatcagcaagcatgagcacagtc

SEQ ID NO: 4569 - DNA, 7172 bp, Sorghum bicolor
ttgctcagcggcagacagcgcgggtgaccccaaagcttcacggggcgccctgcttagtttagctggctgggactgtgattatgcagtaaacagactggccatgagttgtttgccgccggattagtagtttatcaaagtgtgacgtgtccttgctttagttcaggggaagtgtgcatggcttcaggcaggcagcatgcatccctctctctctctctctctctctctctctctggaaaggaaggctgttgctgcgccatgatacaatgctgtgaatgcggtcctagtggcatctcttcatgacttcatgtcttatgatgatgatgatgatgataggtttagcttacctgctgacaatgccaagtacagtaacgagtttgtgggctgatttagttacgaaaaggaaagaagggccttagaatccagcgacatggatggggtatagggcctgttgttcttttagaattccagagcatcgtgcatgccctatccgttacattcatcaggcacataaattaagcgtttcggcattcagggacatcgaagttcagctcaaatttaggatccaacatctgtttggattattgccagttgtttggatggatgggggaggggatcctagccggccggtctctacgaccattatgtgaactatgcttacggccttcccctcttgatgtgtgagagctaggtaggtatgtgaatctctcgctcatggattagtattgccatgctattgagagatgatttttagtgcaacttggttggatttttgtgcaatatccgattttcaggtctcttttcctttttttttctcaatctcatcaaaatctcccctctctccttcgaatgcactcactggcatgtgggccccatgttgcaccgcaccacgcacgagcaccacgacaatgcggcaacattaatagaccgcatatgggctgagcgcctaggctttgtcaccgccatgtgtttggctgggcacgtgggttggccgccactgctctgctcacgagtgcttacatttttctcaatcaccactgtttcgctgcgctaggcgtgcgggttggctaccgcgagtccactcgctaccacgagagagggagaggatgctgcgatagaggaagaagaaagaaagagagagagccactgacctatgattctcacatgacaataaatggaaagggaaggattgttttgttaatctgttgcagagcatctccactatctcctttgattttgttttctcaatctcctatatcaaaattttaggaaaatgagattctgaatttagtggagaggatgcaaggactgattaggatgctgtaaggagtgattagggcctgcgagtaggagacctcaagcaaagtgaagctgggattgctccctaatgggctgcgtcgtccggttaattggactttaatttaatcgatattcttttaattatgctagtagttggtgtgtcatgcgcatccagtgtattaaagttaacggacttggcagagcagtgcatgcgtgttttcaaaatactgtactccagactagctgaaattaatttcaaatttgcagcatctaaatgccaattactcctacttcttagtttagattaactacacaagttcttactaacacggatcgcaattatacagcgaccgcaccccgccccgcgcgcaccacaggcctcgtgatcccccaccgtctccatcctcgcgcgggcgccgcggcggcccgatccacctcctccctcctccagcttcaaaacaaaaagggtccaaaccaggctaccgttacagctgcacggcccaacggctactcccatttcaaatcccttccccttctccccgtcgtccctctactctccacagccctccctcctccatctctctccacgggcttccgcgaaccctagagctcgcccgtcagcggagtacgggctcactggttgatccccagatcgcaccccgcctcccgaaaccctagctgggctgatcctgatccccccaccgatggcgccgcagcccactccgcctccgcgtccggcgccggcgccgacgccgacgcctcaggccgcggccgcgacgaaccccaggacgcccgcggccaagcaccgcctccacttccccgccgccaccccgaggaacgccaacaacggcggcggcggcggcgccacggagcatccggtcgaggtgatcggccgcatccggaacctcgcctcggggaccgcgtccgcgctggagattgcgagcggcgggacggccgtgcgcgtgcgcggcgacgcgggcggttgccgcgacttcacccttgacggcgtctccgtgtccgaggaggaggacctcgaggggttctaccgccgcttcgtgcgctccaggatccagggcgtccgggtcggggccaagtgcaccgtcatggtctacgggcccacggggtccgggaagagccacaccatgttcggctgcaccaaccccaagcagcccgggatcgtgtaccgcgcgctcagggacatccttgagggaggaggcggcggcgaaggcgattccgctgaggatgacgccgggtttgacgccggcctcttcgtccaggtcgcggtgctggagatctacaacgaggagatctacgatttgctcgcgggaagcggggccactgctaaaggaaacgcccccaaggtgatttacgctggttattgtcacatggcacgctctctagtctgctgattatgtgcttgcaaaatttcaactgtgatgtgttgcaaatgtgaattcttattgcctcgtaccccaaggtgatttacgctggttattgtcacatggcacgctctctagtctgctgattatgtgcttgcaaaatttcaactgtgatgtgttgcaaatgtgaattcttattgcctcgtactagtatactttattaggaattcactcaagaatttgtgtttttgagtgcgatatagtgaatctaagctggaataggtactgtgattttaaccctgacagaccaaaacattttgcattaggtgctatacttggtactactagtagtattttcttgggattcagctggcaagtcacacgaactgataatgaagtgctcataagacatataacatgaattaaacagaaaagaccttaaagtgtcatatatacttttcatgtgctgtgatttattctgttgcttatgttgctgtaaatgtgagttcctatgtgaccagtatttcagatcattaactacggaccgagaaggtgggtaccatcttcttgttcttttgcgtatgcgttttgtgtgggtttcttgtcattcgatcattgtgatttgtaaatatggttaactataagctcaatattaggtcattgtgattgttaaataagttaatgcgctttctaacccgagttaaacaatgcaggagttttatccaccaaaaacagattgtcatatggcctgaaattgtaatgttttattgggattgtagctcgaacatcctaggtcttaattaagaagtgctgacgagttataataatttagaaatgtgggagcaaatctcatgattaccaatgttgccatttgttgttcttggtcactgtcactgtaaatttatgaattgatgtaaatcagtgtatcattgaagcctcacagttctgtatctatgcacaggcgagactggaagtaatggggaaaaaggcaaagaacgcaacttatatatctggaaatgaagctgggaagatatcaagagaagttgctaaggtggaaaagcgaagaactgtgaagagcacactttgcaatgagagaagttcgcgaagccattgcatggtttgttgcattcagccaccagcactttgagcattcattttttttagaccaatcttttacgagctatgctttgcatctatagattatcctggatgtcccatctgtgggaggaaggttaatgcttgtggacatggctggatcggaaaacatagaagcagcaggacaaacaggatttgaagccaaaatgcaggtgtgttatgcaactgattactgtatgtgtgtagcatctatgtgttccaaacttccaattgcactctgaacaatgactttcaagtagttgctctgtgtatttaatagatagtttgcacaatggctttcaagtaattgtattctgaacaaaagcctataatattttattacatgtgcggtctataatgttgcccatgtttccacagacggcaaaaattaaccaagggaacactgctttgaagcgagtggttgaatccattgctaatggtgattcccatgttccatttagggatagcaagctcacaatgctactacaggtacactactaaaaaaattacatttattgatacaggcatacagcctctcctcctctctgacaatgatctaaatataccctttattgtatttcactatttcaggactcattcgaggatgacaaatccaaaatcctgatgattctgtgcgccagtcctgacccaaaggaattgcacaagacagtttctactttggaatatggtgccaaggcaaagtgtattatccgtgctgctcatgccgcaacacctagggacaaaatgagctctgaggagtcatctgcaatgctcaattctagaattgttgcgatgaaccagttcatccacaagcttcaaaaggagaacaaacttagggagaaagagcgcaatgaggcccagaatgtgctaaagctgaaggaagaggagctagcacaactgagagcaaagctcaagctgatagaagggcaagaaatggaggaaatctggtcattgaggagtgaactcgcgaagatggaagaagcgatgcgtaagcagcagcaagagctcactgcactaagacatcaactgcatgaggttgagcgtgaaaaggctgatggttctcagctagtgcagcaggattcttttggaggtagattgctggcacggctatcagagatgcctgcaggccttgatcaatcaatggcaatgtccatgtctatggacttggatacaggagatcagccagccatgcaagacgtcaaggtaataaaggaggatcctcaccagcagggccacatacggaatcaaacagccacagcagcaagtgcttgcacagggtctgcggtgcaagaagatgatgtcaggctgtccgggtatcctgaaaagactgtcctcagcactgtgtttgaggagggagacgaagatgatgcagagaaggaatgtggtcttcaagaggaggtacgcaaggaggttgtagaggagaactttaagatggacacaacacaacatacactttctgagccagacgatcctgcaacaaggaagcatcggattgagaacatattcaggctatgtggcaattatcgtgaaatagctaagaaaccaaaggtccagtcaccagcaaaggaaatgttctggaatgagaacaagtctccagcgaagcaagtgtttggggatcagaacaaatcattggcaaaccaaacttttggagatgaaaacaaggagccgtcggcatggggagctatagagaaccccatgtgcgacgtcagagtgactgacagcccagtgtcttctcaactttctccaatcgtatgccaagttgtggatgcaccattatcggatcaactgaatacatgcagtgcagcggaagagagtgatccgaagaaggagaacagccttgctggacagaaggatggcggcctcttggaagtttacataaaatgggagtctggcagcctgatcaaagggctgaaggtactgcacaactcatgcctttcagatctgaggaagctcatagaggctcactttgaagaagtaggcagcaaacagcagcagcatcagttcaccttccttctcctcggggtacgtcactcctctctatccatgccacgctttcacccaagtgttctgtgctacctgtttctcatcacaatggcgctcatttgtcaccatatactaccttggggaaatgaaaccccgcaacaataaagaaatgaacatcttgccaacgattttgaaataaaaaaggtagcctatttatttgaacttgtgtttatcattctggaagaaaatccgatttttgcaaacaactcattgataagagaattgcataaatgcactgataatagcctgcttatataaatcacaacgaaagtactgacaatagcgcaaaattggtggttgattgatgcaggacccgtccggtgctcccgtgtccagggacaaggaagcttcggtgcagataagcaggctgcctcactggaacaaccagccggacagctacctggcgtgcctgcgcgcggccaagaagccggctgtggacaacatgcccttcagcccactggacagcaagctgaacacggttttgaaggacgcccacctcgccggtgcgatgtcacccaaggtcaaccagatgagctcgcccaaggtcaaccagatgagtcccaactacatccgggagctgagagcttgagctcccgtggcatcttttacagtctgtcgtggccatatgactggtgtatcttcttctatgtatgatcgatcgactatgttctatgtaagattgattgctagtctggtttctttagccggaacggaactactaccacccatgaccaagatagttgtaatttcaactatgagatggcatcgctcagatgccaccacctatctatcttgtgtgagaaattgccacagtcaactgaagtatcttcgccttgtatccaattttaacctgtctgctatttccttttcttctctggccgcgactttggtcgttggactggttggagagctggaggcgtggggctctgctctgatctgtagtactctagtctgtacacttgtacaggacgcagggggcgaggcgagcccgtggttgttgacgcccagtgccaatccccaatcatgacttcatgagccctggccgtgctttgccagtttgcccaggcacgggtcaggatgttatcaaatctgtccctcctgttatctcgttgttaacttttttggttccactagtgtgattttgctctcgtcttttgaaaaaaaaaaagaatctaagccctctcttccaagctcagttttgaatattttagtccttgcattgcaaatctattcacattccatttcagtaacacataaacctcattactctgcaaatgcactaacacggttttaaagtctgactgaggatgatctgcattc

SEQ ID NO: 4570 - DNA, 4977 bp, Sorghum bicolor
tccttcaactttaactgtggatcaaggtactttgttttaaattaaaataggtgcatgaattttcaaaaccatacaaaactaagttgcccaattcatttccatattacactcaggtcaatggtcaatgcgcggcgtctgtctcgacatactaaggtggaggtacagtagggagttccacaatattgaaggcgacaatggcgaggtttccatcaacccttatgaagacgtcagtcgtgaaggctggccttattgtcctgggtatattaagattagaccttagacccaaggaagaagtggtctgatgagccccttgtttgagccatggtgggctgtggtgggcgggttgttcgaggttggggctaatgcttgaatggtaacgtccgcggacgtcgcttcatccttgaaggcatcctcttcgtgcctcttcttctactttgccttgttgttatttgtggatgaaaacctttgcatgttggtttagcatcgtcaatgtctttggtgtcgtctccttcctaaagttttcgctagccttctctagttatgccgtccaactcttgctcgactatgatggtgcatttgtgctacaagtggctgtgttggtggtgctctacatcttatgttagtggtgtcgttatggctctagttgtcagccagttgttggtgttgttgagttgctagttgggtcctttttttgactaagttgaggtgctagttggatctagatgggcgcgtttgaccaaattgactcaagggcgtgtttggatccagagactaaagtttagtccttgtcacataggctgtcagattttaattagtagaactagacatgagctaaatatagaactaattacagaagtgatggttaaattacactaattagacttaatagattcatatcataaaatagtcacaatttgtgtaattagtttgtaactagtctatttttaatactattagtagccaaattaacatccgatgcaacaaggactaaactttagccgaaccaaacacccaccttagtggtttttgtccggtgatttaaggtcatagtttgagaactcctgttaaaataaatggcaaaattccatacccttaatagtaggtgggccctcaagtaaaaaggatacaacctgagatttaagggcacctattggactatttatgtgtgtgcgtgtgtgtttgccaatgcccagcaaaaaactaatggtgtgttcgaggttcttgagacaaagaactgcatttttgtacagattcaccaccatgcaataaggccttgtttagtttcgaaaagtgaaaagttttcggtactgtagcactttttttttgtttatgacaaatattattcaatcatgggctaactaggatcaaaagattcgtctcgtgatttacagctaaactgtgtaattaatttttgttttcgtctatatttaatgtttcatgcatgtgccacaagattcgatgtgacggagaatcttgaaaattttttggttttcaggatgaactaaacaaggcctaagccttgcattgcattgcttagcagcgaggcatgacgacatcgcaagaactccaacgggttaaattagctctatctccagacgtacgtgttctcaggacgtgaggagggcggccatttcggcgtccacggccgtgaaccggaacgtgatgagagtagctcgccgaccacggccgccacgcgttctcctgtatcagctaggatctgacgatcgagttgcttgccaggcaagctactcatcatccccttcctcaagacctgaatatttttttcgttccccgccttggaatcgggctatgggaattcctttgggtctccaacgcgtctcggcgtcgtcgtcgcgcgcgttccaaaagccgtgggcagagcttggaagcccgcatgccaatttcaactataaatccatgcattcgatgcatcccgcgaggccacgctctcaccccaaccgaaatcgacccaaagcggaaggaactactcgcgatcatcgatggagacgacagtggcggcaccgggcgcctccgccagctgcgagagcgagatcacgcgactgccggaggacctcctgttggcgtcgctcgcgcgcgccgggccggtggccgcctgccgcgccgccgctgtctgccaagccttccacgcagcggccgacaccgacgcgctctgggcctgcttcctgccccacgacctccctccgttcgctgacaaggagctctccccaccaccgccgtccaagaaggagctgttcatgcggctctccgacggccccgtcctcctcgccgacggcctcacggtacgcaactgagtccgcggagagcttctattcgcatatatacggagtacacatattcatatatatatgtactagttttgctctctggttcgttctggccggagccatcagctgatcgattgctagctctgcttgtgtggtgtggtgggtgcagagcatgtgcctgcacagggagacaggtgccctgtgctacatgctgtccgcaaggaagctgagcatcgctttggctgacagttttcgtactccggcccactgtcgctggatccccatcaccggttcctgcaggtttcctatatatgatctccctcacatgttggatcgtcattttttttgaacaatcttcgattgatgtgattcatgcatggatcagagccaattgagttcttgattgcaaattactcaatcttatcccgtgttaatttatgacagattctcagaagctgttgaactccgacattaccggtggttggaaataggtgccaagattgacagcatgatgctctcccaacacacaacatatgctgcttatattgtgtacaaagtagaagagaataggtggcatgaacggtttactagcatttttggggcatcaaagtttcctaaagaaagacatgatggttggatggagggggagatgggcgggttccataatgatgaaggtgaagacggtgaggtttccatcagctttaggacgttgccatatgcgaagattggtcttgttgctctgggtattgagattagacctaagggcctcctctccacatcgatcgccggcaagcgtgtggctatttggccagccttccgcgccccatgtcatctcccattgcttgctgatggggaggtccttcaacccctggcgtccatgaaggcgttgttcttgcggctcttggacggccccgtcctcctagccgatggcctcacggtatgtgactttgcttctgcatgtatctattagttttatgtggtagatgattctaggacaatcagctctcaacctgatgcgtgtggtgtctgtagagctcgtggcttgacaaggagaccggtggcatatgctacatgttgtccgcgaggaagctcagcattgcgtggggtgataatccgacctattggcactggattcctatcaccggcttcaggttggctatatatctcgctcgcacagtcatatatatgttagcttgccaaatctgaaattttgatgcatatatgattagtgagcatttagttattagtcctttagttccggaatgataaatgtagcttgtcgaatgaaaatcaatatatagttttaggacataaaagttgtataaatatatttgcattcaaattgtttctgaaatggtattgattcttttacaaacgacgacatgttgtaagcgaaattatgagtcaaaaatcctattttgtatgacttttctttaataaattgcacttattattctagggcagaagcaattatagttgagctatatatacctctagtaagcatgtcaaatgatgcggcgctggtggactaagaacatgttagtgtactttgttcagtaacaatggagtagtttggttggtgtcattgaatcatactgttcatgagtttgttctagccaattattttagacattttagatccacacaaaaagtagtctgagaagcttgaaagatgccacgttagggagaatcaattgtttgcatctattgctctagttcttaatgacatattttaaccttggttagtttatggcagattctcagaagcggctgaactccagaaggctaagtggttggaaatacgtggcaacattgacagcaagatgctctcccaacacacaacatacagtgcttacattgtgtacatgatatctatcgactactacgggcttcgagccttaaagacattcgttagcctcggaggaaggaataagtcaacgggccacgtttgtcttgttgatggctataactactcggaacattggcaagtgatgcgagagtatcttcctgaagacacacactttcctcaagacagaggtggtggcgggatgatggaggcggagctaggtgagttccacattagtgaaggcgacaatggtgaggtttccatcagtcttatggatacgttcagctctaagtgtggtcttgttgtcatgggcattgagattagacccaagaaacaaggggtttgatgagaagtatcttgtttatgcgggtaaataatggattgagaaatcaactctgtaaattttttattattcgcaagggtgtggtgtggtgtggtgtggagctagctcatcacatgattgccgaggttaagaactgtaccggaagtctagaactaaggtgttttcattattctcgtgtacatatatatgttttgtctcgcagaaaaaaaaaacgaatatatggtccataagttattcattttgcaattagatgtctactatcagtgttttccacatttttctttcaacatttccataccagctctagagccgccgctcctggtggcagtggatcagtgaccgccgagccgaaacaaatggggatttgatcggcaaaacggacgtgtgggtgcacggaaacggaaaatgggccttctcggtaatgcctgctgcctggcactgttcatttgttgaagaattacagcggcagccgctgcaaagaagcagaagccatgaggcccaat

SEQ ID NO: 4571 - DNA, 4212 bp, Sorghum bicolor
ttgcatgcaatgcctccccgtgcgtgctgccagtagtaatgtctgcacgtcgcagcaggggtcaggctgtgtgtgtattaaaaaatcgcagcgtgccaggcaggctgcattgaacccatgccaaccactcctctgaattcgaattgaaaatttttcaccgctaccgtcgtagcttcgagtcaagttttcaccgcgctgtaaataaaagacaaaaaaaaggggagaagatgagtgatgaagggctctgacagcgccagcttgcctgcagggaagcgagctgaacaagaacggcgagctgtacgtcatcaggaaacctgacctgaggaccaagatcgtcgacggcaccagcctggccgccgccgccgtgctgcacatgatccctcggggcaccgccgacgtgctcctcctgggagacgccggcgccaagatggcggccgtgctggcgtcggcgctctgcgaacgcgggattcaggtactacatacctgcctcctgttgttgccatgcattgtgttaacactgctgccatcacaaacgttgttggattatcctgctgtcggatttgtttatgaacgagaaccctctaattaatttttggtgtaaatgacgcttgcaggttcagatggtggacagggacctgtacgagtctctgaagcaggaggtgcgcccagagacgcacaagcatcttcttctcctttctgactggagccgcagccgcagcagcagcagcaaggtctggctcgtcggcgacaagctgacggacgaggagcagaggagggcgcagggcggcgtccacttcgtgccctactcgcagttccctcccgacgccgtccgcggcgactgcgtctaccacagcacgccggcgctggttgtcccggacgccttcgagaacctccacgcctgcgaggtactgtacgtgacacatcgtcttttgcctgcctgatcgcgaatgcgctgacgggttgtctgtcgcatgcacattgcagaactggctgccgcggagggtgatgagcgcgtggcgcgcggcgggcatcgtgcacgcgctccagggctgggacgaccacgagtgcggcgccagggtcaccggcgtcgacaaggcatggcgcgccgcgctcgcgcacggcttccgcccctacgaccgccatcacaccgcgggtggcgccagcaagtgaccatcaaggaatattgaattgggtggacggactacgattctcgtgtgcatggcttggcttgtctgtgacgctcatctactactggtggcataatgcgtgcgtggttgttctgtgttgctttcttctgctggaaatgcgtaacattcctattcctattattatgatgaagaaaaaaaaatactctggcagacgattgaaaatgccttttttttcaaggaagaaggcaaaaaaaaaacgattgaaatgaaaatttcatctttgacgccatggtccataccagggtgaattccggttcacggccggcccaattacagttgggccaggcccggcaaggcggcaacgactgacttgtctgtgactgagcccttacctgccggccctggtaaaatccaaaccgttggttcgcaacggagcgctcccagattcagagcgcacgggcgggacggacacacaccgcgcacgtggcttgcccgaactgccagttctcgtccccctagctggtactggtggtagctttgaccatcctccgtcccttccgcctggggaagacgacgatcacggccatccttcgagagcggacggcacagatgaccaccacgtctccaaccaaattcgacacgctccccggagttggggccccacggcgtgagcgaacagcgaagccgatagagagatccccccaactgtctgtcttccgacagaacgaacggcccagatcgccccgcctcggcctcgccttttccactccacatccccgtgcgcggacgcgacgcgagccatcccgagggagggaccggtccggagcagcgaacgaatcgacccggctcgtgatgccgtcgcggcagcgccgacgcggcgacctcgccgtcgcggctgcgctgctggcgacggtggcgctggcggccggggccgacggcggcgcggagttcgattaccggaagctctcggggatcatcatcccggggttcgcgtccacgcagctgcgcgcgtggtcggtcctcgactgcccctactcgcccttcgacttcaacccccttgattccgtctggctcgacaccgccaaggttccaaaccactgagctgcatcacctcgcctcgcctcgcctgcccatctagtagtgatatgatatttctgattactgctctgctagtgctgctcgttactgctgtcgttccaggattagtagcgtggccatttggctctcttaatcggttttgctttagctgtttgttagcttcgcatagattatatatgctctcatacgctttagggatgtgagcagcatacataattgtcaggtctccatacttctttttccctttttagtgaatcatctatctattaatagatttggggactggagcagtttttgttgggataaacttgtactggaccggagtatcttatctctggatgtgagtgccatgaaaagggatacccaacagaaacaactaactttagaacacctttggtttgtcgggtactccagtaggtgcaaagccaccaactacttgagcagctttggtcagtttttgctaggaacaattcactgcttgactgtctgtaatgccagtatgcctccatgaatagccatgtgtttgtcatcacatgacaatgccttgttcgtcccaaactaggccagagtaaggcttagcaacgattgcattatctaaaatggaaaacatgtgcggcctatagaggctaaatttgctccatttctatgcttaagtatccagatctactggttttcatacgtccagtttgctgcagcttttctctgcagtgaattgctggcttaaatgcatgctgcttgaaccctataatcagacagaccatccggaatgcaagtcaaggcctgatagtggtctttctgcaattacagagttggaccctggttatattacaggtaaacttatggcttactctcttttcttagcactgacctcgcaagttctagccatgagttacatatctgttacatgataatttgtagcttatatcataagtcaggttacttaatgctgagtgaaaagaagttcattctagacaacatttttgcaagttttgagctgaagtggctgaaacgataacaaaaagaatgtgtttttttacacgagatcaccagactaatgccataggtggtacaacaatgtattatcaagaaagaatcatgtttgttctttgttcatgtgcgagctgaagaatgtggaataatttgtgcaagtacggttatctgtagctcattcacatgtttctttctttcaaaataatctatgttcatcaatttgcaaatggcaactccccatatttgctttgacattggcattgtgttttacacttcaggaatagtcctgttagacagggtgcattcagtactcatatttgttagtgcattataaagccacccatctcattcattcatgaagagaaagggaagggaaaaacaccttacactgacatcattttattgggcaaggtttcaggtcctctctcttcagtatggaaagaatgggtcaaatggtgtgtagagtttggcattgaagctaatgcaattattgctgttccatatgattggagactgcccccatcaatgcttgaggagcgagatctgtattttcacaaattaaagtttgtaacacttacctcaacttgttatgaagcaaccaaattccatgcagctgatagggtctagatcttttggtgtttccaaagtagatacctagattacagtcatttatattgttttagttaccttgcatttcttatatcagcattgccataacttctgaactgaatatgtgatatgatactgtctttgttggcttcgtcaatttaaaagttggcaatccaatctctggaataattgttagtgttacaagtaaaacatggtgtgttgcatttcatgcgtttgcagcctgcaggtgaccaattgctaaacgatatgctttggcctgtgaattttagttttgtcatatcttgtggttagttttattcaagcaaatacgattttccaaaacaatggcaaacaaatcatgctgaga

SEQ ID NO: 4572 - DNA, 3993 bp, Sorghum bicolor
agcatgtgtggataatctttatgcaaatgtaagtgacattttaaatttatatcaaaattaccacttatgttattattaaaattgaaagtgaaatatcacctcaagacacattgtggccatcatgttcggtctcattggtgctatgttacagtatttttttttgtcctggagatgctgaaaaattgtccctaagggcacatgtctccatatgtatcaaccattggatgtacatgggggcaaaaacaacgtttatgatggttgtgttgtacggtcattagactactcgaagagaataatgactcatcactagggtcagtcagtaggctatgggcaccaagggtgaggcttggaggggggagtagtgtatgcgtggaagcgtgcaccaaagcagatttggttgtctatattgcacaacagacaattttgcaatgatatgtatactttttggggttcagaggttattctatgcatggggcagacaattagcaatgatatatgtacttcattacaagtcttctaatataaaaattcttagacagctagtgtgtacttgtagtgtaacaggggatgagttaaaaaatagccttatacatatagaattaatagactgttaagttaaaacttaaaaaaagggatgatttgttttttgctagaaaaatcaaagtattaaccgactacctcattttgttggactgaatggcttatgctagttgttgactgaaatatacaactgctagcaaaaatatatagctcaagcctgcatttaagttatcaacgtagctgttttaaaaagatatttgaataaccataaactatgtctatatatattgtcatataactattaaacacgaaccattagctctcatatatggcatggattaatggactaatttataaaacaatcaataatttagattcatacctacactacacatacttataattactagatcatattggtatttttagtcaaaaactatatagcagtctacacttgtcctcttccttttatctcttttggagttttggtttagcctatcctattacatgaggttctcaatcatgacctatttttttctcattcgatcaggctatgaacctgtttggttcgcttgctccttgcctcaccttgcttagctgtaggaaatgggaaaaaaatagctgtttgattaagaggctagcttgtctttgagacttgtgctagcaagaaataccttgctgtcatgggagagccaatctggctagctccagccatcaagataaggctgaccctaccctcgctagcaaggaaaaataatccttgtctcaaccaaatataccctatatcttatatgaaattagttgttttctatttatcgctcgtatcttgttagatatgaatgccatcacaagaatggtttagttgactcaccatgaaaatgaccactctaccccatgcaacgcaagggcgtgcactattaagaggctgaatagatgctagggcaaaaaaagaaaggtagggtaaaagtgaaggcgacaaatacatgggagtatgggatccactcctaaagtggagaagtgacatggcaccgcgttcaacaaaactatgatttaaccgttccagggtagtcaataaacaattttaataatattgaaggaccataaacatcttctgttttattttattcgacggtagaaaagtgaatttaataatatagagagagcataaacccattatttgggcctgaaaattcggactatgagaaaagtgaatctacgtgtttctagtggagaaattcggactatgagagagcagtgaggaatgccaagaggaccttttctatccaaaataatggaaagaaaacaaatgggcctaatctgttatttgggcctggaaacccattgctctgaagcccactgacgactagtatcattaggaagcccacgtaatagagtgaggaggaaggcaacgaaaaccctcctcccccgctttgcccccaaaccccagtcaccagctaccaatggcggccaccgcgatggaccacgacggcggtgggggcgacgtggtcacaccaggggagctcctcggcaactccttaactctcgcggccggacgcggcgcctacgccgacggccgctccgtgcgcgcgtcggtcaccgggcgccgccgcatcgtgccgcccgcacctggctccgacgaccaggtagggctagtttggcagggtttcggaatcccttttattggtgcgtgtgatgagctgctttgattgggctgcagagatccacggtggaggtggtggggcacaaggcccatggagctgtgccgcagccgggaagtgtcgtcatcgcccgagtaagatgctaaaattcctcatcaataatgggcatcatctggtttacagaattgcaatttatacttgtttctgtgaaaacactcaatggccatgctcgtgtgaaattccgattgccacacgcatcccctggttcaggttggtggtggggtgatgcatgtgtctgacagtctaagctgtcacagtggtatttttcaggcatctttgctgaaggaagtcttcgaacatagtttagtgcgtcattttatttgaaagtaggagtagaagtttgtaaatctctgattcctgaaaggtgttactttggcaggtaacaaaggttatggctagaatggcctctgcagatatcatgtgtgttgactcaaaggctatcaaagaaaagttcactggcatgataaggtggtgccttccccataattttgttttgccttgtgttgcttccatcttctactgtttccagttgatgtcctgcactacatttgctttagttgcttgctgaattctattcttggattcatgctgttgttcatcttagagatttaggcaacctatcagggaaaatttctcatgtatgtcctttgttttacttgcaggcagcaagatgttcgtgcaactgaaattgacaaggttgatatgtaccagtcatatcggcctggggacattgttaaagctatggttgtatccttaattaggcaaatgatgcagtacaaataataatctgtgttttcttctcttgttatcaaccttggttaggttcacttgcccttgggttatccacatctacctgcttcaactgttgttatttttttaatctttaaacttttgctttaaatatctttcctgtttggagtagttaatatttttgtctgtctttggatccttaaatgatgccaaagctttcccttggtgatgcaagggcatattacctttccacggcgaagaatgaacttggagtcgtttcagcacaaagtatagctggtaggaaagggtgcaaaaggcaatttgtttgtatgaatacatggaactgctcccattattctagattttgttaatgttgctgcccatgtgcttcttcaggtggcacattggtcccaatcagttggactgagatgcaatgtgacttgactggtcaaattgagcaaaggaaagttgcgaaggtggaatagatgtgctggccttcctgacaaatggtaagcatgttagtaacttatcttagattgagttttcccttgtgtgggatatatgtacttctatctgcatgtactatgtaaatggtgatgatttgttgcatcatgacttatgctactctatactgctgtagaaatttgactacctttgttgtcattcacagtcgaatgctcgtctgccttgccatttggtctcattcactcatttctcacagatttctttgttctcacattacaggtggtgatggtgtacaaaatgtggaccagtgacaccaggtccttgggcgtactactgattcttcgatgtccaacttcattacagctgattgagcatgattttaaaaacccgggctgaatttaactagacagttcacaatgaatcatagacatggatcctgtaatccaacaaccttgtgatctgaatcatcgccttgggtcctgtaatccaacaaccttgtgatttgtaactcgtgagctaa

SEQ ID NO: 4573 - DNA, 11074 bp, Sorghum bicolor
tccacttgataagcttccattggttcaaacattatgctattttattatggttttttagcaacatcactctctttattttaataggaggattattcattcgcttgttttataagttgtactttttctgctagttagcagtatttttctctcataataaatcagtgaataatattttcagtcataacttttcagacaaacgaatatactatgtacaaacaccgtcagatggattcaagaaccacacatgccagcatgggtcgagctacacaggctattgtataagcatcggtgtttagtccgtatgctcatggacaaactcgacactactaaaagttgtctctaggctaatttattacgtgataacatgaagctatatatagcatatatatagatgtcacttgcaacaatttaatttggtccatcagagctgtcgattaattaagagaataaagtcgtggaacaataatactcacatgtgctttgctttgtatcatatttagccattgcaaatagcatgacatcaccggcatccaatttaatttcaatatattggctactctatttcaaatataatttctcttgttcaacctcgaggtttaatatatcataaagtggcgatttaaacaaacaatggtctgatgggcactactacgagcaatgaaacactaggaacaaatacaaattacatccaaacaactctaaatccagcaccaatagacacattgtattttcatgtttttttttctgatttaaaataatttagttatggatttttaggaaatatacaaaatatattatttttagaaaatataaaacaacatttgaagctagctagatggccaaatttgtcttgattcagtggataaaaatttccgtttataattgtatagccaaaagtaaactacggtaagatttggatggtaaaaaaatatagaatgaattctatttctccccaatggtttctcatgacaaaacatgtccattcaagtttcagctttgtgaatcaacaattagcatggacaaaatggcgtttgcgtatctacctagtccatttagaaggaaaaagtttttcccgtgaaaaatctcaataaccttatgtatagttattaaaaccaccgtatacactagaatacgtttcctataattttaacaatttaatctagaccgcataatgtgtatacgtcgatgtcaattatagctgtccaactagctgtacacaagaattctactcgtagccgattagtaaccttaattatctaatctgattaacaaagactacctactagcaggcgagtacagtccatgtaaaagctgcaaataaactaccgctacacacatatcattagccttcttcgttcactagcttataaaacaatacacgaattgttagttgggcttgtttggcatctttttgcctctagctttattggctcctagttcaattctaaaagaagagacaaaaacaatattatagtatgatgtaccccctccatctcaaattataagtcattcttatcataaatttgaccaaatttatatgataaaataattattattatgataccaactaagtatcattaaatttgtctttagttatattttcatagtatactcactttacgttacaaatcttagtatttctctttataattttggtcaaacttgaaaatactttgactctcaaagattcttagaatgacttataatttggaatggagggagtaaaatatttttaaaaactagagtcatgatatgtgggaaattcttctagacggggtctaaatttgaccagtcactacaaaagtagcattagcaggtagtcatcgaattaactataatcctagtcaaaataaagccatttccaaaccgctaaacgcgcgcctataaaaccgccgtcctccaaacccccgcacggccacaccgtacctcgcttcctctcccttcccctccgacgcttcgatcgcctccggccctccgctccgcaccccaaacaagccctcatgccggcgggtgagatggcaatgcccgccgcggtggcgcggttgcgggagctggcgccggcgccaggggcggaggtggagctggagctcgacgccgccggcgcggccgcgctagccgagtgctgcgcggggctcctccgcgctgctggcggcggcggcggagacaccgacgccggggccacacgcgtggcgctcgaggcgctctgcgctgcaggcgtagggggagcgatgcgtcgccatgccgacgggctcgcgccgctagtcgtcgcgcgcctcggcgacggacacgcggctgtgcgggaggccgcaaggaggtacctcgtgctgctcatggaggtatcgcatcgcagacccctgctttcgattctgttcgctccttggagtcgattgtactagtgctggtgctcgaaatgcttcctgtagctattagttggttacgtttgtagccgtgatttcatcaaaaaaacgtttgtagccgtggggttttcagttaatattagttgtttgtgaagccggaaccttaattccattatctcaaaaaataattgttttgaattagcagaaacttttttttttggagggggggataaaattagcacaaactttgtgtagttgccataacccaggattagaaaataaaacgaatttgcggtggaccattatttatgatgatagtatttatgtacagtgtatagatagcacatcacgcaatttatttggttcagaaatcttcatgtgtcatctcacactgtccttatattaagatttaactactattttttttcaaaaaaaaactttatgttccaaatatcaaaagaggattattattggtcatattcataaagtgaagaaaagactaaagtataatagaagtatttgtcataagttccagaaacatttgttaccgtgagtattgaattaagttgtgtttaatatgtctagctaaatggacggtccacagtgattttggagaaccataagaattgctgttttgtttcatgttgcagatgaaggagatgaatgcaagaacggaaaacacagagccaaattcctgcatgccagatgaccaacacgttcactatacgacaatcgaaatggaatcttctagtagcagtcaagcaagaaaaaattccaaagagaagatcagcacaagagatatctcacttcttgcaggtacattgggcctgtgttcaggttttcaggctatggtctaaggagtgtgaaatatttaatctatttctatctccaacaatagccttgtatgcatttatacataaaaaattagtaaattaattcattctcaaatatctttaagtaaatccatgatataatattatactcatagtagtactaaagtgctgaaaaacctgatgataatacttccaatagctgaacctaatgtcgttattgaatatgtaagatagagtgaatgtagggtaccggtgcacttatatagttgctttctatgttaccatatactgttccttatcaataggatataatcttccatccctttttgtttcaggagaaagagatattacaagaaaagtagtcgaacctataaaggttttctctgagaaggacctactaagggagatagaaaaagtagtatctactttgcagccagataatgagtggtcaatccggataactgcaatgcaaagagtggagggtttagtgcttggaggttcctgaatgtttttttatgttggctttactgtacacataaatatttatatttctcagttgaagaagtgtaggattttttctgagggccttttctgtttcatctttgtgccaggtgctgcagactattcagccttccccatgctcctaaaacagctggtgacccctctaataactcagcttctggataggagatcgagcattgtaaaacaggttcagtcactcatagtttcatgtttgcaacacaactttctttcgttgttaggaaagagaattctgccgacatagttactccctccatcccaaattgtaagtcattccaagaatcttagagagtaaaagcattttcacatttgaccaaaattatagagagaaatactaagatttgtaacgtaaagtgagtatactatgaaaatataattaaggaagaatctaatgatacttagttggtatcataataattattattttatcatataaatttggtcaaacttaaaaaagtttgactctccaagattcttggaatgacttacaatttgaaatggagggagtacatgtactgtaacctgatctgcaaatcaacaaaaattgcgatgatagtgccttgttagatttgtttgacccgaaaacagacatcatgtgtggctgtcaaatatcctactaatagaacatgccatattttgtcctctttgggcactcactgaaatgcatttttgtattttggatactaataggcatgccatttactaaacttcctatcgaaagagttactacgcgactttgaaccatatgcagagctgcttattccggtatggtgtttcttcctttcttatgcatccacggctaacagctattggtgtcagcctgatgtatctgaatcgaccgtgtttttacttaaatccacaggtccttcttaagaatgtcgtgatcaccatccttgtaattgctcactctgctgataactgtataaaagaggtatacatgctcaagctctagctctggcattttgatttcctgttgtttgattctctctctctctctctctctctctctctctctctctgcacagatgttaaggaactgcaaggtagctcgtatactaccaaggattattgaatttgcaaagaatgatagaagtgctattcttcgtgccaggtatgagaagcaccaatatggagttgcgacataaatacttgatgggagcttaaaaaggttttccctaattgcaggtgttgtgaatacgcaatactaatgttagagtgctgggttgatactccagaaatacagagatcagctgacctgtacgaagaccttataaaatgctgtatagcagatgcaactactgaggtatttacatggtgtcattgattcattctcggtttcttgtcatttcatgagaggaatgctgtttaaagttttgactgggataccacaaggtcatctcttcccccagtaaatttagagcacattttagtgttttattccacataggttcattaaaacataaagtgaacctattactagcccgttgattgtcaaggttgagtacctctgaattatcaatacatgctctatgtggggcaaaaggaaaacctgaacctatgactagcccattgattatcaagtcttaagagtgaagtcttgtccaaacagtgcattatttagtttgtccctttttggttagtcatgggttatgtggagattgtcaactgaaagaagcctatgaagaatctatagttattgcagttctcaacttcttgtcttttagttgtggaagtcagaagtcttatgatttcggctttttcccaatttcaaggtacggtcaagtgcaagggcttgctacaggatgttctcaaggatatggcctgaccgttcacatcagctgtactcatcttttgaaccatccagacaaaaagtatttccttaaacttatcttgcgttgaggaccttcagacattattaaacatctaatcatgtaactacattttttttatgtagatgataaatgatgaagatgctgagacacctcaaaggcatcttcctccagttaaattagggcagcctcaacctagttctttcattccagctgtaatagataaagttgttaaggtcgattctgggacatcattttcttctggagatgtgcaaccatcagacagactttacctccagtgtgatgatatgacctcaaaagacccagatgaaggcaataaggatgacactttgactactggaagttcttttgaggataagatcacactaagaaaagtagaaactacagacagagatactgagaaatatgattcaggtacctgtcatgaaaaaacaaattttatcattacctgtaaacacttgttttttaatttgtttaactggaaatattaggctctgctgaccaacttattgcataaattcaggcaacagtgcaggtgtcaattcatcagcttgtgacccaccaactgccactcccattacaacagaagcaccttcagaaatgtcactgaatgatgcagctgttgtaacaattgttcaagataaggctgaatgcaggctgaatgttgaaccaataactcagcaagttcaaggacgagaagatccttctgaattgacgtgcctgccacctgcagttaactcgaaaggtccagggaacctgctaaaggaaaatcctgttgaagtaagttctggtgctggatcaagtggaaaagtaggaactcataagaagagtgctgtttctaaggagccacgtggtagttacacccctaacttccggcgacctctcttgagtaagcagatgacaaattggttttatgccagtacaaaaagtgatatacatgagaagcaactcattttgggagaaatggtcaacaacatggatgtgccctcatctcttacagaggcactttctttaggtctaaacccaatatcagattggatgatgaaggtatatgcattcagtttcttaaggcagtgtttgctagaacgtggatcaaaaagcactcaggaagttgcacaaaattttgagaaggttatgaggcttgtttgtcgatatctggatgatccccatcacaaagtggcacaggccgctctctcatcattagctgagatcatgccagctttcaagaagccttttgaacattatctcgacaagacactgccccatattttctctcgattaaatgatccaaaggaatcaatcaagcagcagtgcttgggaattttgaaacatgcaaatgaaagttatcccattgattctcttttacccgccttacttcgttcgctagacgaacagaaatctcccaagtcaaaactggcagttcttgagtttgcaaatgcctcttttgttaaatgcacagtcaattctgaaagctattctagcagcagtttccttaagccatggttggggaagcttgcccttttgtttaatgataaaaacaaaaaactgaaggaggtcacagtggttggtttctcatctatttactctcattatgaccctgaatccatgttaagctttttggtcacattgtcaatggaagaacaaaagcggctaagacgggcaatgatgcaactaatacctacaatagaaagtgacttcgaagagttcttgcaacaaaagagacataagcaaaaggcatcttttgatggtttcactgctaaatcaccacttcatcctgcatctcaatctgcaaaatcacccctgcatcctgcttatcgatcttccaaatcacctgcccatcctcgatctgctaaatcaccacttcattctgcatataaatatgctaagtcaccgctgcatccctcatatcaacctgctaaatcaccgctgcatcaagcataccaatctaattctgttaagactgatgattgtttcagttctgcactccagtgtctcccaaatatatctttggaagtcaaggggtaccgtactgaaaggattgagtttgaatctcctaatgaatcttatggtcacaaagctgaaatgatggacaagaagtcttgtaccttgaggtcaaggaatgatctccggagaagaattgactttagtgtgatatcagataacatagttcagagtgcaagcagggacagttggagtgcgaaggtatttgatgaaccaaatgataatgaactgcacataaatacccgaaaaagcaaagttatgaggatgaggaatgacagccaggatcatgaggtaagcatttcccaatctgttttttagacccaatttcccagtcatctctctctctctctcttaaaatagcactttgcacatacatcagatctctaaaaatttgactaacctgatggtgttttgtttgacaactactatttagcttgttctctttctgcaacagttatatggtgtaagtgtcttatgagctttcttttacaaagcttggtaatgtatttttctttcattttctattaacagaaggcagtgagtcaattggaagaagattctgagacgaatggacacccagtgcccaccaaggttagattattttgacgggctattcttgtttcatatgttgtaatcaccttgatatcatttttctttcaggggtatttctcctcccctggttattttgctggacatcacctcatcttgcactcgttttcagaatttacaccagatgtcttcttcccttcttgagatgcttgatgatccagatgtgcccacaagagagcttgcgctttctctgttggttgaaattcttgaaaagcacgtaagctttttctgagactcgttagcagtgactacttgtttgcttcctacatctacatgtgccattattggataccattttccatgataacgaccctttgccttgccctttctggtccagcgaaaggcgatagagaactgcattgaacttcttatagttaagctgctgcatgcaaccaaagacggtgccttgaaggtaatacacttgcagtgcttggttcagctcgcatttgctgatgcaaccaatcaaccataaagttggcatctgaagcctttatgtcactgtcgctgcaggttgtaaatcaggcccatatctgcttgacaactgtggtcactcaatttgacccactgagatgccttggggtacgcttgtttttgcatttttgttagtgtcatatctgtcgataccttttgaactgaatctcatggatagaggccttgaacagcttgttgctgttttttcccctttattactgttgtttaccttttttgtaagcattcttatatttctcatttaaacatgtaggccatagcttctcagttggccagccaggatgagaaaattcttattataagcatcaatagtttgagcaaggtaaccagctcaccaagtttcgttgtgtaaattttatgcttatcatgtttgcaaaccagttaggaaactagtgctatggcctcaattttagctttaacatattcatgggttgaactgggagtcaactagcatttagctgcatgcatgtgtacagctcatcgtcttactttgacccgtgttatgagttaggtgaggcatacagctagcatgtagtattccccaaactggatactcctaatatttattcttccattgtttcagcttgtgatccgattatcagaggacaacctgatggctcatttgtcaacgtttcttcctgcacttctggatgctttcgaaaaccacagtccatacgtccgcaaggttaatccagccccgctttgattttgatttacatatctagtcctctaagatcgctcactttttttttaccaggaaatctgttcttatttttcatctcctccaaattacttcgggtaaaagactaaaaagtaatactaggaattattagaggtcaattatttaggcaatacaatatacaggttgcactagaggatcgttattgaacaattttggcaaggcaaatcatcaattaagaattctgcattcaatgtgtgaagaaaaccataaattcactatagcagcgagcatctaagagttgcagtaccaatcggcttgaaaaaggctggtacaaaatggtcaacttggtctgttcatgcaagggtccacggaccacgggcaagaaggctcttattactgacctatggactgcgatggccacaataaaaactgtaataatcatgccttgctgtctactagcatagaatcaatgtgttcagtctgagaaccagaaaattcagtagcatttcttccgcacatgtttggtctgttcctttcggttagccgggccatatccctctttactgaacagagctcagtgcatgcctgcactgcatgggggtaactttattcggatgatcggatccagtcaagataggagtcatgcatgtaagcaccagactggtggagcccggtggtttccatgtagtattcagtctgcatcctgatactactctctcacattcatgctatgctatgcatgctttcttagcatatttgcttgactgaattgtctgaatctgaatccaccactaccaaccaccttttcaccaagagaagaaacaaggagccgtcatcagctaggacctgcagtagctttacattttacctgaagcagcattgtactgtacttgaaagttgaaaccacacacatactgacatatataccaagtagtagcagtagtcgtcttgtattttctggaatggaaatatctgcatttgcttgctccctcaatcaaaaaaagaaaaagggaaatgatgacatgagttgctcattccacccacggctgtgcgctgcatgcaggctgcgatggtgtgcgtggtggacgcatacctgaagctgggttcgacgctgctgccgtacctggaaggcctggacaccgcgcagctgcagctggtaaccacctacgccagccgtctgtcccaggcaagattgattgcggcggacggctgacgcagcagggcacgacgggccggcggccggaggaagaggatgttccgagtgggcgactgcaggcagcgtgctgcgtgcgtcgtcgtaccaccggctccttctcataactcccctgtgcgccccggaagaagaaggaagaaagaagaaggaagaaggaagaaggaagaacgaaaccaagggaggcctgtcctttgccctcctgcgatcacgatttatgagcctagattgattgcactgcgctgtggacggaattgtaccgtgccgtgctgcgagcagcaatggctgctgcgcctggtttttcctctcctgtctcctcctccttccttcctcccctgtggagtgtgtgtgctgtgctgtgcggatgttgtcatttatagtgggaagtaaagggtgaacagtcagtcggttatgaaatactgctgcatgcattgcagtgatgaaattgaataaggaagaggagcaagatttttgtgaaatggaacctggccggattagactgg

SEQ ID NO: 4574 - DNA, 5800 bp, Sorghum bicolor
gcgccacgatctcggtctcgccggtgccaccctgctgggctccgccccatacccccgccggctctgtccctgacggtacggacgtggcccggccgtccggcgcggcaaggaggacacaggcgccaccggccgcggaacctccgctctgctcgccctcgccgcgggacctctgacacggggtagccgcggaggacgctagatccgcgcgtccggccccgcctccaccgcaccgccgcccgcggcggcggcggcggcggcagcggttccctcgtcccgcgccaacgcagctgctgcagtgcaggtccgtcacccccctcctctccccccgcccgtcctatgcttctcactgcttggtggccgtggtgggtattgccatttttgggttggtttgggttgggtgagctgttcatccgggggaggggaggggaggggaggtgaccgttcgccgtccctgtcgctcccaaaagcggcgccttttcagccgcgcttccgattggagctggagctaggctcggtttggattacggagctcctcctcctcctcgctccgccttttttttaatctcctcgctaatccgatctaatcgcagtcgcctcccactctatcctgaagtaattaatgcccgtagttacttctctcctcctaacctctgccttgccgcatccatggggaccagcgccatcgccagctttccctccgccacgcccattggctccggtgccgttgccgacttgccgttgccattgccattgctgcgccttgtcctcctcctcctcctcctcctcggtggtgggataacgacggctgcgtccccgccaaccgccgcgtcctactcctccccgattcggttgttgccggctccgttccgccgaccaggtaacatgcgcctctgctctgctctgctccgcgccgcccgtcccaatcacgccattcctgccgctcgcccagccgccccactgcatgtaaatgtaatgtaatttattattattcggttcaccgctgcgtctcctctgacgagatgagattcggtcgggtctttttcctgcgtccgtcaccgactcaccgtccgtccgttcgagcgggcaagaaaataaaaaggccggcgcctttcctccgcaccgcaagccagctgctgctccggccgtcgcagctttcttggagcgtctgtgggcacacagcgccttggtttgttgggtaggaaatcgcccgcctttcgcggcgtggttgcgacattggcaaagctcttcttccttcctctccgctgtttccgctgcgttcgcgtgcaagttcctgccaaagccaagagattgctactgcgtcgagtcgaggagccattttccttgcagcctgcatagcgaaagataaaggcaggcagggcaggcagagagagagagagagagagagagagagagagcgagccgcagcggcagcttttgcacgcccgcggcacatctttttatccccgctagctagttcgtctcttgtggccttttccgggtgccgtcgggcgaaatgtgaatatgtgatgatgagttctcgtggcgtccgtcgatctgttcgccattctcccatcatcatagttccctgtcgactgtcgtccgtccttggcgcatttgttctcgtcctcgggggagcgagaggcgtgtgggggttcgcgcttcacgtgttgattcctcgcgctcccgcactgcctcctcgtcggatttcgtgatgtggaggccgctttttggacgcagctgatcagttgttgtatttttctgttccgttctccccgctcctgccttgtccggttcttctctctcactatctgtcttcaaaagttttaaactttgaaaaatgtctgttactgctagcgtgatggcgacgtgattactgaatcagatgagctatggttctgatttgcaggaggaaattgtgaatgaaaggggctcaggataagaggcacagaaagaagcaggacctccaggttctcgcgcccttcccgggatgcctggggaggatgatcaacatgttcgacctcagcaacggcgtggttgccaccaagatgctcaccgagaaggcacatagagatggtacctatttctcttaaccctttctgctccatggtattgtaaattttgcatgatttttttctgttccctgggatgggtttcttcttgttcttcttctgcttcagtgtgtgcaacgttatccacagaatctctgatgcagtgtagcatatgctttgcagtttctccagctggaaaagaccggagtaatactttcaagatggcaattaaccccccagctcagactgaagataaacaagtatgtcaaaaaaaattatgtttcttctttcgtcgaaacaaaacttgagcacaactggaagttacacgattttgttcatcttctatgatttacctgcagagagatagtcagacaagaaggaattcccctactaaaagatcaaactcgcctactaaaagatctggtgggacacctgttaagatgctcatggagcaggacatgtggaaagaaggtgtgcctgatgacgagccactgaatgttgttgcaagattaatgggtctacatgaccctccagttcagcaatccaatttccctttaggaagacaattggataaggaatatcagtttggtggttttgaagagaactaccggaatctcaagccaaagaaggaaagcagatgccatcaaaaccaaaaggcagggccacgccatcagcacacttggaatggttttggtgaccaaccatcaagaatcaatagcagccagagcaagcaccaaggaaatgagccttgttgtgagaagaggatgtcacttgttcgtgagaagtttgctgaagcgaagcgtctagccacggatgagaagcttcttcattcgaaggagttccaagatgcactgcagtttttaagctcaaatagagagctcttcttggagttccttgatgagccaaatcctctgttatcaagcaaccgttatgagttccaacctgttgcaccacattctgaagtgaagcaaataaccatactgaagccatcagaaccaacaaagagaaaaggcagcatccttatagggagacaactgttttcagatggagatgaaagtgaacgtaacagatacaggcgccatcagagtttagatgtttccccagcaaattcaaatttgtctgagccaacaaaaattgtagtactaaagccaggactctccaattctcatgattccaggattgcgaggtcttcattatcatctgcagaagacagtgaagatgaaagtatgatgacggttgatgaaaccgtgtgctcaagaagattggcaaaggagatcacttggcagatgaggatgcggctaaaagacaagcaagacgaagagagcatgctctcacgtgaataccctgacttttatatcggagatgactccttcggtaaatcagaagttgagattgcaaaagagatgtctggtgaaacaagtgaggaattggagtttggcactccaacttctgggcgttcttgggattttctgagtagaagcggaagtccttactctgcatcatgctctagtcaggcatcccatagaagggaaccatcagtagttagggaaggaaagaagaagattttagagagatggtctatggtatcatccacagtcagtggtgaagaagaaatggaaggtcgcagaagtacaggcacacttggtgacatgctcacaataccgaaagtcaaggaccaggaagaaattggagctgaaacactggggagcccagcacttgagctggaacctgaagagtctttctcatgtttgccaagatctcgatctcttccactttctttgtcctatggagtcgctgagtcaaatggattagcctctggcactcaggaagctgaaaaggaaagaatcaggaagtcatcatcatttagggaaaaagtttctagcctgttttctaaaaataagaaatcaactagggagaaagtagatccatctgcgagcaatagactcaagcatggaggggctgtgactactggtgatgtgaaggaaggctggaaccatcttgccctagagaatcttcagaaacaaagtacttgtctaaacacagatgagaagaacaatgtgcaaggactcgtgactagttcttgtgatactaatgatacagctaatatccctgccaaggtaattcaacatctatctttttaaagctggtgctcatggttttcatacaatcacttgtgtaatcctcaaaagtccaaaatatgatagttagctttgctgtgtcaggatatttcctccatttcaagtcttggcaccccaggaatctttggtgaccctcaggaccaacctagtcctgtatctgtactagatggaccgtttatatgtgataacaggaggctactgtactcatctgaaaatttcataacttcatccccacgtaagcctgaaaacctgtttcatcaaaacttttagctgtctagcgcaagatggtctatctcaaatggcatttttacatatatgtgcagaagctttgtcgaggtctcccctgatcggatcattttcacggtcactgtcatgggaggatcccccgctggaagtcatgtcaccaaattctttgagactctcaaggcttttctcaaaggctgatgaagatctagattcactgacgtttatccaaaagctggtccactcttgtggcatggatcgagaaagttgcgtattagctgaccctttgaacccaaatttgcttgataagatttcagattatgaagaagatggaattaagtttgggaaaaggcggtcaaaacaaaggcttctttttgacgctgtaaacgaagcactcactgagattgcttcgatggcggaactggctgcatacccctggggtagatcatgctcttgggagcacagggattgcaagaatggttccagtaattcagcggctgaggaaatttggcgggtcattaggaactggtcgatacttgagaagtatcctcccggcgaagctattgaaagaaatctcttgctggagatgatactcaagagggaggtggctgagccagccagcgctgacacaactcggttagagatgtttgatctcaacgccacggtctgcgccatggtcttggaggacctggttgaagagacagctgtagatctgactaactgctagtgaggtacctctgtcctctaactaataatcttgcctctgctctctaatgttgctgttggtgtgatacttgctgctgtaacactgctccatttattgacgctattactggctgaaatgtgatgccaaatgggtctctaccttgtttacatttctgttttgatctctgatatttgctctagccgttaactattaatggttttgcaatgaattatgccattgttgtgcctatatatagccgttttacacacacaagacaaataataataagttgcatggctccacacttccacaacactagtttgttgatgctgcctgtagttgagattgtctcactcgggatggagaaaaaggagggttagaaacaggaggaaatagtggtgtactactgctgtcttctttgtggtggggacctatgcctgtttggatcgatgagtcgaatgcatggtctggtgcaaaagacatgaaaacatgcacatggcatcttggagcctgttctgtcctgtccacacatctcacaaggcacaagatgatccttgtgcatgtcaactgtcattttgtttatttgattcgaggacaccttttgtttagtggagtctagtttaatccaagcttagtactcccatgccactaggctgaaacatagt

SEQ ID NO: 4575 - DNA, 6565 bp, Sorghum bicolor
atcacggaaaataagatttccattaaacaagaccaaatgagatacaaactctggtgcgtgatcaataaacatacaatcttcagcatcctccatacatgcaccgtaggcagctagacacttttttttttatacaagacaaattcgtgagtcacgccatgattccgtttcatagttcaccaaagattcttcgtcacatcgaatcttgcggtacatgcatggagtattaaatatagacgaaaataaaaactaattacacagtttacctataaatcacgagacgaatcttttaagcctagttactacataattagataatgtttgtcaaataaaaacgaaagtgctacaatttcgaaaaccgaaaagttttcagaactaaacaacgcctgagtaaaacgggcactactatatcgggtgtgtcgatgacaagaaaaaatgatgaaagatttattagatgagttttatgtgggtaaaacttatttatgttgtttctaacgaatattaaaaattagaaatgaaacaattgcagagcgagatcatcatttttttagttggcacactaattaataacacataaaaacaatctattatttttaattgtcctcgtttcacagacaaactgttgttttttctaagaataaataatgctccaacatactcacaggtggacccaaaagatgaaaaaggaagtcggcggtatgagtatgaaccattgtatggaaaatctgaaagggagaaaaacaattattgaaccctacggaacataaagtaaacaaagtgatattcctatactacataaagtaatttcgagcatgcaaaaagagtatacacccagtagttgtcatgaagcttttatattgctatagcattatttcatagtagatgatattttagttctgatcatagaagaattaaagaggagcaaaaaaaaatgtgttgtacacaggaaatgaaaatgtgtaagatatatattcgcttgtgtaaaaaatcatgttggctgacagataaagtacggctataagacaaacgaacggaaccgagacaatgatacattaaaaaatacataaattaaattaatttaggataaatatagagtgacggagggagtacgggcaattactaattagccaccgaacaccttcattatggtttatatgatttaaacaattgtactgaaaccttgaaacaaaagactggatggtcaaagctgctgcactagagaaatataataatgtaaggccttgtttagtttccaaaaaatttcaagattctcatcacatcgaatctttgtacgcatgtatgaaacattaaatgtagacaaaaacaaaaactaattacgcaatttaactgtaatttacgagatgaatcttttgagaccagttacttcgtaattgaacaatagttgtcacatataaacaaaaattatacagtttttcataaactgaacaaggcctaacttttgaagggggcgaagacaggacacaacacgaaggtggatcgaaaatagagctaccgagtgtactggactctagactagtacttctctgttctaaattataagccattccaaaaattttagagagtcaaagtattttcaaatttgataaaaaatatagaaagaaatataaagatttatgtcataaaataggtacactatgaaaatataactaacaaagaatctaatgatacttggttggtataaaaaatgttattattttactatgtaaatttagtcaaatttgaaaattttttactctccaagattcttgcaatgtcttatataatttgagacagaggtagcagtatagatacgtacgtacgtacgagtatagtggacggagggaggagtatctaaaacgtgcaagcaaaggcttctagagggtatgggctggtgtgatcctcatccccaatcgacatccgtgcctgcccggctgcccctgcccgtgacgggccggtgcggcgcggcgcgacgccgataaaaagagatgagagagaaactgagcaagcaatcaattctccggaacagcctcccccgcaacgacttccgcttccgcttccttggataaccacaccacctgccccgaccgccctcagccatggagaaggcgatcgatcggcagcgggtcctcctggcgcacctcctcccctccgcctccgcctccgcctcctccgcgcagcctcagcttgcggtgagcctcccctcccgatctgctgcatggctcgtctctctctttctcacggattggattcggctgtggctgatcaattattccctgttgcgttcgcgtctgcgtcacggtccaggcgtcggcgtgcgcggccggggacagcgccgcctaccagaggacctcctccttcggggacgatgtcgtcgtcgtcgcgtaagcctccccctcccttgtactgaaacccccctcctctgcatcctcttgatctccttcttcagtactgtatacaataatatataagacggttactggacatttggtgtgctagttacgtgttcttgtgccgcgcgtgctgaaaccgctgctcgccccttctcatcctgctcgatagcttcagcttcagtcaggctcaggcttggctcggcgagggggaaactcaattccatgatttagtttgcttattattattaccttgtacagtgagaacgcgtcaccaagtcaacttagtttacgaacatgatagcgttaaggaaaccactgatgcacaggcaacctaattcaatccaattcaattcaacaaaacaaccttcaaagtaaacctaccttacctatgcagaatccagcttttgtgagggaatcacaaggctctgctgttttagtccttgcactattagtctatctatctgtctatcattaccaatgagataatacggatactgtaccatttcctttgttaccgttactgacttacttaccatgtcactgcagtgcgtaccggacgcccatatgcaaggccaagcgaggaggcttcaaggacacctacccagaggacctcctcactgttgttctcaaggttcccttccctcttgttgtcttatttctctgctcccttttcacatcaagtggttcaccatgcttaacaaacatgcataagagtttctagaaaagcttcacacgctcatttgttccgtttccgatccatacaggctgttctggacaacactagaatcaatccagctgacattggtgacattgtggttggtacggtgcttggtcctggttcccagcgtgcaatcgagtgcaggacggctgcgttgtttgctggattccctggtaatacctgtgtttgcgatcttgcatcataataccctaatctgatgaggattgttgtctgttgcacaaaatgttcactgtcccttctttgttgttgtagaaaccgttcctgttagaactgtcaaccgacaatgttcatctgggcttcaggcagtagccgacgtcgcggctgctataaaggctggttactatgacataggtactatctgaatatacatgctagttttgctgttgtgctttagtttggctgctgaatcgctgctttccctccaaacagggattggtgctggtttggaatccatgtccataaattccatgggttgggaagggcaagttaacccaagagtaaggattatgaaccacactgtaaattgaaattgattctttttttaaaaaaaaacttccaagttccataacacattttcctctgcagataactgaactccagaaagcacaggattgtcttctgcccatgggaattacttctgaaaatgtcgcccatcgatatggtgtaaccaggcaagagcaagaccaggctgctgtgagttcctcattaagcatggactgtattaattaattaattttggttaatataacaactaaagctttgttttgtcaggctgagtctcataggagagctgctgcagccacggcctctggaaaattcaaggatgagatcgtccccgtgccaacaaaggtaagacggagtgaaactctgttctcttgcaacccccatcccccaacttctttcaagtagaaaccagcaacagcttaatgttagcgttgtttttaactatgtcaacatactaatgttcttttttgtctgaccaaaatttcagtctagttatctaggaacgacagttttttattattttgagcatctgctgacactacgtgttctgcagattgttgatcctaaaactggagaggagaagaaagttgtgatatcagttgatgatggggttaggccagggaccacagcatctggattggcaaaacttaaaccagtttttaaaaaggatgggactacaactgcaggtaatgtagaagtcaaccttttctggtgacctccctttgcagctacattgtctttttaattctctgccaaaacattatctgataaatcaaacaaactgtgtaggcaattctagtcaagtgagtgatggtgctggagctgttcttctcatgaaaagatctgtggctctgaagaaaggacttcctattcttggtgttttcaggtgcttaatctaccgacccttatatgcatgcagaattttgattagttcactttgcgtttgtcatcgttgctcagacatatttcgctcaattcattgttacgttcaactgttgcttgacatcatctattaggagctttgccgctgttggagtggatccagctgttatgggtgttggtcctgctgtggccattcctgctgcagtgaaatctgctggccttgagattggagacattgatctgtttgaactgaatgaggtctgtattaattgccttgatctacactctgttctcaaacctatttatctgtaatatccaattactgaatcatctatctgtctgtaggcctttgcctctcaatttgtttattgctgcaacaagttgggcctggaccgttccaaagtaaatgtaaacggaggcgcgattgcccttggacacccactgggtgcaacaggtaacggaacatcaactttaatgtgagattatcagggaactgctctaccattgtaatttgatctcggccgaaccgataacagacaagggttacagcccaaacacatccactcctaatcctattacaaggcccaaggcccatgtcatgacacattgctgttggtacctattactgggtttttttagcaaaagccgtctaaactggtgtttcgttgtatcgttcaggtgcccggtgtgtggctactcttctaaatgaaatgaagcgccggggcagagactgcagatttggcgttgtcaccatgtgtatcggttagttttattacttgccgtgcttgttatcacatacttacatgtgtacaagactacaagcaaagagtgtcaacgcatagatgtaatttgatctcttctgtaattgatcatgttgtgccgtgccaactgcaggatctggaatgggggcagcagctgtgttcgagcggggagatgctgtggatggactctccaacgtgagggacacccagacacaaaattttctgtcaagggatgcaaagtagaggtgcagaaaaatcatccatccgagagcaacataagcctgctacattagtactaatacgacatccgtatatttttttcttcacaaacactactctgtatacgacaaataaaagggcgtcatgcagtatcctcttgtagccacctaagatgcgaaatcagaaaagaaaagggccgggtgttgtagacagctcaatgttctgagcttgttctgttattgccttttgtctcagactgaacaaacagcaaaaatcttgctcgttgccttgtgtgtatttgaaccagaaggatgaagagcgcctttgtgcactgggctgattaaaattcccaatctgctgttgagacgcttgcttgctataccactgttgtctggcaatagtagttggccgcattttgtccagtgtgctggatggatgaactggtatccgattcagcagtgtagcttatagttgtaggtgctgtttgttaagataggccatgcctgaaatggctccatcatttcgaaaacagtgaaattgtaacaattttgatttttttttttggaatgaaccaacttaacgatttctttttcgtctagctagggccctagtagcccaacctatctatgactcacctcacatgttagtgagtggcaattacttgcaccgcgattgcaaagacaccaagtgctcctcttctactacatcgatcgacttactcatagagctattaggcaattaacttctgtaatgtttaggtcttgtttagatacatctaaaaacccaaaactttacaagatttcccatcacatcgaatcttgcggcacatgcatggaacattaaatatagataaaaagataactaattgtacagtttacttgtaaatcacgagacgaatcttttaagcctagctgctctatgattggataatatttatcaaataaaaacaaaagtgctacagtgtcaaaatccaaaaaaaaattggatctaaacaaggccttaagccagtgattacattatattttacatactactcaaatgcaaatgctaaaaggggcttccaacatggtact

SEQ ID NO: 4576 - DNA, 4147 bp, Sorghum bicolor
  misc_feature (1)..(776): n is a, c, g, or t
nnnnnnnnnnnnnnnnnnnnnnnnnnnnnnnnnnnnnnnnnnnnnnnnnnnnnnnnnnnnnnnnnnnnnnnnnnnnnnnnnnnnnnnnnnnnnnnnnnnnnnnnnnnnnnnnnnnnnnnnnnnnnnnnnnnnnnnnnnnnnnnnnnnnnnnnnnnnnnnnnnnnnnnnnnnnnnnnnnnnnnnnnnnnnnnnnnnnnnnnnnnnnnnnnnnnnnnnnnnnnnnnnnnnnnnnnnnnnnnnnnnnnnnnnnnnnnnnnnnnnnnnnnnnnnnnnnnnnnnnnnnnnnnnnnnnnnnnnnnnnnnnnnnnnnnnnnnnnnnnnnnnnnnnnnnnnnnnnnnnnnnnnnnnnnnnnnnnnnnnnnnnnnnnnnnnnnnnnnnnnnnnnnnnnnnnnnnnnnnnnnnnnnnnnnnnnnnnnnnnnnnnnnnnnnnnnnnnnnnnnnnnnnnnnnnnnnnnnnnnnnnnnnnnnnnnnnnnnnnnnnnnnnnnnnnnnnnnnnnnnnnnnnnnnnnnnnnnnnnnnnnnnnnnnnnnnnnnnnnnnnnnnnnnnnnnnnnnnnnnnnnnnnnnnnnnnnnnnnnnnnnnnnnnnnnnnnnnnnnnnnnnnnnnnnnnnnnnnnnnnnnnnnnnnnnnnnnnnnnnnnnnnnnnnnnnnnnnnnnnnnnnnnnnnnnnnnnnnnnnnnnnnnnnnnnnnnnnnnnnnnnnnnnnnnnnnnnnnnnnnnnnnnnnnnnnnnnnnnnnnnnnnnnnnnnnnnnnnnnnnnnnnnnnnnnnnnnncatatattatattatattatattatattatattatattatattatattatattatattatattatattatattatattattgagagtgttaattattttgtagattcagtatgttatgggattaataatgaattatatatcctattgtaaatcgaaacaaaattttatttacttctcatatctctcttcctctaacatctagaaatggaaagtgctatgtataattaatactttttatgtgctttgaaatatcatcgtctacactgatcggtgtatatctacctatcaatctatctattggtcccaagtgactgggcatgagatttttcgcgcgccggtgcctagtcacaaggcatgaaaatttttttgtgtgaaagacatgcgcttcatggctgcaaggatcaagcccaggacctaaccactccactcatatcacactttgttgtataactcttcgagatccgcaacttttaatttagtcatttctccacttgagattatttgaaaaaaaaatcaaatttcaaatgtgagtaatttgaacgtagatttttcatgcatagatgattttaaatgaaaaagtagtcaatagcgacgaagttgcagagcttttcgaaatctgcaacttttgttttattcgttcctccatccgagattgtttgaagatttcaaatttcaaataagagaaattgaaacacatctttgcatgaataaatgatttataaagaaaaagttcgtcaagtacaaagtttgcataatttctgttgttgtttttttattatttgagatgatcgagatcgtcttttgaaaggtggacaagtaccgatcgctggcctgaagaaggcagatccgacaaaacctcaggtgcctggtcgtcgcttgggacaaggcggccgggctcagtgcccggccgcggccggcccaggcagcagagcatgcatgcattgtccgaaattagctaggttatatatagccactaataatgcctaacagtagtgatcgtacgttggatgatctattccgatccgttggcaatgcgacacaagtggcggaacactagctagctaattaatagcaatgctcttgatcgatcgatggaccatctatcgatgtcagccacacacacacaccactctcgctcgatccattaactatctatctagcctagctactagctatatatatatatatatatatatatatactatataattaaggatggagcgcaggagggacgaaggtgaggagtgaagaaaccaaagccaaattaagccatagaatattgttgatagagaatatatacatcatcatggtgcaactactagtattaccatcgtcgtccttgatcctcctcctggtgctgctgatgatggcgccgtcgtcatcatgcgcgcaggagcaggagcaggagcagcagcagctgaagcagcagatgcaggagcatcagcagcagcataccatgttgcaggggtggataaaggagcaggttgccaaagatgcagcagcggggtgcacgtgcggcaagaaggacgctgcactctccgcagccgaggctaacagggtggtcctccacgtcgaacccgccgacgatagtagtacctcagatcctgctatctacctcaacagcatcggcgaggccatcgccaagatccccgacggcaacaccaaacggtacatcatcagtatccagcccggcgccgtgtaccgtgagaagttgttcctgggaaagaacaagccgttcgtcaccttggcctccaccagtcccgaggcccctgccatcatcgcctggaacgacaccgccgccaccctcggcaaggacggcaagcccctgggagctgaaggaagcagcagcgtgaccatcgagtcggacttcttcattgccagcggcatcttgttcaggaacgacgcgccggagccggagctgaagagggataatcaagggaagatcggcgaggtgactagcgcaaccatggcgccagcgctgcgagtggcaggatccaaggccaccttctacaaatgcaccgtcgacggcgggcatggcgccctgtatgaccataagggactgcactactataaatcgtgcacaatcaacggcaccttcgacttcatcttcggcaatgcaaggtccttttacgaggactgcaacattgtctccaaatccgccactgattacctcggggacctgccggtggcaaagccgcccttgaccttgtcgcctgcggcggccgacggcggtttctctttcaagacatgcaccatcacagggcaaagttttatcttcctaggaagggcgggctggcctgtcgtctactcctacaccaacataggatacgacctttttcctctaatcgtctctggctctgacgatagccaagcaggggctaaatttcagttcaaccggtaccattactgacctcagatcatatacatattattgtgtttattatttattcaatacttatatgcactccacttattatatatattgtttaatttgttgcgtgtgcatgtagggagtttgccccgttcctctttatatcatacaagaactacggtgttccgagtggtgcggtggggataaacaaaaccgatgtcgcaccctttcttggaacccaatttgtctccggagacaattggatcctgtccataccacctgcaacagagtagcagcacgcggcggcggcaaggactgactagggatcggatggagcacatatgtttatatgcatgatatatatatgatggccaccatcatcatcctatgacacaacccgcggaagttgttgtttgttttacttcttttgtacggcttgcatttcatcaggcaccaacaaataagactttttgctccgatcatcaccgatgtgatcgattaattaataaccggtctcctcaaacaattatttgattccttagaaacattccttttttgtattgtttacccaaaataagtatacctagtgtgtgtgattacttttacagcctattcccttctaacttaactgaaatcacttttatgttcctgcggcgatgcgaccggagaaatcacctagtatcgtattatatgatactccgacaaggtgggcacaggttgtgataggcctagttgggtatagacttcggtaattagatagatatatcgttgaacataatgatgtttaaaaactatcttcttctttttgaaaattaaacgtgggggagagtttccccaccttttccatttcgaatgcacctacccattaacgggggtagcagtggagtacaagttacaagtgcggatgtagttacaccggccaagaaggtcgtttcaaagcacaggcgggagttgtttgcgccatacaattagatcgttacagactttagctaggacagaa

SEQ ID NO: 4577 - DNA, 4354 bp, Sorghum bicolor
atccgtaatatttttaatcgagacaaataaaaaggtgtgtgttcagcaactaaaaaaaaaatcttttgcgagatgttttcgttttttcttccgattcgggcagcatttacatactgccacctcgattaatacctcggattaaccgagtcggttattttctattatctgagacagacaataatgtaatataactgcctcggttaatacctattaaccaaagcgggcattataacgtaaccgtctcggtaaatccattaaccgaggcagcccatctcctaaaatagtggcccaataggcagcccatctcaacccgatagcagtcatcatataaatatggagctagggtttccttctctaacccatctctcactcctatctcgttgcccctcccaatcctctcccctccaatcctgtcgccccttccctaccagcaacaccccctcccctcctcccattggcccggtagcgccccctccgctccttcctctggtccgacgcagcgccctctccaccttccccctagttgacgcttcagtggctccttgaaagcgacgcgggcgtgcccgacaggctagaatgacatagatcacgcacctgctagcgcggccacgcgagcacggtggcccgacagatcagaggcctagcctcgcccctccgcgatggcgccctcctccaccatgccttccaccacctccttccacgacggcgcccctccagtcaaagggctcgtggatccgcccttgggggttgcacatccggcaagctcgctggtgggccagccttttctccgagcgcggatccaatgtgagcggtggagtggctccatatctagcgtcggggagcgcgcagggggtggcggtgggctcagaaatgggcacgccggtgggctctgtttttttttttgtttttttaattcattaaccgagacggttaaggccacgattaaccgtgacctttgatccgagatggttacaaaaactgcctcgataaaggattttttcctgcctccgtaaaaaatatgtagtagtggcaagctctgccctgctcgccaccgcagtcgggggagaaggccctgccccgcgcgccttgatccgccgccaccacgatccgatctactatagccgcgtctcagtccaccaccaccgcgacccgatccacccccacaacggctagatccgctaccgccgccgcaaccggatcagttgccgagtggccgccacggtaaataaattaaccgagtaagaaccgccttggttaagccatgattaaccgtgaccaaataaaaaaaaaacccgcttcgatcggtctccgatcccacactggtcacactactacagcacacgctttaccatattatacatagcttcatggtatgtagacgtacatataacaattaaaggaggaataatcgtcttgtgctctagtacatgctgcatgcatggatgtcgatcgatctcgactagctagctagtagtgtgtagtactacgtacgtagcagtagctttagaagtaggggacagggaggatcagaggatggtctccatctatattgtacgaatcgcgatcttgtatgtacgttggtcaatcacgaggtatattctttttaatttcgatcagcgtttacataataactattgtaatagtgatttaattatgtcgcatgatgcatgccttgaacgaaattgcatctagtgtaccaataattaagcagtggagtggcgagatcgatggattagctagaaaagctcattgcattgttggtgtcatagaaaggagaggaggagaggtacggtgtgaccctggcccgggccagtccctatatatatatatatatatccgatcgacactgctgctggcggggcgtgctggttgttgttgagtggtcaagtaagcgagagagagctgagtggcgagatcgattagctagtagtgacagtgagctgagtgatcacacgcctcgatcgatcggttggtcggttagctagctagctagcgcacgcatggctgctggcggcagatggtcgctggcggcgttggccttagttgccatggcggtggtttctgctgctgagacctggccgccggctccacacgcagtggtggcaaggaaacggccgggtgattgccggggtgttgcggacgcgcactgccacggcaccatcggagaggctctcaaggacgaagctgcggcgctccgtgtgacgacgggagcgaagaaggggcacgtgccgcggcttgtcatcctcatcacagccggcgagtacaaggagcaggtgcacatcacccgacggaacgtcgtcctgctcggcgagggcagaggcaagactatcatctccggcaatctcagcaacaggacggggacggagatgtacatgacggccacagtcagtaagtgttctgtcctgttcgatatgttgtgttgaatatatatatatatatatatatatattccgtacgtatatatatgcagttcgtcctcttccggccggtatatatatatatatggtagtcgtccgaggcctcattattgctgcgcgcatttcgtgcaacaaggagaaagagatcatgcattattgttgatgcagcagtgctgtactgctgttttgtatgagaacaacgtaaagaacgaaattaaatacagaagttgctatgtgcatgttatacataaaaaaacacgtgacctgatcgaaccacaaacatattactcagtagttgataaacagtgtggataactactgccacatgtaattgacaatattccccaaacactagtatttcaatagtgctggcaatggttttctattcagtgagagtatatataagccataaaacaacaccaaatttaaaatcatgtatacaattaatctattcagtgagtgtatataatctactcagtagcaggagataatctacacacacgcgtccggggcctcatgctgcgcgctctgctagctactgctgctgctgctcatatgccatatatatacgtaccatgcaatatataacaaggacaacaatatatagtaataattagcgactattaactaactaactaactaatattaatactctgctacgtgcactgttgcatgcatgcagatgctctggggcacggcttcgtcgcccagaatcttacaatcctcaacagcgccgggcccgatggaaagcaagctgtggcgctgaggtccaactcccatagatcggtggtatatggttgcagcattgaagggtatgaggatacactgtacgcagaaaacggcgcgcaggtatacctggacacggatatctacggtaccgtagatttcgtgtttgggaacgcgagagcggtgttccagcgctgccgcatccgggtgcgggagcccctcagcggcaagcataatgtaataactgcccaaggctgcaacaataagacgtaccaagactcggggttcgtgttccaccgatgcacggtggaagcggacccgaacccgattcgggatccagtcagcggtgaacccatcgggttccagaacctcactggcgtcgaaacctaccttggccggccacaccggaacttttcacatgtggttttcatgcagtcggagctgggcgccatcgtccacaccgatggatgggtggcgtgggacaagaaccacgtcatcaaggagacgacggagagtgtcaaatatttggaatttaacaacactggtgctggagcggacacggccagacgcgtcaactggactggcgtacaggtcatccacgacgcggcccaggtgacaaagtactgcatcgacaacttcgtcgcgggcaaggaatggattccccagcagatcccatacgaccacgagatcccccgcgggatcgtcgtctagcctgcccatccgcagcaagcatcagtctcgatcggtctctgggtctctcgcgcgcggcagcctcgctcatctccagctgcgcgcgcggtcgtccgtcaagtcgtctccatctgtacgtgtgtgtgtgtgtgtgggcgcgctgcactgctgctgctgctgtcccgccggctacatcgagtccctctcgagatctcatgctgcatgcatgcattctctccatccattgtcattggcttttaatttgcttgccatgccatccatctacgagcgagcgagcagcagtttgacatatgccataccatctactcctcctagctatacagatccatcgatccacgtacccatcccatccattgcctgcttcactgtactagcttcctctctctctctctcctgcgtccatctcccgcccgcaccgcaggatgatatctgatccgtacgtcgtcagcttgaattgcttctgtaccatcacctgcggccccgcgtgcccttaccctgcc

SEQ ID NO: 4578 - DNA, 5358 bp, Sorghum bicolor
ggattctgcaaggccaaggagctcgatgaagccaaggaagccttctttcagatggtcgatgcaggtgctttgattgcatcttatatctttacagttccagttagtaccactagctaattgtaaggactgcatttgatagtttaaatgacactaagatatttatgttgctatcataggcaaccagtttgcaatgactcactgattatcttgctatcatatcataattatatcttctcatgacgtggttgcttttgttgtatgcagggttttcacccaactatagcgtattttcatggcttgtcgatggtttctgcaagaagaacaatgcagatgcagtgctactcatccctgatgaacttatgaaaagaggccttccaccagataaagcagtatatagatctctgattcgaagactttgcagaaaagggctggttgatcaggcacaaaaagtatttgaccagatgcaaagcaaaggcttagtcggtgacagtcttgtatacgccacactcgcatacacatatctaacagaaggaaagccagttgctgcttcgaataccttggacggtatggcaaagaatcaattgtacataacaccccagatttacaactgcctgtgtacctcttatgctgatgagaaggaaaccctcaatatactgtgggttcgtgctattgagagaggcctaatcaagaagagtgtgtacaaactgatgcaccaagcaaggctggaatcaacgaaccttgcagttgagactgggggatacgatcctttttcaaggccagactatctagagggctaaacttgacactagaatacaactggatccaggacattcagggtgcaacctttgttggtgttatcgctgaataccttgatatttggtgttatctgggattgtgctgcagccagtgaatatactcatcgctggccactttcagctttgagacagtactcagccaactcagttcatgagaacttctttcaaggctctgcccagtttcagtgatgggggcttatatggaagccatgggcgccaggcaaatgccatttgcttctttggttggtggtacataaacggtgctggactatggaccaacttgctctacaaagtttgctgcatccggtgtgttgtcctcactgtgatcaggtcgatgatggacaattgatcaccagctcactaattgtgtttttgccagacatttcgggttcagtcctctgcggggatttggccttcaaggtgtgtcaccttctgttgaagatagatcctttgattacttgtggagcagggccagttaacggactggtgcagaaatacctcaattttcttggagcccagactctggaagcatcggaatcgctatgttttcgatggcactgccccagaaatggcaggtgccttgctgcttgccgaagaggaggcacagctttgggtaatggctggggctcatggcattgtccctcttgactcacctagtgattatgcttaggttgcggccattagtatttcagtcacagactcacaagcatggatgtaaagctaagcactgacagtgcgagttactcgaggctgtaccttttctgatgatatgcagcgagaaaaacaaatgatacctgtatacagaattgcagttgtacggcaaagtcaatgtgttctatcccgtaatgattttcaatcatatcaacacccaaatgaccttagttaactatgtactcttttctcggtccgcaaccatgaattcttcacctataacctggtgtacttaatccagtggttaaaaattttaatcttctgtgtgcgttgtgtttttggagcagaccttagctttccggtgcgctactaattgtgcttgattctcagaaatctcccactgtccgattgtatgtgttttggcccaagactactaggtcggcccaatactgccaagtcaaggcccaggaagaagaagataagctgccaacaaattcttcgtctccttgtcgacgacgagacgcactccaacttgtgaaatttcacggcgatgtcacggctactcccgcctgctaaaaccctcctgctctctcccttcccaatgttctcgccgccagcgcctcatcttcttcttcatctacctcgcatccacatccgcacatccgctgggagaggcggggcgtcggagaacgcggcggcgtccgggacgacggcgagggaccggcggctggtcaaggtgcgggaggagcgccgccgccgcgagtacgaccgggagcacacctaccccggatgggccaagtacgccttgtcctctcactcactcactcactcactcactcactcactgtttattggccggctgtcttgtttgtttcttctgtttctttcttggtcgtttccgtcttggccttccattcctgtcgaaattcatgtggcagcctgctgtttcttaatgttgtgatatggtaatgcagagttctggagaacgcctgcagggatgatgaggagctccgcgccattctcggtgatagcatcggcaacccggagctcatgaagcaaagggtgagtgctgcagctgcgttcagtgctgttttgctcttcctgttcgctgttttactgagagaatttgttgttactttgttagcctgatagacagtactctcactcatgccacgccgtctgtacgcgattcacagatccaagaaagggtgcgcaagaaaggcagggctcaattcaacaaatccaagacaggctccattgttgcttttaaagtcagcttccgagagtgagattctcacccacactagtcgggcttgtgtttctctgttttccacttggaaggatcagatttcagaagtggagtgtgctgatagttcttgcagcacacattgcaatacactgtcatagtttcaacttaattggattactctgctaaacacattagctccaaatgaaatggctccatgtttctgcaaagagatatatttgcactcctgacctcacattttttatcctgtatagttaagtgcctaatgatgaatagatgaccatctcctaaatttatctattcaaacaaacttgtgttatacatgttaaaacttttgttttaatcatttttcttcctcattgaaagatggtaaatctgaaatcggctactctagtacatgaagatgaatcaacgctcaataactaggtgtctaggttgatagcactcagattgcacaggcagttgatttgatccttgttgtcacaccattccttcccttgctctgtgtatgtctgattcttcgaggccaaatgagctgtgccaatatctgaatattcatgtttgtttctttgtttattccactttcagatgtaatagaccttagatcctgccttctgtaaagctggtggttgatgaaatccctgttttcctaaaaaagaaagaaaaaagaagtttagcaagttaactacatttgttcttttatattattgcagcttcaacccgttgaattcgttcatttggtttgagttctttggagaaccaacggatcgagatgttgacctgcttggcggtgtaaagtggcattgtacaatttcattggattctccttattcagaaaacagcatactgtcttgacataaactgttcttcacaggtaattcaggcttggtacgtcatgggaaggctaggagcttataattcttcaaatttgcaggttgggttcatccgttcatgcaaatatatctttttatttcctttgttggctacttaactcgtcagatctttcaaaaacatgtaatgttttcaattccaatgtcagctggccaactcaatgatggactatgacccttcatatgattctgaagaagcttccacagtaatgccatcatctttccatgatatcagtgatgtcgagttccaagacaattgggccagggtttggtgagcattcgaatcatttgacagtttgggcacgatgtctgcaaattcttaaattcccctcacttttttctttctttcagggtggaccttggaacctcagattaccttggtttggatgtattactaaactgcttaacacagttgagctcagagtaagacatctttcactgatcatgtaaaatatagttgcaatctttcgtccatggtggctttattactgatcgtcttattatcaccacaaatatggagatcaattggctcctgaaacctgatctgcgaagaataacctagaattttttttttttccaaaaaaaagaagattaacctagaaagagcctgagaagcctttaaccccttgaggagggtatatactcctaagtgttaactaaactagtcattttacgctcttgtctactgaagtactttgtattcattgagcgctagctttataatctaaataaacatagcacactacatgtccacacaacatctcttcagagcaggccacatgcataatgaaatgttgtatattagatttggaaatattgcaccttataactcagctttgttgccttgactgaacctgcaggcacttgggtatcaaacaagtggtttttggaggcaagaaaatgggtgactgggaagagggcatgacgagctcagattatggatacaagcacttcaagatatgataatttttttttgcgggtacaagatatgataattgacaggtgacatgctgtggtgatgcaaggctgaccgagaaatttgagcaaggactgactcaagactgcctgtatctcgatgtgctcttttatgtaaataaataaattgtcatgagttttattgtcgtgatagcagtgaatttgaactaacagcaaggctaggagaatagaacaattcggatgtatgtgttgtttcagacgtctgtttctttatgatggttcaaggccaagcatgacctgtattcttcttgcaatgtcaggaaaacttgatgagtcaatcaggtgatttttacatacggatcaggaaatttttataaagggaaataaagtgaacaaggtgtcacagttgatcacatgcttttgctacatcattcttgtgcttgggaaaagttgcggacaaactagtagcgtcttggcgcgtcgtttatacagccatggtggagggcaagctacacgagatgaagctggtagctagaccggctgatactccatagtctttatcaaaacggacccattggtacctgcattctcccacccttttcatagtattccacaagctgatattaacatgaagttacaagtgcatcgctcatccatccacacatatttgccgccgttacatagatcagctctcgtggaaccctaaatgttgcaaccgctctacaaataaaatataccagttcagcctatacaccatttcccagatcaatgaaacaagatgccgatcctacatccccgc

SEQ ID NO: 4579 - DNA, 5722 bp, Sorghum bicolor
tgaggagttcaacggtgcagaagccgtgcataggctggagcagtggctcatcaggaaccacgggtaccaggcacagtatgccgtgtctgagctgagcgagaaggacttctggagaatgtttgatccctctcactacgagcactgccgccgcaagtatggcgctgtagggtccttcatgagcgcccactacaagtccaagaaaaggcaaaaagagcgaggaggaggtgctcgaagctgaagctgccatcctagaagctgctgatgctgatgcggagtgatataacaggcttgactttgattccatttccatccatcatggctactctaaacatccagttctgaactatatatcctttccccgataacttcatgtgtgttgttggaagctgttgaataattgtaagctataatcaccttcggccaaacagtcactcatgactcattcatatacatgccatgcagcccgcggcccagtgaaccggcccatggcctcgcgatttggcccagctcgagggaccaggccgtgtttgggcctatatatgtgttgttaattgttatactggtgaaaacgataaacaattcgatgagaataataaaatgtttttaacattttgtaaaaatattgatgaaaataaaaatgttgtcgacttgacttgatgggccctgggccgacacaacacaattttttatccacatgctgtgcctcggaccgaaggccaagcacgaagcctgtagatgcaagacggcccataacggtccgatgacatgtggcaaggcacgacacgacgtcggaccatgccactctggtacggcccgttgggcatatatacttattgatggtttctgataatacattagttggagtttgagaatgtaatgaaagcttctttatgaaaaaaaggttttgcatttgcatctcgtctgtcagcttgaaattgcatgttgtgccatgaaatcagtttttttttgcaatgtattctgataattgccaaactataattgtgatgataattaaaccctgcgggttgccaaatctctgcacacctttttttttttctgtaaggccctgtttagttcgccaaccaaatttttttatccatcccatcgaatctttagacacatgcatggaacattaaatgtagataaaaaaataaactaattacacagtttagttgaaaattgcgagacaaattttttaagcctaattactttatgattagccttaatgctacagtaacccacatgtgctaatggcaaattaattatgcttaatagatttgtctttgcagttttctgacgagctatgtaatttgtttttttattagtttctaaaaacctctttcgacatccttctgacacatccgatatgatatccaaaaaattttcatctacaatctaaacagggcctaagtttgccctgacagaatatacataccaagtcatcggctgaatctttttgtaggatgctacctgtatactccctctatcaaagaaaaaaaaatctcgctttctataaagtcatataatttgaattttgactaaaattataaaaaagtactaacgtacataatacaaaataagcatcatgggattaattatgaaatgtattttataataaacaacttatttgaggacataaatataccaatatcattcactataaatttggttaaactttccataagccttgcactgggtttcttcttcttactgcaaaaagtggcagtgcagtgctactgcctttattattatttattattattattattattattattattattattattattattattattattactactactactattactattatttgttgttgttgttgttgttagccgtaacagtacctactcacgcggacgcggtacatagcaaatggcgggaagcagggattcatttcccgcgctttcaccccgtctcccgccagttttgctccgcctttaggactccgctcccttgagatcccctccctcccatcccatcccatcgatcctctcatctcatctgcccacccgcaagccattccgccgccgctcgtgactgggaagatgatgccattgagccaacccgacttctcgccgtcgcagttcaccgcctcccagaatgccgccgccgactccaccacgccttccaaggtcctctcttcctctcgccgtggggactccctcttttgctttcttcaacctcaatccgtcggttcccttagccatggacttacctgacttgtgtgcttggatttgtcagatgcgcggggcgtccagcaccatgccgctcaccgtcaagcaggtcgtcgacgctcagcagtctggcaccggcgagaagggcgctccgttcgtcgtggatggcgtcgagatggctaacgtacgcggccctagattcgatactcatcttcccctgtgctatgcatttcacagcctttcctcgtattcgtgctttgattgtttcgttgacatgcacatgtcctcgccgttaattcgtcagccgcggttcccttttcagattcgacttgtggggatggtcaacggcaaggtggagcggacgaccgatgtcacattcacgctcgatgacggcaccggccgcctcgatttcatcagatggtgagcctactgtaacactgcttgtttggttctctcatcgtcaatcccagaaattcttatcagaaaacatcaccatttatttactcataaacaccaatgctgaactgaacatccacattgggttatgaccagaaaactacataggtgcctgtgaaaggcatcctgtgcaattggaatgcttcagtaacagttccatctgctgttccttccaaccactgaacctgcctggccatcaccactgtttgccattctatgcttcctgtcaacctccttaacaacttcaacttctccctgcaaggatagtgattctagtgtgtcctgataagttgttgaagccatacaaactgctctgttgatgccaacttgtcaagaaaaactaacctcaaagtaattatatagtgctgctggccttaataactgttcgcagaattcgtgtagactaacctgaacaaaaacaagatgctgcactgttagtttaccaaatcttgatgtaaaggtaaagcacaaaatattctgcaaattgatttaataaccaaccggccgttgaagttcctaccatgccaaatcttgcgtgtcagttccccaaaatgtaccaagtctgcacttcggtgaagatttttttttccttttttgaaaagaaatggctggctggagctctgctaataatatgtggatagttttttttttgtcttgttttataaaaagaaacaatggtcaccaatattaggccaattacataatcctacgttcaaccaagttatccatcctacgttcaaccaagttatccatggctattggcttatcatgttggttgtctgtgattagtaatagttttccttacacacagttatgttatttatgtttctgtttcgcagggtgaatgatgcttcagattcttctgaaactgctgctgttcagtaagtataagctacaatctttacattgttcctaaaggttcagtatcttttctggaggaaagtcgtcatgcttttgtgcggatagatcacagtttttctctttggttatcaagaaatggtatgtacgtcgcggtcattggaagcctcaagggacttcaagagaggaagcgtgctactgctttctcaatcaggtatcctggcagtaagttcgtttaagctgaatgattcttgcaatccagcgtacaaataatatattgattttctttcaggcctataactgatttcaatgaggttacgctgcatttcattcagtgtgttcggatgcatatagagaacacgaaattaaaggtttcaacctttcctgtactaaggtcattgaagtaccccatgctatctttcctgtgcctttgttttacaaggcttctggtttatatcataggctggcagtcctgcacgaaccagttcttctatgggagtgtcagtctcaaatggattcagtgaatcaagcacaccaacatctttgaaatcaaatccagtaagttatagttgcagttattgcattgattatttaatcaaaaccttttcacatatcaccatgtcttgctacctataggcaccattgaccggtggaggaagtggatctgatactgatttgaacaagcaggtgctgcatttttttagtgaaccagcgaacctgtaagttgcatatctgtggcccctcctttttccttgtactatgttttgaccagcctttccaataacttgccctaaataaagtttatattacacataatcatcattttctttcttatgaaaatgtaataattaccctttcacttataacatttaaaaagttgctttgttgtgatgccttgattagcatgtttctcatctttatttgtcattctgttgttgacagtgagagtgagcacggggtgcatgttgatgaagtatacaagcagttcaaacaactgccaaaggataagatcaagtagagctctctctcttcattttcactatcacacacagggaaaaaacagagttctcagcagctccttttgttatgcagggaggctattgctttccatgtggacgccgggcatctttactcaacaattgatgacttccacttcaagtcagctttaaccgattgaagttgtagccgaaataaagtgcagtcagcctgctcgaatggcagaggactaagtatcacttgacagaactgattctgcctccctgtactaaccaaagtctgaaaagggagggaattttgctggtgttgaacctatctatgatggtcctcaatgtatgggttatggaaatatcatgttgcgtcaactagttgatttgcatcatctgatgaagttatgtcaaggaagacttttgatggtgttagacctatcttaggtcctatatgcatgggctatggaaatattatatcttgtgtcaactagttgattttcatcatctgatgaagttgtgccaatgaagatgagtaggaactcttcgtctcagtagtgacaaatcgatatggtgtggtatgttgtcatcattgtgtagtccttttgccagtatgatgtgctattttgttgatgagattatgcgctgatgcagtgctgggttgggataaagttagaagttattatgctgcttttaagcaatagtgctgccagatggaatcgcatacttatccaaggatggtggactaaccaaacaaattgtgaatcagtcatgcatacttgtactggatgctgtttgtccatgtgtgcaagcacctaactacaggagacttacaatacagttcgaattgtgaacagctgcctctccatggatgttgaaaagcttgaattttacactgtccagcctgctatccaaagtctccatcggtcaaactgttaataagcccaaagacactacaagtttactcaaaaataagcctggcaacgaacccaatagcttcctgtccaaatacaaggtgaggaggacaagtgttggcagctagctactaatcatacagttccatcttgtttgcacaacagtagcttttgtaccaatctctgtcctcttatgttgggcactatctttcttgagggcgatctaggtgtaaatgggctaattctgttttaaagaaaaacaaattgtgttacaaatcatatcttcatttttctaaagaaaatccggatgcttatgtta

SEQ ID NO: 4580 - DNA, 3471 bp, Sorghum bicolor
  misc_feature (2438)..(2537): n is a, c, g, or t
tcctttctgctgattgagcctccaatgtcaataaacgccttgcacgacttgctgtgggctgagtaggaaccccctaattctttttcatagttgcatatggggatggcttcatgtttgaagtttctcttactttagccaaatcatgtttatggcaacacaattggctctatatcatattgttggtggtagagaattccatgttaagtatgaattgaaaggttgtatgcactagggtgtggactggtttgtctgtgcggtgcatgtttgtttggtatttaactcgtcatctactttgataaggtgaggagaaaagaaaaatgatcatgaaccagttactaatatttccaaagtctgtgtgcatgcagaagctacgacaaagagcaagctggcaactttgaacgagaagcttgacatcctagagcggaagctggaggtgcttgaagttcaagtgagcagcgcgacgaccaacccttccgtcttcaactagaaaagtccaaggaccggcgtgcatagcttgcagcatcgcagtgtatgtatgtaggtatgaatgttgcgtgaacgtgtgcgactgtgtatcgtcttccagatgttggagaggcatgtaaagcaccaccaccgctagtatcaatgtttgtacaattggaatgttgcacaagtagacggcaagttgcacggttgagtttccgtggaggtaattaattgataagagtgtttgctggacatgttgtgatgtgtttgtgtccgcgctcttagagccaacttttgtgacgctttgttggctccttgtactacctaccccccggttggcagcgatttccggtctgtggtatcatatgggatcatctaatgagtttgagcggactgacttggtttaatttcttgtggaggacttgttatgatttggagtgaggtggtgatatcagttaatctcttgtgggttgcttagcatatgcgtatgtgatttaggttaattatagtccttgaatcaaacatattttcagcggtatattattttattgtggtatatgtgtgaggtgtaaagcaaacatacatgtcaagtagtgagtgcagaatcgaaaagataaaataaaatggagttgggggtggggaagagcctgccagaggaaaagcaatggaatggaagatgtggccctggtgttgtatgcccttgccaccacacaaacacaaactggtgactgccgtctcgcctcccttggtttggtttctctgaatctcctcctgctcttcttctgttggctgttgctgcttctcctctcctcttctccccgtggccacaagacagggctgaggatcctcctccgatcctcctccgtatccatgagagagggatgatctatagcaaaccatagcttactactcggattcgattcgtccttgtcttgttcgtttcgtaagttgtcatgtccatcttctctattagctagtttatatatatgaatttgggagcatgcgaagagttagttgtgtatgcatatgctaatccgattcgtccttgtcttcgtttcttaagttgtcatctccatcttttctattagctagtttatatgatttgggaccattcgaatagttagttgtgtatgcatatgctaatcggaggaaggatgaaaaaaaaaagaaatagtttatatgatttgggagcattcgaagacttagttgtgtatgcatatgctaatcgaaggaagagttgttgtgtatgcatatggtaatcggaggaaggatagaaaaaaaaaagaaatactggggcattccgagaattgaactcgggacctctcgcaccctaagcgagaatcataccactagaccaaatgccctgtgttggttttaacgaaacatagactttatttatccatcagacattgctgctgctgctgctcatcattgcagtgcattcctcctttccaatttgcagagcacgagagaggaggtgaaggaaagatcagaggcgacgccggcatataatttgttgcttgtgatcgatgatgaactcccagaaccttcagctgcagctgcccgttcaggatctgagtctcagagggagatcattcatcagcaagcccaccaataacaaggtgatgcaccaccaccaccagtgccctgcagcttcgtcgtcttcaccaccagctgctgctagaggaggcctgcaggttgcccatcccagcaccagcaggaggcgtcctcgtgccctcgtcgccgtcagagcggccggcggcagtgacgacgcatcaggaggtgagtcgtcgtcaagcggcggaggggaagaagatgacgatggcggtaggtcgtcgtggtcgtcgggcggcggcggcggcttgtcccgagacgatttggagcgcctggttgggaccgacgacgacgccaagttcaatgggttggatcttgcaaacctcatcaggaagaagtacggcagatcgtacgannnnnnnnnnnnnnnnnnnnnnnnnnnnnnnnnnnnnnnnnnnnnnnnnnnnnnnnnnnnnnnnnnnnnnnnnnnnnnnnnnnnnnnnnnnnnnnnnnnncttacatacatacatacggtacctgatgcaggagttcatgggaaggaatctgctggccatgaatgtgatgtggaagtacagggagcaagtgagtagcctttaatataatttgatgcaattcgatcagtccatgcgcatcactagctagctagctagctcataatatatatgcatgaacaactgtgtgtacgtaattaaactcgatcttaatatataataacaataacaatcagagatcgttcccgctgagcgaggaggagtacctactgcggctggacgacgtggccaacacgctcaagtgctggggagccgtggcgcacgtgcgcaacacgctggagaagctcaaggagaggccgcgcatcggcaaggccgtcagcatcttcatcgacatggaccagaccggaggacgctccaacgagtggatctacaagtagctacctacctacctacagtacctactagccaattcaaagagattattactatatatatatatggagtacagtagttattaactcatgaattccactccaacattcaacgagtcatatactactatacatgctgtatatataagcagattgaagattcattaattccatgcacaactagctagtgctgcctcgtgccctcagatcagtcgcgcgcctaaaaaaaggaaaaggtttcaacaggaggtgacctggagaaatttggacgagctctttaattggctcagatgatggctatggcaggaatgagtgcatgagtcttccaagctatagccttggggatccgaccaacttctagggcatgtttggttgccggccacattttgccacgcctaaggttaagtatttgccacactgtggcttgccacattttgtggtaaaatggatctgtttggttcgttactaaactgtgacaaaattatatggctagtgcttggatggtt

SEQ ID NO: 4581 - DNA, 3324 bp, Sorghum bicolor
aagctggaattggatgaacctaacctctgctaggtagtcattgcccgagggacttgattcatcaaagctatggatttcgctggtacctgcagcatgtatacacacagtggattgatcgaaaacaatcggtgcctgtgtttctcttcgactacaggtcgattaaaacgacagatgctagttcataagcctcagcaagatcaagccaagtggctagttcacgaatggggtaccataatagccaatggctgtcgcactcacaaacactgagggtcgagtatcagtgtttccagcatggttgatgtacttcaccaccttcagcagtgaaattgggaaccgcaattatatattagttgcaatagttagctgaggcaatccaggcgaactgaattagcttgcatgttttgaattgtaggaagggatgtacctttgatgtaacattgatccggctctgtttaatttcctgcttaatctgcgaaagaaaaggcagctagcatgactggacgacagagggagagaaatgcatcgatccatgacaacgattagagctatatatctatctgtatactgcagactacagatttaaacaaaccgaacggacctcgggtgaccatcgtgtgcttatgggcatgcctgccaggttgacaacagcagaggagcctctgatgcatgcctcccaatccccttgctcggctattgtgagtccaggataggtggaagctgcgtgggatgggatggatcaggtcatatgcacatgcatggatcaaaaatttggtttcagcaacgagagaaacaaagttaggggctcaactgaacatcatttattatttatgggacttgttatatatgcatgggtgaatgcatcaggaaatagtgattgttgagttggatctttccgtaccaggaaaaactgatgcagcgttggaggcagaccttgttaagacgcaaaccttgtgatcatctgaatacaatgaatcatgtgtatgtatgtgaagagagagagagagagagagagagagagagagagtaggcaagctataagttaatgagtagtgagtgaaggaagcaagcagacccgatagaagcttgtgaaccaatctgcggccaatgaaacctgtggctccagtgatggaaacggtcatgggaggctgctgaaacagataataagcaaattagaggacatatatgtatgatacttactatgttttgtttggtttggtgtgcatcagtaagaatgtaggcagagatagattaaaatgagatactactactccaagctcaagataggatggattatcactgtcagtatacatatataccacaggcggctcagagctgagggcgcagcgcaggcgcaccagccttggcgtcgtggccgttgttccgatgcgagggcgaggctccagcagcagctgcagcttgaggttgggggtgctggagaaacccatggcagcggcagcggcagcggcagtgcccagcggcaccagcaggagaagcacaggactccaactccaactccgatccgtcgttagctggcccccactccaatctcctcccatgaatcatgaatggtgatgccaccgcttgcgtggcccgacccccggccccggccccggcgagaggacacaggagtccgactcggcctcgccgcagccgcaacatcatccatcccagaattcccatccggatatccatcgttggcaccgcaccacccgccacctctcgtctcgtcgactcacgccacgggtaatgaatggactgactgggcttgcaacacacctctccctttgccagcccaacaagcagggttttcagcccaacggaggcaccgcacttttattgaccgacggaccgaccgttcgttgcccactggggtgggaagcagtaaaagctgaagcagctgccgcatttctttcctctttctcattattattaccaacaacaaacttagaaagagaaggaggaagcaggaagcaggaggaggagcacacggcagcaacagaatgcggcgaatctgcatctccaagcttgtgtttctcctgctgctctgcgccaggatgctgcttcttccggcgggcgtatcctctgcaaagatccatggtaaaaatcaatcgatatcgaatctctctggatcggagctttgccagtgctcgaattgacgatggtggtggtgttcgtggcagggaacccagccaacgaccttgtggccctcatcaacggcaagagggcggcgagcaagctgcctgcgctgcgcaacagcagaggcctcgggtgcatggccctgcagtacatctccgagtgcatggccacgggcgccgcctgcagcagcggcaacacggtggcgtgccagcctcccgaggcccacatcacggaggtctacgctgccaactgcggcgtggagctccccacggtggacgtcatctccggccgcctcgtcggctgccaccgggaccgcgacggaccggaggacgcgctgcaggccgtgctggcatcacccaccggcaacggcaacggcaacagcaccaccaccaatgcgctggcggtgatccgcggcaaggagcacacccaggtgggcgccggcttcgaccgcgcgcaccgccgcgggcccttcttctggtgcctcctcttcagcagcggcagcgccaactccaccttcctgctggaggccggcggcaagggcatcgaccagacccatggctgcttcagcgctccagatcgaccttcgtgcaacgccgcgccgccgcgccacggacagcagctcatgttcactaccattgccgcagcggctggaatgctactcttcctctgtggccttgtcgtcgagtagttttcagttcaattcaggctggatgatggatgatttgcagatctgggtccaatgtcatacatatgaattactattcccttttcattcctggaactggaatcctattcgaattgttcctcaacgcacgcaggcagtcgtgtttctctctcgtaacaaatctgcctaagatacagataaaaaaaaatgacaaccgtcatcacaaaataaagcacacttattatccctagaaacaagcacaacgcacacccaaccatctgcactgactcaactagttaatcaacaacaactgaaagctacatagagcctagttttagcatcctgctagtatgctactatgctacatagagcctagtttaagcatcctgctagtatataatactgtagcaatttcacccataaaatgttgtcttgtccataccacaaatacattgaacagctacactcgctccacacaatacaataggacggacaattataagtaataataaggatcctaaaag

SEQ ID NO: 4582 - DNA, 6901 bp, Sorghum bicolor
gcagaagaagcagaagaagcagaagaagaagaagaagaagaagaagaagaagaagaagaagaagaagaagaagaagaagaagaagaagaagaagaagaagaagaagaagaagggatgcaccattttgtaactatactctatctatataaacggtagactcatcagatcttgggcaacatcttctgcagtctctggctgcgctgcgctgctgccaaggataaccatcgcgggcctcttgctgtataatttcgcctgatcatgcccaccaaccagcatgcacaagggtggtgtgggcttttgtgtcttgcggtggttttggtcttttaggatccttattattacttataattgtccgtcctattgtattgtgtggagcgagtgtagctgttcaatgtatttgtggtatggacaagacaacattttatgggtgaaattgctacagtattatatactagcaggatgcttaaactaggctctatgtagcatagtagcatactagcaggatgctaaaactaggctctatgtagctttcagttgttgttgattaactagttgagtcagtgcagatggttgggtgtgcgttgtgcttgtttctagggataataagtgtgctttattttgtgatgacggttgtcatttttttttatctgtatcttaggcagatttgttacgagagagaaacacgactgcctgcgtgcgttgaggaacaattcgaataggattccagttccaggaatgaaaagggaatagtaattcatatgtatgacattggacccagatctgcaaatcatccatcatccagcctgaattgaactgaaaactactcgacgacaaggccacagaggaagagtagcattccagccgctgcggcaatggtagtgaacatgagctgctgtccgtggcgcggcggcgcggcgttgcacgaaggtcgatctggagcgctgaagcagccatgggtctggtcgatgcccttgccgccggcctccagcaggaaggtggagttggcgctgccgctgctgaagaggaggcaccagaagaagggcccgcggcggtgcgcgcggtcgaagccggcgcccacctgggtgtgctccttgccgcggatcaccgccagcgcattggtggtggtgctgttgccgttgccgttgccggtgggtgatgccagcacggcctgcagcgcgtcctccggtccgtcgcggtcccggtggcagccgacgaggcggccggagatgacgtccaccgtggggagctccacgccgcagttggcagcgtagacctccgtgatgtgggcctcgggaggctggcacgccaccgtgttgccgctgctgcaggcggcgcccgtggccatgcactcggagatgtactgcagggccatgcacccgaggcctctgctgttgcgcagcgcaggcagcttgctcgccgccctcttgccgttgatgagggccacaaggtcgttggctgggttccctgccacgaacaccaccaccatcgtcaattcgagcactggcaaagctccgatccagagagattcgatatcgattgatttttaccatggatctttgcagaggatacgcccgccggaagaagcagcatcctggcgcagagcagcaggagaaacacaagcttggagatgcagattcgccgcattctgttgctgccgtgtgctcctcctcctgcttcctgcttcctccttctctttctaagtttgttgttggtaataataatgagaaagaggaaagaaatgcggcagctgcttcagcttttactgcttcccaccccagtgggcaacgaacggtcggtccgtcggtcaataaaagtgcggtgcctccgttgggctgaaaaccctgcttgttgggctggcaaagggagaggtgtgttgcaagcccagtcagtccattcattacccgtggcgtgagtcgacgagacgagaggtggcgggtggtgcggtgccaacgatggatatccggatgggaattctgggatggatgatgttgcggctgcggcgaggccgagtcggactcctgtgtcctctcgccggggccggggccgggggtcgggccacgcaagcggtggcatcaccattcatgattcatgggaggagattggagtgggggccagctaacgacggatcggagttggagttggagtcctgtgcttctcctgctggtgccgctgggcactgccgctgccgctgccgctgccatgggtttctccagcacccccaacctcaagctgcagctgctgctggagcctcgccctcgcatcggaacaacggccacgacgccaaggctggtgcgcctgcgctgcgccctcagctctgagccgcctgtggtatatatgtatactgacagtgataatccatcctatcttgagcttggagtagtagtatctcattttaatctatctctgcctacattcttactgatgcacaccaaaccaaacaaaacatagtaagtatcatacatatatgtcctctaatttgcttattatctgtttcagcagcctcccatgaccgtttccatcactggagccacaggtttcattggccgcagattggttcacaagcttctatcgggtctgcttgcttccttcactcactactcattaacttatagcttgcctactctctctctctctctctctctctctctctctcttcacatacatacacatgattcattgtattcagatgatcacaaggtttgcgtcttaacaaggtctgcctccaacgctgcatcagtttttcctggtacggaaagatccaactcaacaatcactatttcctgatgcattcacccatgcatatataacaagtcccataaataataaatgatgttcagttgagcccctaactttgtttctctcgttgctgaaaccaaatttttgatccatgcatgtgcatatgacctgatccatcccatcccacgcagcttccacctatcctggactcacaatagccgagcaaggggattgggaggcatgcatcagaggctcctctgctgttgtcaacctggcaggcatgcccataagcacacgatggtcacccgaggtccgttcggtttgtttaaatctgtagtctgcagtatacagatagatatatagctctaatcgttgtcatggatcgatgcatttctctccctctgtcgtccagtcatgctagctgccttttctttcgcagattaagcaggaaattaaacagagccggatcaatgttacatcaaaggtacatcccttcctacaattcaaaacatgcaagctaattcagttcgcctggattgcctcagctaactattgcaactaatatataattgcggttcccaatttcactgctgaaggtggtgaagtacatcaaccatgctggaaacactgatactcgaccctcagtgtttgtgagtgcgacagccattggctattatggtaccccattcgtgaactagccacttggcttgatcttgctgaggcttatgaactagcatctgtcgttttaatcgacctgtagtcgaagagaaacacaggcaccgattgttttcgatcaatccactgtgtgtatacatgctgcaggtaccagcgaaatccatagctttgatgaatcaagtccctcgggcaatgactacctagcagaggttaggttcatccaattccagcttacattgcctactttccatcactcctggagcgtcataacactttcagtaaaagatcattgctcctaatgcatgatgcatccatgttttacatacaatttacaacagtctgtgctgtgttcctatgatgtgggtaaaaaagtgcaggtgtgccgagaatgggaggccacggcatgccaagtaaaccaggaggatgttaggcttgtgcttctccggattggggttgttcttggcaaggacggcggtgctctaggttgctgtgtttcatttaactctttttttttttgagggtcaacgggggggaggcgatccccacctggaaaattttatcatttaactctttttgcctttttccccctctcttgtccttttgttttcttcctcaaggagaaggatcattccaatctgcgtggcattattcacctgattcatctgtccatttgcagcaaagatgatccccctttttatgatgtttgccggtggtcctctggggacgggacgccaatggttgcttctctctctctctctcttctgttacagacttagtatacactgggatcctagttactctgtttccagacagatggatttgattgttagtacattcaacttcggcatttggctgattgctaggttttcctggatccatctggatgacctggtcaacctcatctacgaatctctaacgaaccctacatacaaaggtgatctcacttgcactgcacatcctctgatccccttctcttctgttacagactagtcacgcttgaagccatgcaaacactctattgcaaatcaaaacaacttatgaatttcatgaattgtaggataatggtatggatatcacttgaatgcaagatactttatgatgcgatattacaataaattcatattgtggtagcattcaagtaattaggccttgtttagttccccaaaaattttgcaaaatttttcagtgtcacatcgaatctttagacgtatgcatggagtattaaatatagatgaaaataaaaactaattacataatttagtcgaaattgacgagacgaatcttttaagcctagttaatctataattggacaatatttgttaaatacaaacgaaagtgctactattcctattttgcaaaaaaatttagaagtaaacaaaagttgtctttggagacaaggaacaacaatatgaatacatgatacactttattgcaggatttggtacacacatcacttgaatgctggcagttgtgaacattgaagtttgtaatattgtattgtaaggtcatcttcaatgggagtttcatgacacagtttccaacacattcatattttggaaacagtgcataggagtttcatggggatgaaactctctctactcccatgaaactcttatcatctctctcttcattaatatagcgtcacatcagcatatttaatgtgcatgaaactctaatgaaactcttattgagactggcctaatagtatattgagagcagccttactttctgttattaggtgtaatcaatggaactgcacctaatcctgtgcgtttgtcggagctatgcgaacggctggggcgaatcgtcgggcggccctcctggttgcccgtgccggaattcgcgctcaaagcggtgcttggagaaggcgcttctgtggtaacactcatcttctcgtcgtacatagtgctcatgtaaccaataggcaatagtactatttctatagatcacatttgtatgctatttgtggatccgaatagataactaagtttggattgttagtgactccacccatattaaaagcaacttaagtacttaagacttttttatgacactgcataaattaggagagaaggggcagcctaggcttataatgtgtaagactatgaaatgtgtacatgctttggctcttgtcatggatacaacatatttaacaattaataccttggagtttttaacaaaactaagatgttatgtaatatgtgagtttgagtttgagttataacatcagagtagccttagttttggtgcattgtatcatgatcgaagattacattgtcacttgaatttggataacattaaatatatgtgaggaaataactcttgtgttgtatatttttgtttcctgggacatttgagacagtaattttttttgtgtttatgtctactaagagcggacccaaaatttgaggacggtttaatttctagtcttagatattgagctcaagctatatcctacggaagaagcacaacttcggcacttcgctttttttaactcttgccatgtcataaaaataatcttacatagccttgttttaatgcgatgtgagaacgcggacttataaattctggttttaatttggtcgctgcaggtgttggaaggacaaaaggttcttccggcgaaggcaaagcatctgggcttctcctacagatacccctatgttgaagacgctctcaaggccattgctcgagacttgtaggttggcgacagtgagcaatttaatttaatttctctctacaaaaattaaataggacctttaatttgtgacgacacgcatgcatgcatgtgtatagagtttacactccgatcctccggcctcgtttgcatgcgcgtgttatgtaacacttgctctcttttcccttcttttgacatcatcaaatgttgtactcctagtagagtacttcttaatacaagtaagagttcacctttcataaggacagaaaccaaagaagcacttttatgatgaagccaaataatgcaagttcacgctgatgagccatgggtggaagtaatgttcgcactgtcgaaggactaacagattcgacaaataatctcaagcgaacaagttagactctatgttttttttttttgatattttagtagaagagagaaaaaagttagctgttaattaagagttaaactcatatacacgttccaaggtcacacgagagtgagcctggggggcggtgtcggcagggctgttctggagtttgtcaatggaggagacatgcctgaagtggtgaatatacggtgcttgtgcttagcccaaaagcgaagaactgcccgagctgtcgcaattcctgccgatttctttgcgcaacgtcccaggccttactttcgtcctaaaacccaaaatttttcaagattttctgtcacatcgaatctttagacacatacattgagtattaaatatagacaaaaataaaaatcaattgcacactttggtcaaaatttacgagacaaattttttgagcctagttagtctatgat

SEQ ID NO: 4583 - DNA, 2990 bp, Sorghum bicolor
  misc_feature (1)..(1977): n is a, c, g, or t
nnnnnnnnnnnnnnnnnnnnnnnnnnnnnnnnnnnnnnnnnnnnnnnnnnnnnnnnnnnnnnnnnnnnnnnnnnnnnnnnnnnnnnnnnnnnnnnnnnnnnnnnnnnnnnnnnnnnnnnnnnnnnnnnnnnnnnnnnnnnnnnnnnnnnnnnnnnnnnnnnnnnnnnnnnnnnnnnnnnnnnnnnnnnnnnnnnnnnnnnnnnnnnnnnnnnnnnnnnnnnnnnnnnnnnnnnnnnnnnnnnnnnnnnnnnnnnnnnnnnnnnnnnnnnnnnnnnnnnnnnnnnnnnnnnnnnnnnnnnnnnnnnnnnnnnnnnnnnnnnnnnnnnnnnnnnnnnnnnnnnnnnnnnnnnnnnnnnnnnnnnnnnnnnnnnnnnnnnnnnnnnnnnnnnnnnnnnnnnnnnnnnnnnnnnnnnnnnnnnnnnnnnnnnnnnnnnnnnnnnnnnnnnnnnnnnnnnnnnnnnnnnnnnnnnnnnnnnnnnnnnnnnnnnnnnnnnnnnnnnnnnnnnnnnnnnnnnnnnnnnnnnnnnnnnnnnnnnnnnnnnnnnnnnnnnnnnnnnnnnnnnnnnnnnnnnnnnnnnnnnnnnnnnnnnnnnnnnnnnnnnnnnnnnnnnnnnnnnnnnnnnnnnnnnnnnnnnnnnnnnnnnnnnnnnnnnnnnnnnnnnnnnnnnnnnnnnnnnnnnnnnnnnnnnnnnnnnnnnnnnnnnnnnnnnnnnnnnnnnnnnnnnnnnnnnnnnnnnnnnnnnnnnnnnnnnnnnnnnnnnnnnnnnnnnnnnnnnnnnnnnnnnnnnnnnnnnnnnnnnnnnnnnnnnnnnnnnnnnnnnnnnnnnnnnnnnnnnnnnnnnnnnnnnnnnnnnnnnnnnnnnnnnnnnnnnnnnnnnnnnnnnnnnnnnnnnnnnnnnnnnnnnnnnnnnnnnnnnnnnnnnnnnnnnnnnnnnnnnnnnnnnnnnnnnnnnnnnnnnnnnnnnnnnnnnnnnnnnnnnnnnnnnnnnnnnnnnnnnnnnnnnnnnnnnnnnnnnnnnnnnnnnnnnnnnnnnnnnnnnnnnnnnnnnnnnnnnnnnnnnnnnnnnnnnnnnnnnnnnnnnnnnnnnnnnnnnnnnnnnnnnnnnnnnnnnnnnnnnnnnnnnnnnnnnnnnnnnnnnnnnnnnnnnnnnnnnnnnnnnnnnnnnnnnnnnnnnnnnnnnnnnnnnnnnnnnnnnnnnnnnnnnnnnnnnnnnnnnnnnnnnnnnnnnnnnnnnnnnnnnnnnnnnnnnnnnnnnnnnnnnnnnnnnnnnnnnnnnnnnnnnnnnnnnnnnnnnnnnnnnnnnnnnnnnnnnnnnnnnnnnnnnnnnnnnnnnnnnnnnnnnnnnnnnnnnnnnnnnnnnnnnnnnnnnnnnnnnnnnnnnnnnnnnnnnnnnnnnnnnnnnnnnnnnnnnnnnnnnnnnnnnnnnnnnnnnnnnnnnnnnnnnnnnnnnnnnnnnnnnnnnnnnnnnnnnnnnnnnnnnnnnnnnnnnnnnnnnnnnnnnnnnnnnnnnnnnnnnnnnnnnnnnnnnnnnnnnnnnnnnnnnnnnnnnnnnnnnnnnnnnnnnnnnnnnnnnnnnnnnnnnnnnnnnnnnnnnnnnnnnnnnnnnnnnnnnnnnnnnnnnnnnnnnnnnnnnnnnnnnnnnnnnnnnnnnnnnnnnnnnnnnnnnnnnnnnnnnnnnnnnnnnnnnnnnnnnnnnnnnnnnnnnnnnnnnnnnnnnnnnnnnnnnnnnnnnnnnnnnnnnnnnnnnnnnnnnnnnnnnnnnnnnnnnnnnnnnnnnnnnnnnnnnnnnnnnnnnnnnnnnnnnnnnnnnnnnnnnnnnnnnnnnnnnnnnnnnnnnnnnnnnnnnnnnnnnnnnnnnnnnnnnnnnnnnnnnnnnnnnnnnnnnnnnnnnnnnnnnnnnnnnnnnnnnnnnnnnnnnnnnnnnnnnnnnnnnnnnnnnnnnnnnnnnnnnnnnnnnnnnnnnnnnnnnnnnnnnngtcatatacatctagaaagccgtatgctttggaagaagcttgtacagtttgggaaggggttttttgataaaaaagaagaatctacttcaaccgatatgcccttaggcacggccatacataacatagaaatcacacgtggaaggggtgggcaattagctagagcagcaggtgctgtagcgaaactgattgcaaaagagggtaaattggccactttaagattaccatctggggaggtccgtttggtatcccaaaactgcttagcaacagtcggacaagtgggtaatgttggggtgaaccaaaaaagtttgggtagagccggatctaagtgttggttaggtaaacgccccgtagtaagaggggtagttatgaaccctgtggaccacccccatgggggtggtgaagggaaagcccccattggtagaaaaaaacccacaaccccttggggttatcctgcgcttggaagaagaactaggaaaaggaaaaaatatagtgatagttttattcttcgtcgccgtaagtaaatacgtaactaggaatatggaaaattgcatttttggaaattgcaataatgcgatgggcgaacgacgggaattgaacccgcgcatggtggattcacaatccactgccttgatccacttggctacatccgccccttatccagctaaaggattttctcttttttccattcattattattctatttattctgacctacatacctcgatcgagatagtggacataggatgccactctttaaaatgaaaaaaaggagtaatcagctgtgacacgaaaaaaaacgaatccttttgtagctcgtcatttattggcaaaaatcgaaaaggtcaatatgaaggaggagaaagaaataatagtaacgtggtcccgggcatctagcattctacccgcaatggttggccatacaatcgcgattcataatggaaaggaacatttacctatttatataacagatcgtatactagtattctcttaggacttggaagtgtagttgtctt

SEQ ID NO: 4584 - DNA, 4915 bp, Sorghum bicolor
ttgctcagtgaaggggcaacggctagtttagcccttggggctataaatagaagtggtgaccggccttggctggtgctgagcacccttgggacttagtgtccatgcttggggagtgctagtgaagcctctaactcacatatgcttgatagtgatcatccgattatgtgagtgaacgattctagtgcgttgcattgagagattgcatcgagtggcactaggtgttcgtgttgcaagccggtggtgcttgttactcttagaggttgccacctcctagacggcttggtggcttgtgactctgtcgaagcacgcaaggagattgtgcggtgctccggagaagagattgtgaggggtacggtgctcaccccatggggatcgcaaagagcaactctagtggattgcttgtggcttggaggatccccatcttgagagtggatgtgcggcacccggtgagggtttggctttggaatgccaattagctcgtgatccatcaagtgggtgtatcgctacaacgaggacgtagcttagtggcaaccaagtgaacctcggtaaaaatcaccgtgtcaacattgtctactcttctcggtggtttgcattcgctatacacgagtttgtatttacattctttatatacttatgcttgtgtagttgcttttgtaattagttaagcttgtgtaacttgctagttaccttcttgcttgtgtagctagaaatagttcccttgcatggccaattcggtttgtgtaaccttgttagtcacattacttagtttgtgtagctaagtaagttgcgctctctaatttggcattagttgccttgttattgagcttgctagtgagcttaggctttgctttgcctcactagtttgtgtaggagctcccccggtttgctaagtactagttgcataggtttgtgtgaccttgcttctagaattggttaggtgagctcttgctaaggtagcaccttgtttgcttgtttaggatcatttacaaggtgctagagaacttagatagaggggtgtagtcttggctaggccgatagatttaatgccgcatttgtttcggttagccggtgcgataattttttagaaaggactattcacccccctctagtccgccatctcgacccttcaattggtccacccggccgggcgggcgcccctgacatgtggggcgcccactcctggttggctgccaggccccccactttgcagggtctccttctcgtgtcttctagagtatttctgagttgatgttcacgtattctctctatgtaaatctgacatgtggacctccttttgttcttattctgataaccctctgcagaaatagacaatcaccaaaacttgtggatgataacccctatagctagatgatattctgattttagtcctttctcatgctatattgatggttaaaaagagtacttatctaccgtcaatattaccttttatcataatcacaaccttcacacctagaacttattagctactttgtgaatgaaaagaagaataattcatgcttagtaatttcctcatagataaagggtgaccccaagtgtacgcatggaaatttagttagcatgttagagaggcatcaatgacttcttagtctcagcccattctaaaattacttaagtatttgattcaaatgtgaaaaagaatactcttcacgtgttatttggcagaataaaactatactctagctataatgacaaaaaaggattatccaataatagtttgagaatgataatccatagaataaaatttcaaaatgagcttatgaaaaagatagtttttctaaacttagaccacataaatataaagatgcctctaccacacaatttttgttcccatgcatgcataaaaacaccaccacataaaactacttaccgctatccacacaattaatggggtacctacttttttatcattcctaaatatataagttgcatgtgtacacattgttttatgccctggtgttgtcgcttccatttgagagcaaatggataatggtgatatcaagtatgatgaggtcaatttgttttgttattcttatgatttatactttgatttatgtagatacttttttatactttttaagcagatatgaagagccattcattaaatctcataccatgttttctctcaatatcatccacttggatttttgtgttccaggaatatgtattgaatgcacgaggaattaatctattcacatgccagtggagacctttgaactttgaaccaaaagccgtgatctttctatgccatggtaacttggttactaatgtgatgtttttttatttctcaatccaagtgaagttgcctttggttacatatgtattttattcctttctacttttttaggatatgccatggaatgcagtatttcaatgagaggtaaatactgtaatttggtgaatttagtgtgcacctttacttaaaattatgacaatatcatcgtgaatgaaaagtgatgagtttagactaactatggtagaaacatggatgataattagaaaccacacatagacttttagtgtcatattagggtaatatagttatagtttaacatatgtagcatattgggattagcttatacatattgggattattacttttaggcacaggtacaaggttggcgcaggctggatttgtagtgcatggaatggactatgaaggccatggaaagtcttctggacttcaaggatatattagtagttttgatgacattgtggtcgattgctctaagtactttgcaagtgtctgtggtatgttttacaaaatcaatacaagtgtaaatgaccacttgatttaagaaaaactttataaaaatttatatgaagaaattccaattagtctattattagacttgatgtaaaattttccaaactaattgtttttattccccatgtatagagaaagaagagtataagaaacaaaagagattcttacttggagaatccatggggggagcaatcgtgcttatgcttcatagaaaggaacctagcttttgggatggggccattttggttgctccaatgtgcaaggttactttccaacaatttgtcttttttttctaatttcctttagatgcattggcatctttgataagtttcctatagttgttcgttagaggacactataatgtgttgtaagtttgatcatgatattgattattattgatgctaatattcatatagatagtagaagatatgaagcctcatcccattgtgatttcaattttaagtaagctcagcaatgtgatccctacgtggagaataattcctaatgaagatatcatagatagggcaattaaaagcgaggagtggcgtgaagaggtatggtaaaagatatgatgacccaatcctagaagctaatttgttccatggaaaacattttttgtgctacttgttaattcctttatttatcatcaggtaagaaataatcattattgctacaaaggaaagcctagggtaaagactggttatgaaattttcatggcaagcttggatattgaaagcaatcttgataaggtatgaggaaagtttatcattgtgttcgttcttacaatactcttgtgattcaaaaaatggcatttgagcttttgtgtgcatccaacctaaaaatttttgagcgctagacattttggataaatgactattttaattgttgtagtgtccactgattaaaaataaacgctttttcataattgtatatattgggaaaattcaaggtttgatggtgtgtatcaacaaataacatataagaacagtgttcttgagcaaaatttgccttctactgaacatgtagtttcataatcatagagattagtttgttcttgatggtgtaaatgtgcaaaaataaacaacccttgcttttttttctttttttttcaactcaacaacccttgttttcacaaatgttgtaaattatattcatgtggactacacatgcgcttattttatttgtacatggaaaagcactagaaagttataaatgaataacaagatactacatagtttgaaagaaatgtgaaaaataaatcatgtgtgaccacaactgattttgcatcattctataagatatcatccatcagttagattttgcatggatgttgtatgctgcattctgtcactgaaacaataatgcttgtttgtgtttatatctatgtccgtgtcttcgtttcgaataggttactctaccattcatcatagtccatggcggtgacgatgctgtaactgaccccacagtaagtgaggctctatatacattagcgaagagcaaggacaagacattgaagttgtaccctgggatgtgccatgctttgacttcaggagaacccaaggagaacattgatattgtgtttgcagacatcatcaaatggttgaatgagagggtaccgtcaatttcctagcttggatcctatagtggtttacagttataagaacaatgttgttagccaacaaacattgagtatttgatactacacatatttaattttagagagaatttgtaacgccaccttgtaaaggtagacgatagtaaaccagatgtagttactagatttgatattttataatttcttgatgtgagggctgacttgtagttatttagttgggtgtaataagtgtttgacaagatgacatccatctgtggacagatggaacagtcgatgatagtgttgacatatgtgagattctcgtaatcactactggaatcacacgctttgcctagtgtctacggcactcggcaaacggcaaaaaacactcggcaaaccgtttgcctagtgccacactcggcaaagccaagacgacaaaaaaattaacggcaaaggaggctttgccgagtgtcatttatcgagcactcggcaaaggctttgccgaatgcttatttgacactcggcaaacaaaagta

SEQ ID NO: 4585 - DNA, 4548 bp, Sorghum bicolor
ggttgaggtcttgtttagatccaaaaagtttttggattttaacactcactttcatttttatttgacaaacattgtccaatcatagagtaactagacttaaaagattcgtctcgcaatttacagacaaattgtgcaattagttttttttatcatatttaatgctctatgaatataccataagattcgatgtgataaaaaatcttaaaaaaattgtttttttagtaaactaaacaatgccgtgccgtgggcgtgggcgtggagaacatgcaatgcattgcatggggaacatcgatgaaccaaagttaatgggcacactaaactgcatgccccagacacagttttaaaatttatttactaatatagcaacaaaaaaaaacaaatatatgcacgcccgcacgcacgtcctgtgcatatatatatgcacggacgctattcaaatcaacagggagaggacagtttggtcggtggagtatctatctacactaaaaaataccgccctcctctactcagctcgtccccgatttttttaactcctcctccaaatcacaatcagatatcaaatcaaatcaaatcattctaaatcgaaaaaaaaagaaaatattaaatcaaatcaagaaaaaatataagtcaaatacacagaatatcccatcatgctcatcttgtccttggatattttgactctctcctccaaatcagaatcggatatcaaatcaaatcaaatcgttctaaaaccgaataaaaaaaagaaaatatcaaaccaaatgaaatgaaatcgagaaaaaaaaaatcaaatatgcagggtatcgtagtaccatcctactctgttcagctcatccccaaattttttttgccttgctcctcgaaatcagaatcgaatatcaaatcattctaaatccaaatcagaaaaagaaatatcaaaccaaattaaatgaaatcataaaaaaatataagtcaaatatgcaaagtatcattttgactcgctcctccaaatgagatcgaatatcaaaatcgaatcaaattgtttgaaatctgaattttaaaaaataaaatatcaaaccaaatcaaatgaaatcggaaaaaaatacaagtaaaatacacagggtattgtcgtaccaccctgctttactcaacttgtccttggatttttttgcatgtctcctccaaatcagaatcggatatcaaatcatatcgttccaaatccgaattggaaagaagaaaatatcaaaccaaatcaaatgaaatagaaaaaaaatacaagttagtgtgttgttgcaactgtattgaaacttgacctcttgccgcctgcgcgagggctcgtgaactagcaggctgtcactgtaaaaataatagtatcaggtacaataacagtgtgattcgactgttatatcattcatatacacgtaaaagcggagagagaaagcaatgcttttgttgatgagcttgtgacgcatgtcaagacgctttttctaagcagaggttaactcttcccatcctatccttgtatattgaataagaaaacaatatttagactatagaaagggactaattgttgtatgtgctagactctaaataaacttgtctaataatgacttggcttggcttatagataaattttattaggcttgctctaaaacctgccctcacacatgatccgaaacttgtggggcaataaaaagcgaaactattctgtatattaagctcgtgctttgtgctacctgaaaaaaaatacaaacaggtaagccattgcgtaacaaaaaaaaaatgaaaagaacaaagaaacaattaagaaatccgcctacctgatcgtgcattgtgctcggttactaatgtactttttaaaaattggaatggatggatggttttcctctgactggctggctggctgcctgctgcttataggagtactatataagtagacgcatgcagtacccaaacgacgacgccgccaccaccgcaaaagcagcaaaaccttagcttgttcaccaccacaaccgccagccatggcggcgacggatcatgaggttgaggaggcggtggcgaaggcgagagaggacgacaagagccggcggcaggtggacggcttcgacgctgggaaggcgccgccgttccgcattggcgacgtgcgggcggcggtgccggagcactgctggcgcaagagcccctggcggtcgctgtggtacgtggtgcgggacgtggcggtggtggtggcgctgggagcggcggcggcggccatggatagctgggcggtgtggccgctctactgggcggtgcaggggaccatgttctgggcgttcttcgtcttgggacacgactggtacctactactctagctatacgcgcgccgtcccatcgaacgttcctttaatttcctcctcacgacgaccatgatcgatgaccatttgtccatgtgtatatatatgtaatgtttaatttggtgcagtggtcatgggagcttctcggacaacgcgacgcttaacagcgtggttggtcatctcctccactccttcatcctcatcccctaccatggatggtatatatgttcttcaattcctcccttattagcttgctttgcttgttctcttcaatttatatatatatatggtcatgcataataataataataataataataataataattaataataataatatttaataatgatatgatgcatgaataatataatgcaggaggatcagccacagaacacatcatcagaaccacggccacgtcgacagggacgagtcatggcacccggtcagtacatctcttattgtatagtatacgtagtgcgctagctttccatcttataccatgaatgagcatggtatatatatagatgatgccggccagtgttttctgagctgcttgaaaaatgcaatgcagctgacggagcggcggtaccggcgattgcctcctcgcgcaaagaagctaagattcacgccccccttcccgctgctcttattccccctctacctggtacgtgttaataattaatctgaataatataagaattaatatcatacacatgcatgcatggagcatcattatatctcaaaattttccaaatgttaattatattcagtctacaactgatgttaagcatgcatggagcaattatatttgtttgcgctttggatgcatgctgcagttctacaggagccctggcaagaggggctctcactttcttcccagcagcccactgttcagccccaaggacaagggcgacgtcatactctcgaccacctgctggtgcatcatgctcgccttcctcctcgccatgtcgtgcgcgttcggcccactccaggtgctcaagatgtacggcgttccatacctggtaatatatattataagaaaaccaaccaccaccaattaatcactactacgtatcatacgatatatatatatatatcgtaaattaattaaatcagtaattaataagaagggatgcatgcattgtaatgcaggtgtctgtgatgtggcttgacttggtgacttacctgcaccaccatgggcaccaggagcgcctcccctggtaccgcggcgaggaatggagctacctccgcggcgggctgacgacggtggacagagactacggctggatcaacagcatccaccacgacatcggcacccatgtcatccaccacctcttcccgcagatcccgcactaccatctcgtcgaagctgtaattaagctgctagctagctcatatatatatatatatatggcgcttctgaaattgttaccattgttgtcttgctgctgcattatattcttctgtaatatataagtagcttaattatatatgaactaaatttgaaatctggtttgaaaacaattaacagaccaaggcagccaagccggtgctggggcgatactaccgggagccacacaagtcagggccgctgccacttcacctccttggcgtgctcctcaggagcctcagagtcgaccacttcgtcagcgaccatggcgatgttgtctactaccaaactgaccatcacctcaacgacactactactgatgatgctcataagcaaaaatgacttgcatcattgctgggagggatccattccatgcctgcgctttgccagctgggaataatgatagatgcccgtacgtacgtctcgatatgcatacggttgatgttggtgttgaatacctcgcgctctcgtattcgtatacggagtagtaggtgaagtcagttggtgcaatgtattccatctgttcgtggcctatatattatgcaaaaaaataatgtcagaataattaaatcacatgtgtgagattgaataaataaccaatttctccgcatcgtttatatattaattgtacagtatatatagtaggatcaggagtaatgcatgcttagctactctatatacctctcaaaaacgattgtgtactataaattcataataggcgaaggacctgctgtataaacgctgctggggttaccggccgggcatatacatatcctcctttcttatcagcaaggcctgctgtactaaattcataataaggaccccagcagcgtttcgatcgt

SEQ ID NO: 4586 - DNA, 4338 bp, Sorghum bicolor
gacgaaagtttttgctaccttatttgtgggtatatgaatttgtaatatttgattttatgatgattcctaataaggactgcaaaactaaaagactcgtagcttgtttattttttgtatactcagtattttgtttacacatgaatacatttttctgttctcagtatgtatctcatcatcctacttcgaaatgggagcgtcttcggttatcagagctgatgcgttttttgtaaatatgtaacatttagaggacaaactacctaattatattttgatctgaacaaactagctaattatattagtttcaaaaaatatactattcattagtttatctaggtagaagtcatatattatgatattcaacaacggagggataggatggagtacttatttattgaggccttgttttgtttccaaaaaatttgcaaattttttcaaattccccgttacatcgaatcttacggcacatatatggagcattattatatatagataaaagaaataattaattgcacaatttacctgtaatttgcgagatgaatcttttgaacataattagtccatgattaaataatatttgttaaatacaaacaaaagtactacaatgtctattttgcaatttttttttttgaactaaacaaggcctgaaccgttctactacctaactgttccggttgcctacttttgtttctttgaacggtatctcctgccatccaggtacaaagcgacgtacactattacatatgcatgcaattattaatcacatatatagagagcatatattccatggaacaacggattatacattgtcattcatattcacagagccacagcagagagggcatcccgcatgcatgcatggagcgtatacgtatataataactaatgagatacatgcatatgcagtactccttctgtcccaaaagaacacattctcacttcctgagtagttatttttttttaactttgatcaattatatattaattaaagaatattaatatttattattaaatataattttataatgaatttatttggagatataagtgttacacttattttctataaatctagttaaagttgagaaaatttaacttgcatgtatactatgtcttctttctgagccagagggagtaatatattactgtgctgattgcatgcatgtagcatccttgagtacagtatatatgtacaaacatatataggcacgtgagtacaatacgaaagtaatcaaattaaagtatgctagctatagtagctacgagagacagactgatacacctactcatcatacaccaagcggcgactcatcatcagaattcagaattggagtagcaaatatatgtcatatgggcatgaatattatcctctctggcactctgtctcacgtgcattggacttatattcacaattggcatgaatattatcttccttcttcattctctttcacaccgcaccttctaggtcagttgttccgctcatgctcctgccataccagatggagacaggattaattataggaataaataaattaagctgatacaaacaaaaaagattagttcctggtatgaccaatatggaacacaagccagagactttagggcaactgattagtccacactccacacattttctatataaaatgtttgtcagttaggaacttaggattggttgtagtagtttcaccttttccccaccttttgtcttgattcactagtacatactagtacttcttttcagaaaatccatatatatgtatatttataactatatatatatggggtgtgtgcatatatacatatatgagatcacttgtcatctcacacaacgccttgcctatataggcacacatatatttagttattagatggatagatagatagatagatagatagatagaatgatccatgacctcacctttgttttggatttctctctatcctgctacttcttttgagtgttagctagatcggtgacggccggcatgatgcaatagcaacacaaaagatgtaacaagagcgagcgcgagcgagttggacttggacctcagctcgatcacccacccatcaacatctactactaagctactagcttcttgttcatcgtccaccggtcgcgcgcgcatggcgggaggtagcaaaggctgcgatgagagctctgcagatcatcagctgctgctatccagcggccaggccggggacgacggggaggatgatgctggtggcgccgacgacgtgcctcccgccggtcgtcatgacgggagctcaagcaatagcagcacggtggagctggatgaagccggcggggacagcggtaggaaggtcgccggcgcctcgccgtcctcggtgcgcccctacgtccgctccaagaacccccgcctccgctggacgccggagctccacctctgcttcctccgcgccgtcgacaggctcggcggccaagaccgtaagcaaccatgcacctcctgtgtcctgatttttcagtctctctcgtgatttcagttcatttttcatgcatgcttgtgttgtgtgtgtatataggtgcaactccaaagctcgttcttcaattgatggacgtgaaagggctgagcataggccatgtcaagagccatctccaagtatatatacatatatatgcacatctcttcacccttcttatccccaatttggttaaatttatttcttgctggtttatttcaccatgttctatattttcttttgatgattttcagatgtataggagcaagaagatcgacgactcggaccagggcaagactaattcttgagcaacatctcgttgtttcagttcatagacacatcagttatcgctcatgtatatacaataactacccggcccatgacatggtaaattatactactcttttacaatgataggtgctactggttcatggagagatcttcatcatcagttgcaggatgggggacaagcgtacaacctcggtcatctctccttccatcacggccagactggtgctagtaccatattgtcagcaaggtagttgggtggatctatggctgatcatgcatggaacacttgcaaatataaccccattaaatttctacgcctttttcttgcctcaacatcaataagcaggcagcacatggttctcaaactaataatgccattaattggtttatgtggactaggtttggtgcatggccccattggagcaattttcatgatccatcatatttgcttcacagtcaccatcttcttggatcaaaacactactactcatcaacagctgaagccgatgtattccttagaaaccgagctcagtatactgctagagctactagcaacactccagcgtctactactcttcagaggtgtttaaatgatcaattcatgaatcatcatcaacgacgactgtcgcaaaatgaggataatatccaccatgatccccttgatcttgaactcgcattggatattggcccaagccaagacaagagaataaagagatcatcaggttgtagctggagaagacatcaagaagaggagaatgtcgggaatcaagaagtcgagagtgctactgatgatactcggctatctctttctttgttcccatctcctccttatgtgaggaccagtagtggtggtcatcataaagtcctaggtctcaatatggaaaaaggcacagcgcatccgacaaggacaagtactcttgatctcaccatatgatctagctaggtgcagtgtggtgatatcttgtggtacttatccatttatgtagaggaagacacatatgagtatgaaatatcttcataggtagagctattcattctatattatacatgcatatatgatcttttgagtttggatatgtttctaataagtggctatgtctgaaaatattttgttgatgttgtctttcaagttttaaccaagctggccaaattaccatttatgtcgaatgtagttaagtagtgtgcatgtttgataagtacatatagcattcctgcttatttaaaagcaatagtttatcaagatttcatatacacttaagaattatttagatatgatcatcatttgaaacagtggacatatatgacatttcatttttttatgattagaagggcatacataaaaaggatatttcagcttccccaacttcattaagcatgtcagtcatttgttgtaattaacaatggacttgagatatattgtatgacttgttctacaaggtgttcttggtcatgcatatgtctaggtgaagttatcttcatcgttaattagttgactttgtctgttttggcaaggagctcgttgtaatgttgctaaaccttgctgcttggacgttgttgcgcctttggtgtttc

SEQ ID NO: 4587 - DNA, 6670 bp, Sorghum bicolor
gaggccctgatgattgtaattagtatgtttcttcgcgttttttgttgctcagatttgggtaccccttattatgatacccaacaaacacataacaagtgcaatccagtctgaaagtgtatagtttgttcccttgaaaaaagaaataactctgttacctatgtcccttaaacctttcctggaaggtaccatccatctaggcatccagcaatttccaaaatgtagtacaaattattcaccagcaaaagactcgcattcatattacctcgttcaagggcctacaaatggaggatacaattacttgacaggacacataactcatgactatttcttctgttgctcatcatgcttgcgccatgggttcagggcttccctcatagcttgggcctctggactgctttcccaagctcgtttttctgactccaagacaacaaccttatcatctgtagcatataaccatggagaaaaaaagatagatatatgtaagagaccttcctatgcaaaactaaaaaatagagagcctgacaggatgaatggtactaggcaatctgaactcgttgtgtggccaccaaaggatcagaagtttggattgttgttacataggaagatgcactgaaccaacaactgttgattcgtggtaatttgggggtactttggcaattacccagtgacttaaagaagcccaacagtttcatcgtcaaccatcagctggtctgaatttggatggcaggaaaaatgaaactgccaattggatctagaagtgcagcaatgctgcagttgaaaattcgaaaacttcgcaatctacctaaagctacctacaggttaaaaaaagaggggactggatgcatgctctcaaatggacagccactaataattgatttaagcgtgactgattattagagatcagaaacaaattacaaaggtgaggggcgttggatgctgggcagatcagggagggagaaacgtacagaagcccgtgtggatcatgaagagctccatggcggcgccaatggaggccccaaccgccgcaatcttcaggtaccagcccgcgaacctcatgcatgcaccctctggattcgtccctcggtctgggagagtttcctgctagcaatgttgaggtaggggcgaagggcgttggtacgggtcggaagctagtggtggccggagatggggacggggacggggacgacggggaccaaaccggcggcggcgggtttctggtgaagacgagtgggggcagtgtgttgggctcgttgaactaattccacataaggcccatcacggcccatcacgacaacatgtacttttttgttttgttttttttaactttcttttggattttgtccatattttttttggaatgttgtaaattttaatatgttgaaaatggtacagttaaaatcattaatactttttttgcgatcatttcttagtatgtttatactattattagggtattaattaatcgttaaaactagtgtagtgatgactagagggggtatacacttctttagcaaagggcactttaattaaactgaaatgtttttttagcgatcgtgcataagcacgtttagactgaaatttttttgaaatgatcattgaaggcgagtagcaatctccaaagatctgttgggcagaattgctccaagaaccacacatatcatttggttcgtctgaaaaccttctcctcatgagggccattacccattggaatccaattgcacggccatggttcacgcaaaaatattccaaaattgtcagctttctgacgtgtctacattgaagcagtcagcatcagcatcgccaagaccacacgtgccaaatggacattatgcttcaaatgccaatcggtggacagcaaaccacgcttggtaatcctacacgattgtagtttgcagagaagaagaaaaaaagagtggtttttctttatccaccgatttaaatcctagttgaaatataatagggattgtacatatagtgctttctagaagaattacaacattctttttggtggaattctttgcatttgtaaccatttggctgaataggaggcgagatattcttcctctcgctcgcgcgcgcgcatggtgacctcgccgctggtgacggtgagggcggctgccttcgctctcaccctgaccccgtcatcacggctcagccgcgcctcctttcgcgcctgcctcgcacagcgtcgccgccgccgttggccccctcgatgtagcgggaagcaagctgccgtggtcgaggaggaaacaccatctccgcaggaggccaagaacggcgagggggaacaggggcgcgggccgcagggatggtttgctctggatacgatcgggctggacattctcagcatcgccctgcccgccgccctcgcgctcgccgccgaccccatcgcggcgctcgtcgacaccgccttcgtcggtcacataggtgaagcaaagctttccccttttcctcagtttctgcctttccggggggcggtttgtggactgctgagtgctgatgcaaatctcatgctacagatggaaacgtttcattgatctttcctgcttttcctagtccatgagccccagcacctgtttaattaattttatcaatgagcatctactgatgtttaaacacccgtatattttgtgtcatcaggttctgccgaacttgctgctgttggtgtatcaatttcagtgttcaatttggtgtcaaagctgtttaatgtgcccttgcttaacgtgaccacatcctttgttgctgagcagcaggcagtggatgatgattctgctgggtcaagagaaggtaagctgctgaagattggagtgtttgttgaaaataaccccactatttgtgttacactaacccgatatttagttctcacttaggatacgactttccaaggtctcctgaggagttgacccagaaaaggaagtttcttccagcagtatcaacatcactggctttagctgctggtattgggctgatggaaactgtggcactgaattttggatcaggaacactaatggacatgatcggcatacctattgtaagtataaaaatagcttcatttctttcacttctcagaactttagtattgactacttgacggccagttggttgtccgcttagccagtactttttgttatcttcatgaggaaatgttgcatcagttagacaattacaccacccaaaaactttcatcctctagctatgtttctttaaaataaaggtatcatgtacctgtcatatagacatatagctggtattacttgttgaattgaggaccatgactaactgtaatactaactctttattttagttttgacatttgacccccagttttttattatttgtagtccttaaagtatctttactcactgtcaaacctcatgtgttgtatattatctatgcaggattctccaatgcgaataccagctgagcaatttcttacatttagggcatatggtgctccaccgattgtgatagcacttgctgcacagggtgcatttcgtgggctcatggatacgaaaacacctttatatgctgtgggtaaagattgtacaaactcttttatctgctgaatgaacaaactggaccatgtgaattgttgcaatttatgcatttcttataagcaagtttcaggatgaaatgacttgtgcatgtagttgtcactgcagtggtctgtacacctagtacagtggtcatctagaaatttaacaataatggacctgcaaatgttatcaattttagatttaaagttccccactaatgagtgacaataagatttaggatgtgattgctactacaaatgcaaattctgagaagtttgttgtcttaccagagtttgttgtactgtggctgcttctgcttctccttaatgaaacacatgccatgagggcatgttcgcgaaaaagttctgagaagtttgctgtatgattgtcttatttatgatgctttatgttcctgcaaatgacaaaagtaaagatttaagcactctggatgcaggtgttggcaacctcataaacgtcatacttgacgccatacttgtttttccacttggtttaggagttagaggtgctgccttggcaacagtgacctcagagtatgttgaattcattttaagaatttcatgtgtttcctttgttggattgtcttaattcctcctttttcatctccgtaactgcacccatgagaactaaatccttggtacaactatctgcctgttgtcaggtatgtgattgcttgcatcctcctctggaagctgaatagtaaagtagtactcttttcccgaaatgtaattggtggtggaatcatacgttatctaaaatcaggttggtggatgctctaaatatttactaacaagtattgatacaggacaggcttcttttgttgctaaaactttatgttgcaactttattaatctttaacatactccaaattataggtaactagttcagagcagagctccatgaggccatgatagccactttaactggaaactattctgtaggtggacttctgattggcaggactattgcagtactcctgaccatgacactgtcgacatcgctggctgcaagacaagggcctgttccaatggccggccatcagttgtgcttgcaagtgtggctgacaatttctctgctcaatgatgcgctagctctggctgggcaggtctgtacattttacattatgtgacatttctcgtctagggtcttagtatgtgttctgttttaaagtgtccatagtgcaatgcaggctctacttgcgagtgaatatgcaaaagggaattacaagcaggctcgtttggttttatacagagttctgcaggttaataaagcactttgaaattcagaaatgctgccggaatatcttacctccagtcataagctgcttgctgatatgttttgttataaatgtagattggaggtgtaactggaattgcactggctgtggttctgttctttgggtttgggtctttctctgtgctgttcacaaatgatcgggcagttttagacattgccaaatctggagtctgggtaatgaagaataattggaataaagcacctgactttcagaagtaaagcatgattctttatgctcattttgacaatatgaactcttgcagtttgtcactgtttctcagccaataaatgctattgcattcgtgatcgacgggctgtactatggcgtgtctgacttcgcctatgctgcatactctatggtatggatatcgttttctattgtatccctcattaggttgtcataactaaacgtagcgggattatggcgtgcttacaattttcggcatctgtgtttctcagttctttgttggggctgtttcatcagcattcctacttgctgctgctcctaagcttggtcttggtggtgtttggtctggtctagttctttttatgagcttgagagcagcggctggattttggaggtagtgcctgatgttccagctactccttttctgaaaatttggatagcgtaaaccttggtgactcatagcattttgctgttgtgtgcaggttagggagcaaaggtggaccatggaagcaaatctggtcagatactaaactgataaatgacaagaaatgaccatgtctaggtgatttgacgggaagatggaaaccaatatcattgacagctaacgacaattacatgtaaataaccagcagaagttgtacattaagtagaagagtattaactgtctaggtccttatcttacaatcatataaattgtgaactactactaagttcagacttgaggaaaaggaaatattttcctgtactggagtcttgaacagaagcagcatggaagtcttaaattttacaattgttttttccccttgttttcaggttagggagcaaaggtggaccttgggaggctatctggtcagatagtgagtaaagcacagatatgaccatgtggattcgattgttcaattgatctcccacactcccacagccagcaggtaaagggtaatcgtagcaacaaatgtgcatactgctgcaggtcatatatagccctgcgtaacaggtagctgatgtagctctgtggaagatgtttcacttgtaatggtgttggatggctgggctgtcttgttctggctgttggacactagtagccagtaggagctcacagctttcaactgtactaggaagcttagttatatagtaacaaaaaaaaaagaaagaaaggaaattgtgttccaatagaaaatcccttcctgtaaatttcattctggaaatccttcctgtaaatgaaattttgtccaacattctaggatctgtaaatctggtaatcatttttagcactatataaactcagtgattatctgaaatagaagaatctgagttggtcgttccaacattgtgcaagtgcatctgttcggtacatgggccttgaggtaacactgctagcgttgggggcatcgaaagattcaggacagaacaattcgtcttcctcccccatacatctctcttcactcaaaagcttcctcttctttaattggaaacttctaggaccttctttctctagatcctccatccccaattgcttgttgaactccaaacctccctctgccctgaggttgtgtgtactccgatgatatctgaatcgaagttgtttgtgaacaagggatcatcggacattgcaaatttgctacgatgggctctg

SEQ ID NO: 4588 - DNA, 9551 bp, Sorghum bicolor
gtattctcatgcctaatttaattcgtagtatgtcttttttactcttttagtagctctagaattatactattaccactattctaaattagaagatgtttttggcttttttagatataaaatttttgctatgtattttggatgtacactatgtttaaatactagtaaaaataatgtaaagccaaaatagtttaaaaatggatggagtacatcacatgtgtgagctaataagtttatagcatgccaagatatagctagccctcctcgcaagttgccttctttttctcgtccacttctcgacaacttgcgttctctctagtagtctagtatagagtatagtcttggcagtgctcgctctcattgcaattggaacatttaatttgtcactactacttgttattaatggagtgtggagtctataaaatttttccacttacataaaaaggtgaagaaaaatgagttgccagtgttgcttgacctatcttaccacacaacaaattctgattcgagtatgtgcatcattttcatagataggacaccataattatatggtgaaagtctttgtcaatcacatctgttataatattaatattatcaatgatcacattttcttgatgtagacattttcctatgaagaacaaaaatgcaacaaaagaacttttatatgcctagctatatactgtcccacaatgagctaaccttgtgcacaaaactaaaaaaccattcatgccttctctctggttcgaaaactactatatatatacccactactaccacttaaacaaaattataggtttaataatagtccagcaaaaaaattgttcgtgttgtgttttgataaattgtgcatttttttttgttgaaatgctacattataaaaagaaagttatatgaatcgtctcaagtgaacataccaactctgcatcaaataatatgaatattaatttcaatactattctgacacgttcaagataatggtagggaaagggaagagtagtagtacaccatttcaattcagatgggccgctttctccttcacgtgtgtcgtcaatctcaaatcgctttgacttcttcctccacggaacagcaacagcaacagcaacagtgcgcgagaaacgggggacgacgacgcgaggaattggaattgcaatcagacaaaggctgctttcctcgttcgttcaaaccacgacagacgcaagctcgatccgtgacaaaccacgatcccacaacaaacaaagaaatgcacaaacccatcacatcatccatcgctcctcctcctagtgtaagccagtgaattggatcgatcgaatccaagaaaagaaaagaaaaaaatagcgaaaaggaaaggaaatcgtcccttcaagcctcctcctcctcctcttcgtcgtcttcttcttcttcctcctcctcctgcggcggcgccccgcggacggagacagattcagccgaggagaggagccccgaaaagcagcagcagcagcgagccgcgcgccgcggcgcagcgaggcgtctcgtcagcgtcgtctctatcctcgaggaggaaggaagtggaggcgagggaggaaagcgaagcaagcaacggacgcccgccgaaagaaagaaagaaaaaaaaactgacctttttctccctctttctcctcgcattaaaatccccccccccccctccccgtgctccctctcccaaatcccgagctctccccctcttccgtcccctgccctacctcgccgccggcggcgcgcagatcgcggcccctcgcccgtaccgatcgcctccgcgcaccttcccgtccgttcctgctcgggcgacggcggcgattcctgcgtcgcatcgccgcctcctccttctcttcctccagtggctgcttgggctacggcggttcctgcggtcgcctccttcctccatcggctgcttggcggcgcctcctccttctcctcctccagctccgggaaagaagcaagcaagcggctagcggccagctgcttttctcccggcgggggtggccatggtggacatcagcgagtgctcgccggtgccggagtccgtaccggcgcacccggacccggcgtccgtgtccccggacgcgtggcggcgcttcgagaccgccgcgctcgccgtggtcaacaagatccagcccaccgccgcctccgagcaactccgcgccgccgtcatcgagtacgtccagcgcctcttctggttccaagctcggtatcaggtactattcatcattccggtcaccttcagtctcagtgctctgtagcttgaaacatcttcagtagcatcggcgagcgtaacgcctaggttttcgttatcagcatctgttgtgccatgagccatcacattcttcaggttaggcaaatggttgtttaagtgctttaggaggaatacataagagtctcagtgccattttcccgtattctaggtcataaattgaagctaaagatgaacattctaggttcgttcctactgctgagttgctagttaccatgctgagttgtggattggagggctggacataccgtgtatcatactgtgttctttttctgtggcatggcactacatacggtactcatgttacccaagaaggaacagctgcatgtttgttatgccccagtcaaggcattctgaacatcttgcgttcagctggaaatggtctgttaggatgtaatgtaggtttgaatcatagaatctaagatcttgcttgatttaatctgagatacatttgcactatttaaaatatactatgtcattcgtttaatgataaatttctttcattgtatgttagattagaagcatgtaaaataatagtccagattaattgtctctccttgcctatgcaaataattaaatatctatgaatgagtaaaaggtggacctttattcataaaagttgcgtactaggattggtgggaccgtatttaaactgctattatgattttaccaaacttgcgctagaatcatggaatgtgaatactggaccaaaaagatcctatattaggagcgaaccagtcaataaatctaggatcttatcatgcgatactttaatacttggtgttttctgcctggttgtgttatggaggttgttttcttattgttgtttatacaagcggacacatgaaacctagcaaacatgtgttaaaacttgagattggatacaaggcacagagggtaagttgaactatttatgaaaccagtaaatcaattaggtgcattacgtgtttgcttctaccagatgttcacatgtataacatctgactactactagtggcacttctgtacatgcacatgagtgaaatatcgttgttcgatcaaattttgtgctgctctggtgctttcttgctgctagtgtaatgccatgtcagacagtaagacctagagtctaacctcctgtgtttgtgaaaaataggtctttccatttggatctgttccattgaaaacatatcttcctgatggagatattgacttgacattattcggccctgcgatttctgatgagaatctagcaaatgaagtatgtgctattctaaaatcggaagagcgaaggaaagattctgaatttgaagtcaaggatgtccattatgtccctgctgaggtatttcactctgccatatcaatcttttttttataggtaccatattgctctttgtttcgaatatattttaatttgaggtcaatcatcgctataccatctttttagagttctcacctattggaggtggttgttttgtatgcattccacttgtttaatgaacttacttttataattcctgcattctacttataagtgcttatttgtgcacattatgtaaaattggagaaataccattttattgtacttaaatggaactcttctccatcttgcggattacatctttggagcatatggaattatgaatatgccaatatttcatcaggtactggctgactataaaaaggaaaaagtatagttaccaaatttcatactcataacatttccaattgctgtttttgagggttcttgcactcttgctatgcacagtagtgtggcatagattagtggagaaatccaacttgttttttatgtgttggctaggacagattttgggcacatgtgagcttcttgtttcacatattgttgtctgatcataaatctccctggtggcaggtcaagctggttaaatgtttggtacaaaacattgtcgtagacatctcagttaatcagattggtgggctgtgcacactatgttttcttgagaaggtaatatttcaaatgttgccataaagttggagttgtgtagttttttttttgtccataaaactcagatctgatactcttaataagatgaaaaaaatgtccccttgcctttgtactatacgaaggatctaagaggattaattccactttgtggttccttatgtcataccacatagtgataagcatattgataataaataatttttctgtaggtcgatcaaaactttggtaagaatcacctgtttaagagaagcataatgcttgtcaaagactggtgctattacgaaagccgtattcttggtgcccatcatggtctaatatcaacatatgccttggagactttagttttatacattttccatatcttccacaagtctttggatggtccattggctgtaagttatgttcttaattttttctgctgcctttttttggccatgttatattgacattcttcatgatacataccttcgtatgggtttgatgactatatgccatttctgcaggtcctctatagatttcttgactattatagtaaattcgattgggacaataaggggatcagcttgtttggacctgtttccttatcttcactacctgagctagttagtaagtgaatgcactcttaagtgtgcagaatgttgtctttttgcgattgcaattattggtcattgtctcattgacatgcttttgttgaacagctgacccaccagatacccaagatgatgattttcttcaacgagaggagtttctaaaagaatgcacagagtcttttagtgttctccctagaaactccgagacaaatcctagagtattctcacgaagatttcttaatatagttgatccactaaagcagagtaataaccttggacgcagtgtcagtaaaggtttgtttcctgcctctggatcatcaattatgataatagaaatgaataacgtattcctgaattttgtcttgtcaattaaatctgtcaataagattctcaacttgatgttccaaccttaaacctttgtatgagcccatttgcataaggacttacagtgccagtcagagaaaaaaaatcctgcttcacttgtttttgtcaagtttgaatatttattccagactgctcagctaaacttttgaactctgtctctgcaaaatttacaaaatgcttcatttcatgatttgtggttttatgacctcgtctcattgaatccttttgcctacatcatcacactatctttgcacctaatgcgtgattgaagtggactgccctcatccattgttgtactgcttcgtaagtgcttattcgaatacgctgcttccatatctaccctgtccaaaacttcaagtctaccattcttgctacctaatgttgtattgactgccttgcttctacattgctgatgcacacccaaaagttatcatttcagttgtgcatagaagaaactgttgccatttaagaatatagtatagtatgtctacactcactcaccagccacccattgtgctgcgcctaagcagtaacagtaagcacaatctgcaacaccttttcaccattttgcactacattaatatcacatgctgctgccatttctcgccagaacatgggtactgatgactgatctcattatgttttgagttcgcgagtatttatgcttttcatttgatttacaggaatagctttctcgtggtacatagctgaagtgcttcattctgatatttctttttctaaaagagttttatctttattgccctgctccatgcgcaggaaacttttaccggatacgcagcgcatttgattttggtgctcgtaagcttggcaagattcttcaagtgccttcttgtctcactgtcagtgaagtcaatcagtttttcaggaacactctaaagagaaaccgtactggtttaaggccagatgtttgggtgagctcttctgatcttgttacaaatgatcctgtatcatcagtcttagatgtggaaagagtcaacaaggttacgcccagcaattcctgcgatgttctgtctaatcagctcagtaacatcaacatttcagattccaacaatcatggcccagtaaagcaaaaagaatgtaactctatggctgaccacaaggagataaaatctgtttcttggggtttgctagatagtgatgccacgagtcacacagctactgattcagtaagtgtgaggggtggtgacgacttctctgaagcttcaccaacacctagtgaaacctggaccttgcaatcagaagccggcaagaaggttgatgttagaaatgacacaatcccatcataccatggggtttcagcaaagcagtttacaggcagatctcaccactatattgacggtgctaagcataatgcttactcctattctactggcttaattgatggtctaggcacatctaattccgttttaacatcagatacacaacctggaggtaccatcaatgacacagtgccaaatctcactggagatttcgatacaaatttgcataatcttctgtatgcacggggtttccatcaggacaatcctacgactcagttatactatccgatgcctatgccaccacccctgcaatatcagaacatgcacccatcaaatggccatggcagaaaaaatccgtatggatatgctggtaggaatggagttgtccctggtcctgtttatccacctggctattttgtgtataggccattgtatcaagcagatgatcatatggctatgagggctcgtggaacaggcacctactttcctgacccagtatgttccctccttgagcgttcatcttatgttcttaaaacttgaacatccgacacttgtctatatgttcgttttcttcattcctcatgctgtatgtgtgaacagacatgctaattttcttgtaattcagttttcatgagttactattcttttgtatgcaatgatttgtccattatgattctgtttttacttcacaatagtgttacttttcctaggtttgtcctcaaatttttatagcttggacagttttgtcttgtattcatgctaattttgtctgcctcattggacactgcagaacttgcgcaaggaaagaccacctactggacgtggggagagaggaaggaatcattcccatcagaataattatcaaaagtttcaccaccatgcccgaccggatatgcctgtagatatgataccttttgatgaattgaggcatgagtcaccactgcagatatacgctcctagtgcaaatgatcatggaatcccatctccaatgaatataccaataccatcaccatcttcccagtctccaagggatcctttgaacgtaccaatgcattctccatcttcccaggttagaaaggataattttcatggcaatggttttatgctctcgcaagacagtaaacttgagtttgggaccttgggggcgttgccaagggaagttgcctccaaagaccatgctagcagaccaagttctgcctccaacaatcaaggttctgggcctgtgactgtgagccccatgtctgtggtgaaaaacactggaatgggttccaacggaatgaggtaagtatgctgcgatattttagttgccaacaccaacaattactatctgatgggaagaacatgcaattagtatgctagtctattgtttggtgtgagtgagtgctgttggggttccaacccctttttattcttaatataatgataagctactctccttgcgtgttcgaggagaaacatgcaattagtggacatttccatgcaacaaacaacaagataaatttggctcttgttaggttggtgtttttgtaaatttatttagatgctcttagtgttcacttttgagcaattgatatatgaagtaaattataatgtagcccctaagctttcaattatgtgttgcttaggtttttttaattggtagttacaaatactgtgagataatttaaattgccatgggctacatgattatcttgtaaggtcaataaatattagatatcattggatttgcttgaggttttttgagatatgtttggacagatttgtacttgcttcagaccatgtttggggtatatatgtgaagttctcaaatccatggatgttgtgctagttggaattaagacatgcttttggctaactctaaccatgtctgttttctctgttgaaactatgatagttcagcttgaaactgggctccttttgagtttcaccttgaagattgtccactcaatttccagagtttacaatggctgaacccatataccatacgatttgcaggaatgttcaagcataccgtctcaaggacagtggtgacttcccgccactatccagttgatgtcgattctgtgtgtttgagaggcaacaggataatgatgaatggtgtgctcccgacgcaggaatgggagaccatgtcagggcaccgagttctttggcaaaggcatacaccatgttgtacatcctgttttttcttcctttttctccagttgccataagcattgtcactgcaacgcggcctgtgttttctgtaactgagtttttttgcgacaaaagagaaggcaaaaagaaaaaaaaagaaaagaaagagagagagaagaacaagaaatggaagggaaagaaggaaagcaaaagggctctgaaactggatgacatgtagatacttttaggggtatagcccccttgtttcagttttacagattatggagtccctcgaaggggaacagatatgctagggaaagtaatagagctagctagctagttttgttgtttcgacctcaggatcattggataactggattttgtccatgccttcgtgtaatgaggatagagttgtagcccctgtttgcatttagaggagggaggtcttgtgttgaaaggccccaatgtttgaagttactttagctgcttgaaaatggattaggtaatacagaatgtgttaaatttactagtcttaaaagaagcttttagcctttgccaaacgaaaaatgccttttgtgtgtgtttatgtatgtcataatctgtgcaatttgtaacttagcattacgttgtcttgaagctcagtgtctcatttttcaggtaaaaagaaaaaaaaaaccctgcactgtccagtaaaaaaaaaagcatcgtaaacatcctctagcatgtcactgaaatgaaatatgaaacttggtgatattgtttgtttgttaaccatatttgccaaaagaaagtatcttcttgcgaatcaggattctgattcgatggatgcacctgcaatattaaatttgaactgtgctaaataggctgatgaattctgaattatttctggaagtagtttaaatttgaagggataaataggctgatgaattgtg

SEQ ID NO: 4589 - DNA, 3705 bp, Sorghum bicolor
gtttcaatacatatcagcaaatttcagaagctaactgttaaatctgatggatctaaacaacataattgaccaatatatgatcttccaactgttaaactatatttcaaagtatattccaagtctggctcatgtcagaacaaagtttactttgaacttttttgtgaagggggttctattaaatcgatatcacaattacatctctgttaagtctctagtgaataaaaaggatgtattatgagtaaaccagagcgctctagtgtcattcttcactttcaatccatgtcattgaagattacctagttccaatatcttgaaactcaaggacgctaataatgagccccatttggagcaccaccctcccatcatcacagcaacgggccacaaatcttgtaactctacattatccaacaccatataggaacttcttgggacacatcaaattgaaagagcatcaaccatatcgtcatcgaagattatcaaagggaccatgaatctagcatcaccaataccaaccatgctaaaattagaagtccggataacttcctagccatcgtgagatatgaatccagcaagccggtagcacaaagatgcaaatgaaaagcacaaccatcaccagcaaccgtatcaatcctgcaaaaataaaaacaacatatgaatgaagaacatcagatggtccttgacttgctacaagagctcatatttccctggatttattgcaagatttaatggtgttgcactttcaatggcagacgatgtgtgtgtattgacaacgaggtccatgtgatggcttcttcatatatattgaaatctaacagctcactctcggtgttccagtgctcatagagatagaatgtatatgcgttcaaactttaattcatagggtaaatatattatgtacatgcatgtatgagtgtctgcgttgtactatgcttcgcaaaaaaagttccaagagctcaagtagaacaatagtgacacgtgacagaactggtttgttgcagtaatctatactcagctccttccatacttaatgcagtcaattatgaaaataagatacggagcaagttggtggtatatcatttcatggacggcacgtacccatcatcactcgctagctgcttcttttactacaagtctccatttcattacatcccaaaaacctgctggtcagacaagatttgttaaagctgtttacgtgtaacacgttttggtcagttttgcaatctttactcaggtatatatatcagatactaaaatagtactgaccgatgaaccctaggtctaattctgactctgacgacagtctgattcctctcttaattgtcagcatgcgtgcgcaggcgttggcagtatagttgcaataacgaccgtttaattcgtttcagctgctcaaacttgggttggggtatagtgtactagtgtgcacccctgctcggagtcggtcagccaatggatccactgcacttgttgactgactgcgcatacacacgtgtcgtcaacactgatgaggaaggtccagcagaaatctttggttaacataattatgactgaatttgctgtgaatgcgtagcaactattaaagctgttgaatgctgatggaagagaccgacgaagttaaaaaggtttatttcagtttcagagacggtgtttagctagttccgggcatcttctaggactatagtgcctgtccctgctgtaaccatactttagtgtgagctccacctgctacctgctcaacgaccaatgtatccatggattgctatcgagaattccacgcgctctctggtagtctgcaggtctggtccaccacacccacacggccacaccacacatggcggcagcagggaggcgctggctgcatatatataagctcgtcgagagctaccatggatgagttgcccaaacacaaacaagcatcagttctcgcagctagcacgtactactccatatatatatagtccatatacatccagcaagaactgaagaggaggtcgaatcgatcgatggcttgcgtgggggagcgtgaggccgcggtgagggaggtggcgcaggtgtacgagctcatcaagctccagcagcctctcctcctcctccactcgccgcagcacccgccgccgccgtcgacggccaagctggcgcagagcctcctcgccaaggcgctgcgagccctcaacgtcgccctctccgtcatgaagcagcagcagcctgttgtcgtcgtcaaagctgagcctcatcagctctcgccgcccagcccggcgtctgccaactcccaagtcgccatagtacccagcacggcaacaagaggcgccaaaagaagaaggtgtgtgtgcactgctggatccttcttcttccgttatattttctgaatttctgtgtgcagttttcagcctcttcgttcgatcgctgactgttgcttccaattgaaactgcgtgctgtagatcatccgtagcaataatggaagggaagaagaagacctcgtcgtcgtcctgggcgacggtaaccgccgtgccctacgacgacggctacgagtggaggaagtacggcgagaagaagatcaacgggacgctcttcaccaggagctacttccggtgcacctacaaggacgacgccggctgcctcgccaccaagcacgtccagcagagggacgacaacagcgacctgcccatgttccatgtcacctacaacaacgaccacacctgcaacagagccaaagctgcaggcatagccaacaacggcagcagcagcaacaacctcgctgcattgctagcaggctgctgcagcaatggcagtggcagcggcagcggcaagggactgacgacgatgacgacgaccaatgctcggccaaccgagcatgctgctgctgctgctgccatgaacatgatgaagcaagaaccaccgctgctgttgcctgctctgatcgacctccagcagccttctgcctgttttcctaatgaacaaattccacagtgccagaaagagccgctgtttcctacaagtatggagcagcagttcgtctgtggtgctttaagagaccatgactctcctgtcgatggcgacatcccgtcggccactggttcgtgcaactccggcgagaccagctggtgggatgggtattctggggacatggcagcgcagatggcagctgaagacgaccctctccacgacctcgaccggttcctccagtgcgatagcttcatggactactagtagtaactatagctctgcaacctaagctaatgaacagggtttatgaaagtagaagtatagtttgatcttccttttttgttttcttatagctagctagggcagtagttagtagtgccaataataatgcagtgttttgtagggaaaagatagcggtttatgtaaaatgagatgatgtaaaataggatcatgcatgagatgtaaaacaacgacgatttgatatgtataatggccggcgccttatatatgttttggtttcctggtgcttaactgtttaaacagtaaacaatttaagaatttgttagtggtttcaagtagcaggctaagctatttgttaattagtggtggcctgcttcaatcaaaatctacaaaaaactatagtaggatataatggttggtattcatttagtttctaaaaacataaaaataatctcaattcattatcacataaatatagaactaacaaatttcaagcacgcaactactcaaatacatgtctatct

SEQ ID NO: 4590 - DNA, 4155 bp, Sorghum bicolor
tatgaggatatgcatataagtgtgtgaaagggtggatagttagaaatatggttaagtggtatacctaatcttgtcattaactgttgttacttattggtgtcggtgttgtttctaggctagctccaaagtgaatgtgtgaatgtgtgatgtgcttgattcgagactattcatgtgtgaatgtgtgatgtgcttgattcgagactaatcatgcctgtattttttcttattggtatgatagaatataataacactgggcattgctacagggaatgtctcgtgttaagttttcaaggaagattcatgaggttgttatgattctctatgcgagttgcattttgtttctcacgggttgatgtcttgtacctgctacatgttgggtgctgtggtgctgccaatacacttataattcatttgattgacaccaaagtttcgaataaactttatgttgtaattctaggtactaaaaagttgcttcctccaatcataaatttgagccattttgagatttcttgttagtcttttcttttcatttttcatcaatgcataacataaatgtagttttatagcagaaaattactttgtttaaatgtcatattttatataaactactaaccaaagttcaactcacagattgtttcaatatcctaaatgatctatatttggacaaagtaattgctttctcgaagagtaatagtaatattatacaatttgttgttttgtgctagaattgaatggaaagccaattgctctgaaagaagaaagcatctaaaatgtgttggttatatatgatgcttatcgaagtttgctcgctattacaatctcagaatttcgcacgtcacaatcaagatagactttttaggatggttttcgaaacctctagtatgctattataaaaattaataatttataaggactgtttcaaaaccatccctaaaaacaaactctttccatggctacccaaaaatattattgttttcataaaaatcacaaaagatattaaactatttctaaaagaaatttcttttgtcaaagcggccactatatatggtcaggtgtcacaaagtctcgtattttttgcatgaatagtccacatacgacattgttaaggatccaaacctctcgcatcgcgcgcaagccttctatcactacaccacacaatcaattatgtcacaactagaaggctatatgtggttgaaagcaaaaaataaaccatattgtttgctaaagaagtcgtcattatatatggcttctctagtctctcctatatagtcctatgtctgtcgactgccacgcaccttttagttgattctccagtcacgagtggcaacatatcttctctgcatgctttctgctgccaacagcccagcagcactgagctgagagatcgagctagctagtagccttcaccaatcaccacgtagtgcgatcgaccggccttttgcgtggacgtgactgtgtggactgtggtgcgcgtgtgtgtctctacatttgcaaagcaaattaaggttttgtttggatatagttggattcacatcaatctatatgtgttggggtggggttcaagtggaacttgaactaaatttctcccaaatctactccaacacatatgaattaaggtaaattcgagaacatccgaggcctaaagtggattgcatcgccacgcatttgcgaactcaccggccacaaacaaactcatccatgcatgcatggcgagccaacgcacgaaacaaccgtccggcggccgtccatcgtacagttatttacagcacaacgaaaccaacggccgttaattggatatatatgactgactgatgactgcctctgcagccctgccgctactttatgtttttaattaagacgagagagcagagcagctgctgtttttgagtctcgtagtatatatataacgaggaggaacacacgtacagtacaggcaccgatagctagaaacttctgttgtctttgtccattcatcacgcgaagcaaagcaagggcaagccatgcacccggtgccaccgcgatcgtcgacgtcgagccccagcagcatcgccgccagcgccacgcgggtacacccatccgacgccgccgacgccgacgccgtcgccgtcgctcatcatcgtcacgacggcagcagcggcggccgccgtggccgtgccaccaacgccaccaccagccgccgcggcgccgtggggcagggtcagccggcggtgtacacggtgtggaagcggtcgagcatgggcttccagggcacggacggcttctccgtctacgacgccgccggcagtctggcgttccgcgtcgacaactactcccgccgccggaagctcttcgccggcgagctcctcctcatggacggccgcggcgcgccgctcctggctctccgcccgcaggtacctacgctctggttgattgcgttgttaattagggatgatagctagatgattaattggtcgcatcctattattcccatatccccatagcatagtagaggattattcgtagtatggtgcgtatggatcggatgatcttccattttgtcaatccgtagaagaaatgtgcaatctttcttgttaggtgggcaaagatatatgccttgttgtctgggtttagtttctttaatttcttctagttctagactagatcatgcaacgctatccaaatctttctttttagatgggcaaagatttacttgtagtatctcacaaagtgattccccaaatgcaattctcaagtctgacagtgttagtgctaacacaagttgaaagatttcctagctagtcctctgcaaaatgcgactacctgatgaagaagattgcacacaaagatgacagatgctgcaaacatgtcttctacttctacttgaaaaacacacaagaactttcgtccaaaagcctgcaaacaaccaaaatgccttggtttctctgatatgcctcgctcttgctcatatatacttgtttgttttcattttcacgcgctttgaaatactctacaatgtactaattaacatattactatactcttcttacagctgtaataaactaacaacagaaagcgaccagagctgcaaaataaaataaacagattggagcattagtagtatccatggagtataatctccctctttatgattttattacccgccagttttgaataccaatgtgcggtcctctgcattccgtgacagattctcagcatgcacgaccagtggaactgctacagagcagcttcatcatcagaagaatccgccggcgacaagacgagcttccccagacggcaacatctcttctcaatgagaaaatgctcacttgtcaaaggcactgacgaagcggaagtgtacatggcatcaggatcagcagcagcagctcacggcgtccagcaggtcccgagctttacggtgcagggcagcttctggaggagaagctgcaagatccggaaaggcggcgacggcgaggaggtggcgaggatcaccagaaagaaggtcggcgcagcggcgtcgcagccggtcacgctcggcgaagacgtgttcagcctcaccgtcatgccggacgctgattgcgccatggtcatggctttcgttgttgtcatggaccgcatctgccagaggccgtacaagcccttgatgtgttcttcttcgtcagggtcctgtgcttcgtaggccatacatggtatcggtgctcatatgaaggggttttgtttggatctggtgcatggttgtttgtgagggaattgtggtgctgatcgaggcagtagattaattcacaagggtagggatttgtagttgctaattacagagatgtcgctagttgattgactggacagagacagccaacatggtataatgttgtaagctgtaactccatcttttagagcaatagatgatgatgaatgactattcagatttatttagctgcaactaatctaacattgcaattgctatagagactgcagttagtagtgcatagctagtgtgatccctaactttcagggaaagttcctaactcctaagggctgtctcttctttatactgaaactcaaaaggaagatgctactgttacaagttggctcggctaggaacaaacagatcgagaaaagggatggtgccagtaggcagttgtatctgttgtcctagttgcaacttgctacatatgcttattg

SEQ ID NO: 4591 - DNA, 6791 bp, Sorghum bicolor
tagctgcgctccctccatgcggcctgccttctgccgatgtcgttagccttcctgtggagtcgtggatgtcctttatataagcaacagctagggtaacaacggagccgtcgtggttgcatgcgcgccgccaggatgttgttagcgtggccgagatacccggcgccgccgccggctcctttcttcacacggaaggaaagacacgtatgtttggcatagctcaacttcactaataaagctgttttttttagaaaatagctccatgagtgactttctagatgaagctaagctgttttggaaaaaatttaccaactacttcatgcatagttgagagagagaaatgagggagaagctacaataagctactttttttcagcttcatccaacttatgtttttgtgagagaaggaaaaataagtgtttggcaaaaaaaacagctcagctgtaccaaacagcccttatcctcggtgcgtcgattatctctccagatcacgattctagaaggctctgtgctgattagtagatgagatatttccggccgcgtatacggttgctccatctaaaattgaatctggtacttctccctgcaatccatgacatgtggaccttgctataggggttttcattgtctaatgtgaacaatcgtacgtgcacttattggctcaacggcttgcggccaatagacgtacgctgcgcaatgatcaacatacacatctgcccgccgtattatacaccaaaggcaaggtagccttctagaatgttctagattacccggcaaatcgcgtcgtgttgtacgtgcatctaaccaaggttctagaagattttagactcgttgcgccggtgcctcgcagactcaacttgtgtacaatcttgtttgcttcttttattggtagtacgtcacgagcacgttcacgtgcatgcatggaacatatacttgctagcttcttgcatgttttcctcttctcagagtatgcatgaggtcaaggcatcaggccatcaggtgagtctcatccgaaatcaaccaattgacgcatgcatggccgtgtatgtgaaagtgcagattagctgacaagctaaactgctaccttcttcatctagcatgtatgcacatatacgtacatacgtaatgcatgagaatacaggaggagcatctactgcttccattcttcttgtttcttaacagcatatataaatgacgtgtgtatataaaaaaaatattgtacaaaatctcatcaaacagtaagaaatgatatggtgaaagataagcttattccattttataaaccaaacaaaaaggtgagaaataagaaataatagatgacttcaatccacgaaaagtcctttttaccccgtaaccattcacaaagtacggtttttctctctgacttgcatagttgcatgaacaaagtatataaaaaagatggtaaatatttgatttctaaacttaactaaaccgagcattgatattgtgaaacagcatctagaaatacattgagggacatgtttagtataagaaaggccagtggaaaaaaaatcctactcatgcttgcatagttgcataaataaagtgtgaaaaagaatgataaatatttgatttccaagctcaattaaagttagaattcaatatagtgaaacaatactaacaaagtgtaatgctgttagtaaaaaaaatgcctagcatagttgcataaataaagtgtgaaaaggaatgataaataattggtttggcaggctccggagcgtgcgtaccacccaactccaacttaaagaggcccatcacatgtgcagtcacggcccaactcagcccaactcagcccaccaaagtccggggatagcgcgcgccgcgccgtcctcccagtccccggctggccaacggccacacgtcggacacgtcctcagttcctcacggcggcggcgcggcactcgttctgcggtcagggcgcggcctaggcgataagccccgcacaccgcccgcgcgcacgacgcggcaccggccgtaccgggatgggcatcgtcgtgagagcgtgcgcgcctccagctcccgcagcggcggctccctccggctccagggaggctgcccaagcccagcggaggagcaggcagtcgaggaccgcccgcgtgctcgtgctaggcggcaccggacgcgtcgggggatccacggccaccgcgatatccaagctccgccccgacctcggcatcctcgtcggaggcaggaaccggtaggacctcggcatcctcgtcggtgaccttttctgttcaggatgaatctatgcaacttacaggtggtgcttggtttgatttggtttgatttgccagggagaaaggcgagtccgttgcagctaagcttgggagccagtctgagttcgtccaggtcgacacccgcgacgcaggcatgctggaggaagcgctgcagggtcagtatcagtattcagtaatgcagtgcaaccatgaatatctatcctgcttattatgccgtgactactgcctagagcaagctagagcatgttaattggtggtacagcttcacattagcagcaaaggctctcgcaagactccaaagcccaaattgctagctaactcctgatgtttgagccccctaataagcagtgaaaacagatgttttttacttttgctccaggagaagcttaacataagtacctggcaattttctcttgcgacaggtgtggatttggttgtccatactgctggccctttccagagggcggaggagtgcaccgtgttgcaggcggcgatatctactaaggtagaacagaagcgcgccatgcttcagtctcgattgcatttttttttgggtggtgagctgcttaactgaaaatgctgttggcacatttgaaactttatcctgaacagacaccatatattgatgtctgcgatgacacggactattcttggagagcaaaaggcttccatgagcaagcaaaagctgctggtgttccagctattactactgctggcatatatccaggagttagcaatggtaattagtgtatttgctttctattagactttagaactcaatttcccttgagttttcttgttcttttgatgaattctgcaatcacatcttttctcacacaataatcttgataaatcatatgatactccacaatagttttcaaatggatgcacaagatgcgaaggtaagctagcatcaagagttgaaacaaggaaatttgtgtgatgaccaaatacgtcaatgccatgtatagtatgcccaaagctaaaacacataaaagaaatataatctacaaaaaaaagaacttctattgacaaacaaaatactccgtctgtacttgagtacataacaatgaaatagcagagtcttgaagaaacatcgtgtactgctgtttctatcacattatgttagtaaaatctacaggaagtataatattagtatgactttcactctgtcgagcaaaatacatttgctcatattagtggtcaagttaagaacatttgactacacattttcaaaaaggctcacatttatgcagaggattggagtattgtttaattgccttaactttaaatagttctatccttgtcaaactgtagaaggaacttaattgcataggccttcttttccaggacagaatctgatgcaaatcaaactgaaccacaacatttggtgcacaattgatttattagtgatatttctgcatagatggtggtgttttagttaagtataatagatggggctatctagaagagatgaatatcttgatctttgagtgcttattagtatattgtattcttctctggtgacagtgatggctgctgagcttgtgcatgctgccagaagtgaaaatggcgaacctgaaagactaaggttagagttctttgttgtctagaacaggaaatgccaaaatattcattcagtgtacagtaagggctgtatttggttttctgttggcatgtagcagttaaattgttattccatatgatgtgttttctctcctagctaggctgagagtgttcctgttagtttaaaagcacctgcataataactgtcgcgtcaaactgtttcatcaatgtttacttgatctatgaagctagtaattagtgtttttgaacatccatacatattccatacgttgctaaacccctcttttagattcttctactatactgcaggtactggtggtgctggtccaacaatattggcaacaagttttctgcttcttggggaggatgtaattgcatataacaagggtacttccagcttatgcactagtgctattgcacctatggagttccacactgtaagggaaaattatacgtcattcttatttttattactcattcaggagaagaaatcaaattgaagccctatagtggagctctgaacattgatttcggaaagggggtcagaaagaaaaatgtctacttattgtaagtacttgggccaatgtttacctttccatatcttataattgacaaagttacaaaactgaaatataatatagccaagaaggaagctaataaatttcacattgtgttacctactccaggaatttgcctgaagtgaagagtgcttttaagatattaggtgtgccaactgttagtgctcgatttggtactgctcctttcttctggaattggggaatgcaggctttcgcaaactttttacctgttgtatgtatttttccttggtttatgcttatacaaagttattcatttcagcccgcttagttatagttgtgattattaatactgtagtgattaaatttatagttgcaaacaggcattaccaattttcattctgcaattatagtatttaatcggtagttcctgtactacaattaaaccaaatggtttgctgtgggctggaatccagaacatatacatgaatatatgatactattcagttttcagtttgcattaatctgacctgaatcttggtcctcttcaggagtttttgagggatagaaataaggttcagaagttggttcagtctgttgatcctttggttcgagccgttgatggtattgcaggagagcgtgtctctatgagagtaagttctttacctgtgtgaagagtagtgctgcactacaattggccattgcctaatcaaaatgatttcgtttctgtaggtagacttggactgttcaaatggccggaatactattggattatttactcataaaaagctatctgtgtaagtacggagcataagtaaattgaaatatcctcaagcaatatctaattgatgtctaatatttccaattcttaactttttaaactctctgattatttaaaaatatgaagctttacattaactttacaaaccacaacatattttatattgattgtttcctttcctttaaaaaattctcctatgaaaaacatttgtttctataaaactgggagcatatgtactgcttcagagttttcttttatttgtattccattataaattataatatattgttaggtttaagtttctagccagacatcgccaggaattcagagtaaaaattggcgaagtagttaccgtatggttcatttgagaacttatggtgtgcacttaagttttcttactggatgaccagaattactagaaatactctctggactgcatctaagcatatgctacatcaaaattaacaggtcggtgggctatgcaacagctgcatttgctttagccgttcttgagggcaacacacaaccaggagtttggtttccagaagaggtgagtaatgaaaaaccaaacttccttagaataaacaaatggaaaagaagttaacaaaatacttcatttcccatatgcagccagagggaataccgatggaagcaaggaagctgcttcttgagcgtgcatctcaaggaacaagtaccttcgtgatgaacaagtgatttctctttccccagcctaaaagacagtatatgtttcccaattcatgttatgtttcagctaaacatgctcatccacttgcattaacaggccttcctggatggtagaaactgacccaaaggaagtcggtctaggaatttatgtttgagaaggttgaattactcaaattcttgggtgcttgacaaaggcaactaaagcttggggagtaatttttccgactgagagaagttgaatgcgacagccatcggcgtgttgaagcctccaatccccagattgatcgtgatgttctgtatgattggttgggctattttatttttgaaagggttatatatgaaccatggaggttatgaagaaaaagaatacaggtcaatagcacaaatttgttcatcacacaaagcttgtaacttttttaaatgtattcagactccatgcttaataggtaatacacatccaaagttttaagatggttgacttaagacaacactaaactgtcacttgtttattattaaaggctgaagggagtaatttatatctaggtctagtactatttaatcacgagatcatttaccaataggaagcttcacattgttatagaactgaatgtcacgagatctaattaacaagaaaagtagacaaacacaaactgaatctcatataattaatatgatttttatgtatacaactcatttgaatctcaactgtactcctcagatgtcagatgccatctgcgttgcatagcatctaagcacgtcagtgacattttctgatcggtcggctatgcaactactgcttttgcttaaccgattattgaggaaacacgcagacaggtctgcctgagtggtgcattttgcacaagacaggaaaaagtgcagagttaacaggaattttcaccagctttgtgatgaacgagtaacttttcg

SEQ ID NO: 4592 - DNA, 3822 bp, Sorghum bicolor
tataattagctcatgtctaattctactaattagtacccaacatatgacaaggactaaactttagtcccaagattcaaacaccccataagtgtcccactaacttgcaatcctttcatgcaagctatccatgtcatgcatcctttttttcgaattacacaatatctcttattaattataaaatatattcacatcatctttattatgtgcaatacttttaatctctaacctattaacgtaaatgtcatcccttattaattacaaaaaatatcctcatcatctctattatgtagatgtaaagttatttacatatgttatttgtttcatcacctattcttgtataacgcaatcaactattttattggttttttctattagcttattgtttttttactagatccgatacaataaaataacatgcaagtcaaattcataaatatacacacaatatacagaataccatatagcattgctatatacaaaacagattatttttaagaaaatcccgcggcaatgcgtgaatatgtgtctagtacctttcatagtaaaaaaaaatgcagacgcatttttaggcatgtttcggtaattaattgcaatttagaaggctttttaaatttatctttagaaatgacaaacgtggggaatttaaatgcaactttagcgaatcgtttatgtatttttcgtaatggtcaaggcgggcggcttttctttttagaaatatagaacaggtcaaatggttgaggaatgaagcgtcgtacgcccgatgaagacaatgaggaggcggactcgttttgtcttggatagcccatgaatttgaggtagctaggccacaaattcaggctctggaacagcttggaatgtcactttccagttcaatgcgcagccaaactagccgagacccatgaaactgattccaaattcagcccaattaattctatagatccaaacaggccgtgatcatcagtgcatcatcaggtggtccggagcagccgtccgtgtagaatgtagtagaacatgtgagagggacgagagcactagaggcgaagagcaagcagacgcagccgaagcaagcccaagcccaaaactgtttgtctttttttccccttccattgtcgtcgttcttcacttatcctttcacaaaccacgacgatcgagctgaatggaactgcttctgcttgagagagacggcggatgcatgcgtccggcggagatttgcagcaggaggaaggggacgagtcagtcattcaccgaccgagcagcaggaccacgaccacctcggccggatcctggctcgatcgtggacgacgagctagagggcgagtccggccacggcggcgacgtcctgctcgatcggtttgatcggcgacgggagaccggagatagatagcgagcgagtccggccacggccagcgaaattttggaaacagcttgtgcggcgcagatttgcatgaggaaggggacgacgagtgggtgtgtcttcatcttcgccgacgacggagcagagcaggaccacctcggatcctagagatcgagcgagtccggccatggcgacggccaggggacgtcctgctcaacatatacctaggtttaatcggagacagcgagcgagtccgggcacggccagggaaattttggtttgcagtcagtagtagtgactttcaccactgcactactacctgcggctagcttatctatctatctatctatctacaaataattaaagtggtggcacatcacatatagtccaaccatggcgtggcgtggcgtggctccatggacatgttggctggctgagacgataaggcgcgccacggggacgcgacatgtggcggcggacgcgatcaggataggccaggctggccgggttgcccgccatgggacaacggtggccactcctcccacatccgcttcattcgtccgatccgtccttgccccaacgacagccatccgtcgccatggacgcacgctcgctgcctcttctatatatgccctcggtgggggagcctacaggacgacccaagcagcaagaagcagcaaaaacagcaagcagctcactctcagctcgctccctcactagctactagtactacatagcagcagcaatggcgcccaccgtgatggcctcgtccgccaccgccgtcgctccgttccagggtctcaagtccaccgccaccctccccgtcgcccgccgctccaccaccagcctcgccaaagtcagcaacggcggcaggatccggtgcatgcaggtaataacaacataattaacacaagagctagttggcctttcgttcttggctccggccggccatcttcattcattctttgcagcagagctagcgaaatgcaaccacaaacacgtacatcgatcgatgcatgcattaatttgcaggtgtggccggcgtacgggaacaagaagttcgagacgctgtcgtacctgccgccgctgacggaggagcagctgctgaagcaggtggactacctgctgcgcaacaactgggtgccctgcctcgagttcagcaaggaaggcttcgtgtaccgcgagaactccacctccccgtgctactacgacggccgctactggaccatgtggaagctgcccatgttcggctgcaccgacgcgtcgcaggtctacaaggagctgcaggaggccatcgcctcctacccggacgcctacgtccggatcctcggcttcgacaacatcaagcagacgcagtgcgtcagcttcatcgcctacaagcccgcgggcagcgagtgattaaactgctagctagctcctgcgtgagctaatggcatatggctgcctgctgctgcctctcaacctgttcgttcggttttgcatccttggggtcacacacacaccttggtttctttcttcttctttttttcaccttttgctgctgttggttcctttgcttctatatatgctgctgatgtatccattgttggcatcatccatctcgatcgatctctccccctacatatacctgctagaaaaaactactgcaactagcgttgggtgaggaacatatatgtgaatgcaagctccggctatcatgtatgtgtaatatatatggcattggagtttgctctggttattcacagagcaaagaagtacttatttacatccatataacatatactttccttccatacaacaatggctagaagccatcttgtaatttttgcttatttgtttactttctttccctttttttgtctcttgaacttttatgtaagctggttcgcattttcttaataaataaatacacagcagggggaaacccctcctgtttacagtaaaaagaaaatctctgatcttcattctcatcatgtctttaagatcatatcatcctattggagttgtgaattcggtgtaccaacaatcgtgataaatgctatttacatatcttgtgaaatggaattcaaacaaaataaaccaacaaagtcatattgacaaagaaagtgcagatgcagtttcatgtttacatcatacataaagtactagtagaacactagcaaatgttgtcttggatgaatcagaagttcagaaccatgtatatatatacgcacatccatcgatcaggagataaataaaaccagagagaaactatgtggtacagagcgcacgagcaagtcatattctgtaaaggttaaatgattggaacatttggatctactcccactgatgatcagctttactgatggagactgcaaggtaggcggccgacgttttcttacatgtacgacaaactgacaaaggcacaatagtacttggcaaaactgtaaaatgacacgataatcgaattaatgcagaattaataaccc

SEQ ID NO: 4593 - DNA, 7487 bp, Sorghum bicolor
gtctccaatttgattgctagtcaagcgtctctaaccactacaagcatctcagttaagtccagcaagataaagttgacagagatatatagacagcttacttaaccatcaggattagagcttgtctgaaatctgaatgtaggaattccatgaaagcaaagagttcaatttccgtataaatggaagaaagttaacctctagcctaatttaggttctaatcaaatgattaccttgcatagactcaattattcactgaatacaactttactggaaaaaggttccaatctagcaaaggcacaacatttgccatctgaatggcttatctatacactttgctttctcatgcctttatgcaagaaaaagaaatactacaatactatatagtatatttgtttaaaatctaaactgtcccaccaccccctcaaaagcatacacgaccgcataatttgcactccaagaacgcctttctgaaggtccatatagtcatcattgctaatgctccacagtatgatgagggtgtagatcagaatgtgtacaactatgtaggagtaggagtatatatatattcacaaagcaactagcaatactcaagttttgtgtttctgacacatgccatattccaattgtgctgccttttttttctttatattatccaggtattgtcttgtttgaagcaacttttagcagttgtactactggtgtaaagctttgcacaaagttgtgacaggtggaaattaaaatggcaatagcatagctggagataaatcagcatgaatgaaactgttggctgattttccagctgttattcttgtttactgcaagataagagcaactaacgtgatgctgatgccttgggttaatgtaagacaaaaagatgacaaaaagtgacattagctagtaatatgcaatcagcgtgtggcaactccaaaaggtctcacgaataagggcgcaactgttaattactctctacattaaaaaataatgacatcttttatctataaatgatcaattttaagagacaagtttgaaattgcccatctttgtcccttttaacagggctgacaagtttagaagtttgtgaaaatttttagtacctacatctaattaaaattgttcatctttgttgtttctttgtcccttttaacataataatcatatagatagtctaatctatattctatttgatataaacttcacttaccaattatttttatgttttatttatattgattttttcttggattaaccatctactagagagagagaaaaaaaagagactatggtcatcaaaacaaggatttgctatgaataaaaggggagctaaagtaattccccattttgccctttgtggaaggaatgatggctgtctcgggagccgcgaaggcaggaaaaaaaaaggagagaaaaagaaaaaggaaggcaaggaggacgaaagcgagcgagagacacacacaacagtgacaccaccacaagcagcaaggagaggccgcccgcagagcagaccatagagagtggagagcagcccgcagcagcagcagcaaggctgagccgccgccgccagctgagagctagtagagcatccgccagtcccagtggcggcagcagctagcgacaaggctgagtgaatccgagagaggagcgcagcgcgcgccgcagccgccgtggctgccgtcgcaggcgccgccgccgccgccacggtttgtgagaggcgctcgacttgtattcacgaggagggcggcgacgacccccgcgcggcaaaggagctgaacactggccccgccctgtgattgatggctgctgcccgtgccccggcggcggagaggggaggcgtcgtaggtgctccggaggcggtggcgtggaggggcggcggtctccgcgcgaagcaggccggtcgcgccagctgccgcggcgcctagagcgagcgcctggacgcggtctctctcgcagctagggttttggcgcggaggggcgccggggttcttctcgttctagcggaggtgctggaggaggaaggggggaaaaggagatggcggtcggggacgcgctgcgacggctgtgcgaggagatcggctggtcctacgccgtcttctggaaggccatcggcgccgccgaccccgtgtaagccgccgccaccgcctccagattttctttggtgtctaagctttttgccattgtgctcccgctgaatcttgtgaaaaatctaagctttcttgtcattgtgctcattttccttcgttggtgtcctcgtcctcgtaccgaagtttttttgggggggttttgtgctcattccagtcattcttttttccaaagcgtcaagttttcgttgttactctgttctggaagctcgaagtttcgaagatgggaatatctgagctcaaaatcgaacaatttcctgcaaatttcagattcctaaggttgaatagttggggggctctgcctgtgaacttatgagctgctgcggctcattttcctgtcatccaatctcatttccccccttggaaatgcgcaggcatttggttcgggaggacggctactgtggccacacgtcatgccctgtcggatctgagccttctgaatctctgcccagcgacgccgccgggtgctctgctcctgctgctgacaccatctgctcgcttgttaacaacgttatggcgtcgcaggttcatgtcgtcggacaagggtaagcacaaaaaaaaaaaaaggcaaccgtagccgtttcttgcttttattaatctctttgttagaacgcgatgatcttggttgctccttggattcggattcatggcggctgcgccgcgcctgtgtttttgttttgggcaggaccgtaggccgtgccgcgttcagtggcaatcaccaatggatcgtccacggtactgccaatggtcacgggctctcctccgaggtacggccagtactgagtgcttcttcgccccttctgaattctctccagtgaaataaatgcgaacccaattttcagttttgtctggttccattttgctgccacctcatttaaagcactgtgggttcaacttttgtcagttagtgagctgctttaattttggtctgctcacactggaccaaaaatagtggcaaatgacgcaagcacctgttgtaaataaattatgattgtgaaaaaaataagggagaagatcttgctccaagtttgtctttaactatattctgtccaagttttcaagatcttacaccacatgttttccaatttgataggttgctgctgagatgaacaatcagttaagagttggcattcaggtgggtagaactgaaatggtaaaaagtatgtagtcgccatgtgcttctggacctcattctgaacttctgctgtgcagactattgcgatcattcctgtcctgccacggggtgtcctacaattaggatctactggtttggtaaggccacaaagctctagatcatgctagaaaagtagagaaattgttgaattattcgtcaaagttgttgaacactatctgttaaaatttctatgtaaagaacataactatcacactaggctccagaaaaataatttccatctgtgggtgattgtggaaggtgaaaaaaaaacaatagtgcattgctgaatgagtacatgccattcaagattttgcatatggaaactacaagacacgatgtttgggccatgctgctccaaatctgaaaacctatctttatgctactgcaaatttcagaatgtcttcgtggtgaaattcataccatgtatcctcattcatgatggaacatctagaaaccttggcatataaaaaatttcccactatatactgtatcctttgttgtgattggtgctggaaattgttgtgaagaacataaaagatctcgaaatattgttttaacttccttgtgatggttggtagtagggttttcttgcttgctctctaaatatttggaaattgaaataatcagctgatttttggcaggttatggaaaacacaaattttgtgatgtttgcaaagaagttgtgttctcagctaaacaaccgttcaagcatggctgtatctgcttcagctaagaacggttcaagtcagcatggtcagtcgcgtcctgatactgcaactgtgtcaactagcacaccgccacatgcattgctgaatgcatctttgcttaaggttgtgcaacagaatggtcaccctgttagagagcacactgtctatgctaagcctgatcttcggtttctacaacaagcatccttctgcgagagccaatttggaagaaatttatggagtgttggtatgaactcaagtttgacctccccaagcttgacatcagttaaaaatcattcactcttgatgaacaacattgggcagttacagttgaataataatgcacattcatcagcagatttagcaatggcaagagatataatattaaaatcccttgtgcgccaggactcttctgtctgtgaaaatacaaacatgaatatgcaccatggaagatatgtggtatccaatgatataaatggtcctgggaattttgattttctccctgtaggtgccagagcaagcagagccaacttatctaccagtgtatcgagtcaaatattggatcacgcatcaggaacattgcagcaaaaacagtctctagttccgttcaaggttccccaatcttctgaattggctaagaaaatggagagccctgaaagtaggccatttcaaactccttcagttcgaacttctgaatctgatggtcaggtttctaacagtttcaacatggatcaagagaatctattgagtaggtcaaacaatgtccgacaagaccaaaagattaatagatttagtgatccaagtgctaatgtcagcacacagagaatgaagaacagggatggatgtgaggcaggaatgcctgttgagagagcttcctcgttgctcgtggagcctgctgcagataatgacttgtttgatatgtttggttctgaatttcatcagttctcccacaatgttggtgctgatttggtcacctggagcggtacagagtctcagaattcagatagagatgtccctgaatcatcaatatatctcaatagctcaccccttttcagttcactagacaatgagcttcactattctggtatcttatcactaactgatactgatcagctattggatgctgtcatctcaaatgtcaatccaagtggtaaacagtgtactgatgatagtgcttcttgcaagactgcattgacggatgttcctagcacatctcatcttggttcagtagacttgaagagatgtgagtcctccggcatgccttccatgctaattaagcacgaattggcacagtttgttaaacagccatgtctctttgataaatctgaggaggcctgtctttcccaaaataatggaatgcacaaatctcagatacgtctttggattgagagcggtcagaacatgaaatgtgaaagtgcttcagcttctaatagcaaaggtcttgatacaccaagcaaggcaaatcgcaagagatctcgacaaggagaaagtcctaagccacggcctaaggaccggcaactgatacaggaccgtattaaagagctacgtgagcttgtaccgaatggggcaaaggtatgctcttgcatgaattgtctgatgataatttgaaagtttgaattatatatattatctacaaactatctgcgatagtgtactaacaattgcaaatttatgtcaatagtgtagcattgatggtttgttggagaagacagttaagcacatgcttttcttacaaagtgtgacgaagaatgcagacaagctcaaggactctactgagtctaaggtatgcacatttttgggttatgataggtgtaagatagatagtgatgatatagcttacctgacaaagggggatctcaaaatattttacttgatgctctatagttggaaaatgtccttaatacaaagtcttcttcaaccagatacttggtagtgaaaatggccccctttggaaagactactttgaaggtggggcaacctgggcttttgatgtcggctctcagtctatgacatgtccaatcattgttgaggatcttgaccgacctcgtcagatgcttgtggaggtaatgagttaatgactagtctactacttattgtttatggtagtataatgtttctccagagcacaagtaattgtgatgacttggttccctctgcagatgctttgcgaagatagaggaatcttcttggagatagctgatttcatcaaaggacttggattgactatcttgaggggtgtgatggaaatgcgcaaaagtaaaatctgggcaagatttactgttgaggtaatacagctaaattgggtaattaggattctttcagttcaaaaatataaagtaataaacagtaaccagaatggaaatccaatgttatgagaatatgctgatgaatactattctctggatttatgttactgctgattcgtcgatttccttactgattgaggctgtttcgtgcaggcgaaccgggacgtaaccagaatggaaatctttctatcacttgtgcgcttgttagagccaaattgtgacggcagtggagctgcagagaacgctaacaacatgaacatgcctcttggtttggtgcgccaacctgtcatcccagcaacaggccgcatccaatgagactatagagcaaaccctcaagcatcttccaagtgctaagagcaggagctcagctaacttctgccatgactagcatcaccaatatgccaggcaccaccagctttcctgaaacatcttaatctgtgcaaatgtggcatccttcacgagaccagatcgccgaaatggaagacggaaaagaaggcaagagtgatcattaggcagtgttttgtttgtatgatcttagtttgtttgttagttagtcatgtttggtcatatattagtggattttttgtactgttattcagaatggaaattcttgggttggtttatttcacacaacaaaaagatggaataccacctctgttataagtctcctcacatcagagtatcagactcagttaagtatgactagtgaaaacctatctgagctgaatggtctgcaaatgctgaatggctgctgaacatatcaggagaaggcactattataggacactccttggcaatcttaacagcctggtccatttggaagcaaagaaaagacaaaattttcaagagaaacgaaaaatctgtggttgatccttctctctgaaatcatcgatgaggcttacttggggaaatcggtagaggcagaagtttttgttttcctagttttcattgtacacaaataagtaatccactttagtcatcatccagagttccagacccagcagtcttctggttctggtgcttgtaggtgcatcttgcgcatgtaactcttctcctatcttattatataaggcagtaatcatcccttatatatgtgcgcagattctgagtcattgctctgatcaggttattgtgtattgttactcgctgctgctgcctgccagcattcaga

SEQ ID NO: 4594 - DNA, 8316 bp, Sorghum bicolor
aaaagaaatgaggaataaaaaaaacataaaaagatcctacatctaagaatctagaagagagaagtgagaggttctcgtccattgagggatgaatagggtcggtatgagaggattttcatgtatttgagctcttaaaatgatacgcgatcttaagtaggggcttgaatgaagctgtccttatgactctattatttatggtcgtttgttatagatgtgaatgaaacacatcaatggacgcgtctatttatacctgctcatggttactatgatattacaaatatatatttttaaatatattttaatatttatatatttcttcgatatttttatcatataagaatatctagatctaaagtatcctagtttttgcgaagaaacatgacaaacatgtctcatgtatactcaatatttatctagaaagtttcaaaaatatacattgatatcttttgcactggcatttaatcttttatgttttgccatcttggcctcctaccatagtgagaagttttgtacttccttcatctcctatattttttatatcaacgtcactcctttgatacacatgatgctcctgaaatttgttaacaaaaacatgagatgtcacacttgacatgtggatccatctatcggcctatagtctttctactttctgttttctttctccttagtcgattcttcctactctcaatctattcgcagagggtggcggctgcctcttctcccctcgtggtcgagcttgtcctaatgttccatagggtgctcgcctaggcatgcttatgcgctagtcgaagggacactatcttgcctaagggggtggacggagaataatcggggtgccccagtttcaaggccgtgttgcttgaggaagggacgacaggtggcagtagaggcgataatcgcctcctggaggaggctagcggcagactcggctagaagaaaggcgtgctatgggtgcaactgaaggcagcaagcggatgatgagaggaggatgggcagagacgatgggcacgaggttgcataggcgacaatcgtagcctgaaggagatagaggcagcgtcgacaggtgagaggcgtggacaagaggagacactgtaggggtggatggataaggttagatgaagtgttgacttatgttaaggaagataaggtgcaatatgtaaggtggactaggtctaacatttctatttctatataacattaagtccatacttttttatttttatttattcaataagataatcatatatgttgatgtataagacattgaagaatgtctaggtggatcacctatgtataccacatagcatttttaaggttataattaaatacatatcatttaaaatatcacgatttggaaagatatatcattactatttaggatatattaaaaacatattaatataatttcacacatttccaaaatttcataatttttaatctaagaccctgcttagttccccacctaaaaatttccatccatcccatcgaatctttggacacatgcatgaaatattaaatgtagataaaaaaataaactaattatacaatttggttgaaaattgcgagacgaatcttttaaacctagttagttatgattagccgtgctacagtaacccatatgtgctaatgacagattaattatgcttaatagatttgtcatgttgtctcccgacgagctatgtaatttgagtttctaaaaacttctcccgacatccttccgacacatccgatgtgacacctatgcttaatagatttgtcttgtcgtctcccgacgagctatgtaatttgttttttattagtttctaaaacttcttctgacatccttccaacacattggatgtaacacacaaaacttttttttcttcaacagagcctaaattatatcttctttcccttctatcttttctctctgtaatgtgacggcacgaccgacgcacgtgaagttggccacaagaaggtaagctggactaaattgcccttgcccgcacgccccttggcccaccgcctggagtcgtctcgcccgcggccgcggcctattctcctcatccgctcgccgcgccgcgccgcaacccggaggccggaggagactgcgctcagtcgagcaccacctggggctggggcccagcatcctcgcgaccatctccggcacgacgtccgccctctgccgcccccggtgtccctgcgaccgtcgctgctgtcctacttcgccactggccagtttgccccgcgacgagcacaaccagaacactaggtattccctccccttggtcggttggtcctcccttcccttcctgctgtgctaaatcgtgcgcccaaaccttaatgtaattcataggtaaaagaaatcgtgcgcccaaaccctaacatactatttgtaatccgatctgaatctaattacaggtgtatatgcctactaacttcgattgctttgcaaaaattattgggtgtacatgtgtacacccatgtcctttactgggtccgcccctgctactgattcagtccatccatccacttgcagcagcccgattaggttgttctttacggttgaggagcaagatcgatttagccatggtgctggcgcagttcgtttttcaggagttttgggacttcaattgagcccttgagttttaagtctggacagccacacagccatggctgccgccgccgccgccgctgctggcggcgtgtcggaaccgccgatggtggagcaagtgatcaccgaattcttcgccaagagcctgcacatcatcctggagtcacgctcgccctatgattcgtcgcggaacttcactcggccctccccgccatcgtcgccgctggctggaagccagccgcgggaccggtggttcaaccttgctctccgggactgccctgctgcgctcgagaatttcgacctgtggaggcagagcaacctcgagcttctggtcattgacattgtccttgtgcaacgtgacaataccagaaccgccagtgtcggggccagcaggatcattgagaggtgggtaataaagtatgaaactagcaggtctggcaatgctatcaagaacagtggcaagaaagctagaagcagctcttctcaggatcatagcttgtacaggagggcatacagcggctccacagtgttgttccggtcattgtacctggttgtcaggctcttgccagcataccatctcttccaggggctcaattcgtctggaaggatctgtccgctgagcctctcgcacaagatttcatcatttgttgagccattcacccgcgctgaggatgcagagatgaaacactatgcatttgctccgattgaaactctgtttggttccttaagcttgtctgtttcgtatgtgccagtgctggagttggctgcagtaccagagcaacccacaccggtgccacctgagcttataaaggattatgttggaagccccacaacagattttcttaggaagctcgattccctgccttcagatggcattgcacctgcatgttttccagtgaccaggcggcacagttggagcaccgggcatggagttagaacatcggtatcgccatttccgatgagttcagaaccccatggacgcctagagccacgtatgccgaccgataattctccgacagcatactcacatccacataacacatcatcgtctgggaagaagagaaatacagtaaatgaagagtgctatccatcaccacctctgtcgccatcaccatcccattcgccttctagctacccaagaaatcctttcttccgatatgagagtgctcctttaagtattcccacagcgatggctggtggaggtggtagcaggctgcctccttctccacgtaggaaggataagcaacaatgctcatctcaaaatgagaatctgacacattctccaaatgataaatcaatagtatcaaaggatttggtcaagcttagtgagtttcagaatgagaagtctttgcaaaaggtaattacatgtttgtttgttgatcttctccagcaaaatgtgaaccttgaggaatactattctttcttttactatgaggttcttctcttggatggttggatctcatttctgacttatgaatttctggttctgcttcttgctgcaggttttatcttttggcaatgatgatttggtgtattttcgtgggctaaagttgactcgtacctccagtaaacttttcatcatggatgaactggatgaacgggagttagtttttgcatgggaagataaagacaccatcattgatcagcttagaaggttctcttttctgtctcacttgatgaaaatatgtgtagttcatgacattatgccatgatgccttggtcaaaaggactaacctagtagctacccatcacttcaattgctgttctgctgttgtattgcatttggtttatgtttgatccccttacattcatatcctcatgaatgcatgtgctttttctgtgtaaataaatgacctaggtgtctgataaagtttgaaaacttatatttttggttagtaggtcatatatttttgtttagtaggtcataacactacttttactctgggaatgctatgacattggttattgtattcaccaggtggccactgatgtacatagcttaggtaattttgtcatgaaccatctttgctttcagaaggcctttgaagcaataatgttagcagaagtcttcatatttatataacatgttataggattttacatttctataggggaaactggattattttcatctagcagatatagagcaatggcattttttgtgttttagtttcttgagatgataaattgaaagcagggcattcattgggatgacaagaaacatcttaattagttcaggtcgcttgattgggcttctctacctttttgcctatactgtagtgtagtttcagtgatcattcagatccatctgcttttgtatttggtccagttatcaaattttccctttctataagtattttttcccactaaaagggcaccattgtctatttgcagaattcgtttgggtgttggaagcaacatatgtattagcctattaggtgtatctatatatattatgagtcagaatagttctgtgcatcatactagttaagaatacattaggttagatttaattattgtttctgtttataagcatttcattttctaatcatggttttatgttggagtgatttacttttgagaacctattattctctctattatcaagttagcttgttggttgcctgcaacatttatagttcagacatttctatatcactagacatttgatgattgggttttgcccttatttcaaatgaaaccatcctcttctactagataaataaagagtgttgttgtccagttcttcaaatgaagcacctactggagatgtaatgatatcaccttttctccctttattctattactttctgtggttccttagtttttgtgcttgctcagttgtctctgttgtgttgactgatggggcttactatgtgttgcattaaatttttccggcaatacttttcatcatttagattaagtgtgaccttgcaaacatagaggcatgaaatatgccatatattcttttaatgtattgagaaacatttctaaaacatggagactggagaggcttgggtgtcgtgtgagaaacattacatgggacatgggaggagctgaaccccttagacatccaggagggcagaggatagacaaaaacatttgttggtagcttgtatagcttttgggaaaaaccaatgtacttttgggtgtcgttagcttggttctgaacacaaaagtgtatatgggttaggcattatgaggttcaggtatagagcaagccctggaaatggagaacccagtcccagactcccagtaaaacaagtctggttatatactgctgatctctgtttcagccttggtttgaatctggcttttctttgcttaaatttggtattgcctatgcatcagttgtaccagtggggaacaaggcagttttaggaagaaattagtgatgttcactagtcactaggatttaccatccaacatctagacatgctctcttagtagaaatatcatgcatgccgttacttacatccacaaaaatgaaaatgttcaatagttcagtaccagtggtaggtgatagggcacgcctagttgctgcaaagtgggcacctacgttggctacgaggaaagtacggtattgtgcttgcgggtgctaagcaggttagctgggtgttggccaccttctataacaatgttttgtagataaagtaatacgggaatttgtggataaacctattggctaaaaagtcttgtactgcttgtgtagtcctatggtatttatacaaagtacaaactacacagaagagttattagtagtacccttgtgtcatttacaaactacaaactcaagccttagtgcccctgtgtcatttaaaaactacagactgaagttttagacttgtagtacccatgtcatttgcatgctccagactgaagtcttactgcctctttgttatttacaaattagaaatgacagttgaaaatcttagtatcctttttttttcgaactacacaatacaggggctagatatcatttctaccacagccacatggtggccactttgcagctttcctaatattccttataatttttggtctgtgactatgaatgtaaatttgtgggtcaaattgcaggcagtgggctaatttatctaaagttagcgtttcttttgtgcaagataaacatcccttattgtttcttatattactatacattaactactagtagcagcaattaagatgtttagttaagcaagagggttgtagaatgtacagcgtattctattatcacaggttaatcctgtcatactgaggtctaaagttatggacataattggagtctcatgttaatctaataaagataaatataaggggcttagtggtcagtcttgtcactaacaggtttatcccttaacaaggatagatatagtgactgtgcaggacttgccattatattcttttttttgaaggcacttgccattatattcttgggtgaggtcacagtgggatcagtcaaaacatttctaatagttttgcaacctcagttttgcaacctcttcttgacattttacttttttggtgcttgttaatttgcatgcacttcttgatttgacataagctaatgtagagcttcatctattttccaggatcgacatatctgacagggatgaccaaggaccatctcaggaaggaggctcattaacgaggtctccagatgcagcaattggtattcttatgcgcatcctacagaatgcccctggcctcagggaaaggctactactgccaggccctagtgccccggttcctcaagaaccttcactccagagggtagtgaccgaggaacatggcagcagtgcatcaagctctacaggggtgccttccgttcttctgaggtcaaggacagcggcggatgcgctggaggagctgaacaagtacaaagagattagagaatcgatactgaaccgcagcaaagggcattcctgcagcaccaagctgctggaggagaaacccgcggatggagatccatagcatacagtatgatgacgaaagcgcgctgtgtatatataagtagtagaaggtagatgactatccttaagttgctggtggctgctgagatgattttggaaactaggtagctgctaggaagtgaccaactttatatatatgtataaagtgcggcagacatatatatatatccatggatccatccatctattcatccaggtgccctgagatgatggcccacttgctgggttatgtaaagtcgagacgtttaactgaagttcttgcagtgaaattgtgaaaatcgattcggttcagacttttgagttgcttccttggtaaagaaaccctcttctaccggttaagcttggttctgtcgtccatgtgttaccatggaaggttaaagtgaggctgctttcaatttttctcaaaaattctcacccttaggctgaccagtttagttcaaagaatggtggctacgactcaatctgccttcattaaaggtagatatattcttgaaagcgtagttgtagcacatgaaattgttcatagtgtcaataaatctcgagagaaaggagttgttctcaaattagattatgaaaaggcatatgatagggtgagctggactttttttttgtttgagatgttagtctaggaactttgatgctaaattgattaagggggtgtttagttccccatttgggccaaaaatttctggattttggcccactattttccataatagaactaaacaccactcaaaaaatttggcaaaa

SEQ ID NO: 4595 - DNA, 7098 bp, Sorghum bicolor
tgttggaaaccccaacgcatgatgagtcagaatcattagggcgtccccatcaagactcttggcgctagctatttgattacgtggatgggagagaacatgaaaaatttcattcactagcagtgaactctgattacgtggatgggagagaacatgaaaaaattcagtcactagcagtgaactcgtcgctcaacttgcacagtccatctctaactgcagtccactcgcgtatgtagggatgaaaaaggtacggatattttccgaccgtatatgagaccgaattcgtttagagggattcagatatgtccgtattcgagtctgaatattcaacatccgataccgtactcgtatccgaatacttaaatcgtatatttataatgtcgacatccaatcgtatcttatccgacatgattgagattatccgtattcaaatctgaccaaaaatatgaaaataaatacgatatcaatgatattcgtttgtatctgatccgtttttatccctgcgtatatgtgctgtttgcttggactttttttcatttgtttattctcacacagcaggctcaggtaaagtttaagtctatgtcatatcgaatatagaatgtttgatatatgtatgaagtatttaatatagattatttataaaactaaaacacagttagaaagtaatttgagagatgaatgttttaagcctagttagttcatgattgaacactaattgtcaaataaaataaaaatactatagtgtatgttaaactttaataccctcaactaaacatcctcttaaactttctcgttaaagacgcctttaccaaacacaagccgcctccaaacaacattccaaaatagaacggaggacaatatcacgcaaaccatcacacattagggtaaatatatgacccgtcgcgcctttgggaacacatgacctccatcgtggcatagttgggcctcaccagagctccatcgagactgtattatgcccacgacaacctcctttccccactcatcttcatagtcatggtctcctgtcctaacattgttcgaccgcctcctttgccgcccactctggcggccgcaccgccaccctcgcctcgatgtcgtctctctcgttcctactgctgagcctttctaccttctctatgccattttctaagcccatcagagatagagaagagagaggtcggtcgtgaagtgacgtcgcatactgatgatggtttcgtactttttctaccagctagcacctattttttttagacttgacgtatcgcgattagtggcgtaatggagtttgcgaattattagaaatcactgcaccgccaattgaaacacaaaagcatcgacacgacaaatccagttgtcagtcagtcagtcagtcaggcgcacgtgctcctattgaaacgcgaatgccatggtacaaaagatgaaatccgagcggtgaatgcgagtagcatggtcgagagcgaagaaacgcgccatgcagatcgagaatgaatccctggccaatcaaagcaaattaattaatcgacgcaataaaaatcccggccggagaagaaaaacacggcggcaggaaaaaatgtggacggcgagctgctgacgctcacagtgacaagccgagcagggcaaagcctccgccctccgccctctggtagtagtccggtctcacggaggaggaaaggaaacccaccgagccccgtcaggtctcaggtcagagcctcaggcagaggcgcagcgcagagcacagcaagcctctcccgccccgccccgggtctctccctcccctgccccggctgtccccgcggtctcctcctataataaacgggcgccacagccgcgcggcccgcgagcgaggcatatccacccggccacggccatctcacggcggaagcagccaagaagccggccgggcgccccccgtcccgctcccgctcccgctcccgccgcgccccgcgccggatgccgcgccgcgccgcctccgccgacgaccaccgccgccgctgtcgctgagcatggccgccgctcccgcgggcgcccagaaccgctgcgtcttcggtacgcccccccaccaccccgctccgccaccctcggtcaccttataccttcccccctgaccggcgtgatccggaagctcggttcgattcgggagtggggagccgcatggcgtggccgctggagtcacccagggcagctcaatttgggcccgggcgactgccgccgagttttttttttcttccgatttggagctgatttccccacccctccctctccttctctagtcgatgctgtttcctggagtaatgggagccccatcttggtcggctctggtggtgttggattgggagctcagttccgttcgtgtcgagcttgagcttgcctagggtttaggtttaccgcactagtgcttcattgggcgcgcaacgcaagatgtctttttttgttttgttttgttgtttccggatgtggagatgataagcaggggaattagggactcatatagttgtatttatcaatcttaattgcagttggcaacataccatacgatgcgacggaggagcagctcgtgcagatttgcgaagaagtcggcccagtcgtatccttcaggtctgcttctgctcacccgcatcaatactgtaatgctattgtgccgtggtagcatgtaaaatcgttggttttactccaaatgcttatgcaacactacttgattttttaatatgcgtacctgatgggttgtagaaattagcccttactgtcaaaatgtctgctttgccttatttattcagcttgttaaaaacaaggaatatattcaggttttggcattactgttttcaacttgtgaattggataaaatgccgctgagctatcctttttggcaactgactgttaaaaatgcgcttgcagattggtgattgacaaagagactgggaagccaaaaggttatggcttttgcgagtacaaggatgaggaaactgctctaagtgcacgccggaaccttcagggttacgagattaatggtcgtcagttacgtgttgattttgctgaaaatgggaggaacactgacagaaatagagaaaaggtcgacgatcctcaaatttttcctgtagaagagcctttcctaccacttttggagttctctgttaatacgagaagttgtatagtcttcgttcctgtgaatgataatagttgcgccttctccaaccaccttgtgtctcctgtttcagtttcttgcaagcatgtttgtgtatgtacagctgctggactgtacatacacacacctgctataccgtccaattccgtcattgaattatattgttctggtgtggtgccaatgctttgcggttggaaaaaatgtccctgttatctcgacttttccccttcttggaagtagtgtgccaaagaggttgggttatagtctggcaaaattattggcttaatttaatatatgttatggtcgaaagatcctcttcagaagtttgctgactgctgaatatgaggtttactttctaaatagcaaaagaagcaagtactatagtcttatggaagatgtataatcggtcttggttttatgcgccagcaagatgattgccactgttggtaaattgattgctgaaaaatagtacatgtccaatcggccttcatatatgttcttaaggactcacagttttctttcagcattgtgttaatatttgccctcactgtagcttctgccagctggctttgtatatctctaccaatgaagtgtctgaatacaatgagagtgtctgatgctgatacatatgtgccactttttgccaaaatgtctgagtttacatgacagatactgtgactactcacaagttctgaactaaatgcagttgatttatataaggacaccgtttttttaatactaacgtatcttcgagacatgtttttctcgaactatcttggagacatgtgaaatgatctagcatgatgttactgtacacagaagaatctatatctatttgtgaactttgccttttggaaattaagtagcttcacagtggagatggagttggcacatgttcattatatgaatgaaaatatagaacacctcaactaactgaagttgatttagcttaaattagaacaacttgttgacttatgctggatacatttatgcatttcagggtcgtggtggaccaggaatggcatctaatgttggttggtttcttttttttatttttttcattcaccatttagtttatgtatatgctttcaatttctatgcatattttatgttcatggatgctaacactgatttcttgatggactgacacagatagtcagaaacagttagctgggacttctgttgttggagagacaaaccttcatcagcccgttggtctcccaccagcaatacatgctgcgtctgtgatggctggtgtccttggtggagctcagactgcaaatgttcaaaacggtttacctgtccagtatggacttggaaatgaccctcttactcattatttggccagaatgtcaaggcatcagttgcatgaagtcatggctgaattgaaggttaacttgtagtcttttatgaacttcaattacttgacatttgcaagcgaacaagtgctgattgtagtttcttatgtcatttttttaaaaaaaaatcgcagttcctaactactcaaaataaggaacattccaaaactttgctgcaaggaattccacagctgccaaaggccctatttcaggttagttttttttagttttttttggctaatagtacttgtcaattgtgtattcttaatgtcattttatacttgattcaaaccttttgttttagtcttgtgtaggttgtaaagtctccacatattctttggtataaagttttcaaatgtttactgaatctatttgcttccatttattttaatttgataatcttacgtgattcggtgctactatatctatttaaacttttgttgtttatgttttccacttttctttttaggattgtccatagaactctgatatcattcatgattatcttgtgatcctgggtggaagaaaagttacattccttgatcttattaaacactgagtagtttggtttacgtgtcagaactaagaaaaaatttggcatgcttacttgtggcttaactgttaagaaaagttgagactcgactccctatttctttattttattttttgtatattgcaatgaaataagcttgtttccttatttgggaaaagcatatcattaagccattctctatcataaggatgaaagattagaaactcatgacttcaatttttgccttgttgtaatgcaggcacaaataatgcttggaatggtgacaccacagatggttagttcttatttgtctttgagctttaggcacccactgttttctgtcttgatataatggatgtatgttctatacaaattgcagatgcagatggcaaagagccaacagccctcgggcgccttagcacaatcttcatctcacctcaatgaaccatacccacagccagatgctatgattccagtagtctcaagaccattaagtttgccaactaacatactaccaaacccaactgaactacatagttttcctcagcatcaacatgcatctcagcccccagtcaaaatgttcccacatggacatcagtctgggattgcagcacaatctccaattctacatcagtcccttggtggttcttccagtgttcctactcaatctcttgcgacctcagtaggcttaatctcacaagttcagcctccatttgtgccacagcaccctggaccacctgtcatgcctacaagtgtacaacagctacctttgactcaccctcatcttgctcaggtagttttcttgtaaagggactaatgtaattcactaggggtgtcttagtttatgtatgaaaatatcaaatcaatgttcatgatgagtcatcttgctatgtgttggcaatgcactaatgactacagattaactgaattgtcccttttatcttaccagtcacataggctaactcaacaatgtccaattgcaggtagctgctgcacctgatattctaccaaatgaaataagggttgctgatcaagcaagtcatttgacagagtttaaccatccttcaaaattgagaaaattggaggatggaacctcggtgcctggaattgtgaacagcagccatgctgtttacacagctccactgcaatcagttggccctagtggaccatctgggagctatagtgctggtgctgttagtttacagcagccagggaacgaagggcaggtacaaaccatttaaaaccgatttctctggatttgttatgttgaacctgtttaggtttgagtttccaatctcggagattggtaactttggagatctttaaccagtctaaacgtttgcttattctatggagttgaatagaattaacattgtgcaaagtttctgaagaagcattataatttccatgcactgaaatatgtgcttgtctcttctgcagcttacgcctgatgtggagtcagctcttctgcagcaagtcttgcagctgacacccgagcaactgagttcgttgccaccagagcaacagcagcaggtgattgaactccagaagatgctttcagctggtaaatagaagcagctgagctagtgcagcaaaaatgctggtttttagaatctggcacatcacataatgttggcaactaacggaaactggaagtgatcctcacactgatttatcaagtcactgcgccgcctgtaacctgtcagcattgtgggcatcttgatgccatcagttttgctccgaagtatccatatggctttctttcttcagatcggagataaaagagatgtgatgggataagatagtgtgaagaaaggtatacgaattatctatcactgctgtatcattatatagggagaaaaataacaataatctgtatcaaaaggagctgtctttttttttcccccacttttcccaaatgggctgtagcatcacacatttttgtcctttgaatgctcttgaaacagttgcaggtaggacatgaattttgtgtaagcttattatgacgaataaatttgttatatttattgccatagatctccttaattgtttgaaagccggtctggaattct

SEQ ID NO: 4596 - DNA, 3340 bp, Sorghum bicolor
cgacagcccccctgtgtcagatgacatagcagaacaagcaaaggccaaaaagcaacaaagattgtgggtacagatgacttccaccttattacaaccacaagtctcaccaacagtaggtaactcattcagaaccacaacagaaatacagctaggacatcgcgtctttggtcacaaaaactgtcgagttcctaatcttcatctgcttcttgctcaagatgctgcaagtgcttcgtcaccacatttggttgtcttgtttaatttggtttagcaagaagcttcgatgcaatctgtagcacgacactgctcaacaacctttctttgtcccccatcagcgtagagacctgcccaataacacataacagcgcatgcataacacatcatttcagcaggattattttttctaatcttgccataaagacaggcttattgacttccaaatggcccatcacagacctacaatgcccaaagcctggagtttctgtactcttggaagctatagattacactattttcagaattggtgattagccaaatacaactagcgctaacaaggactatttcagttttaggtggctaatagttaggtggctattttttactatggctaacggttatccttagcctaactgaacaggccgtggatagcatgatatatatgggtgtgtttggttggcggcttagcctggctatggctcacttgagccagtatttgggtgtttggttggctgtattagatctggggtctggctaactagagccggccgtacgcctggagcctggccaggattgactggccaaatcggccgttccatcatagccaggccagggctagctcttggctgaatttccgtcaccactgctactcgctccacgccgccctagctcgtgaacctgtctctgaccacgagcgtgccggttaccgtgcccctatcgcctgccactagtacattgacacactatacatgcggttggtaacatatttctacaggcgtttttcggatctgcctacgctggaggccagtagaaatcgtccatttccactggcggtcacttgagagccgccagtataaaccttttacacaggcggctctcataggaaaccgcctgtgtaaattttcctaatagagctgcctatgtaaacctattaaaatatgtattatttatttattttttaatttatctatttatttatttattattttattgttattatttaaatatattgatattggttggtcttctaacatagcaacatgtaatttaaatacttcatctcatacatacatacatacttcatctaaccatatcaacaaataaagacaaaaagctagctattcttctctctcactcataaaacatacatacatgttgataaataaattgaaaaatttataaagagagagagacataaattagaaaacctaagtatagcataactatataaatacaacattcattataaatagatagatgatgtggaaggtgacaataaaaaacctaactatcatataattaaaaaaattcaacaattatctctctacataaatatacaagaacacaccattggtttaatcttgtaaaaactagctaaattgagaagcaaacatgttgagagacattatccaaccatattaaacaaccccatctaaccatatcaacaaatcaagacaaaaagctagctattcttctctctcactcatggtgaaaccctagatcaaaaagtggctcaaattgagctagaataagcaaattgaggcaatagggacataaactaacctcttttagcaacctccttcatagaaatgaagatcaaaacctccccccttgtattttgagaaatctagaactccaaaatcacccccaatggaaggtgggtgcgagatactgtgttcttgtcggggaggaagaaggggtcaggcggttgcttaagtcaaccgcctgtgataaactgtttccacaggcggccaaaattctctgacaccgtccgatttataccacaggcgcttcgtacctggaaccgcctatggtttacaaggggggcgccagttttgagcctctttctactattgtgccttggcgaagtctggcgactcaaggaagctatacgaccacaggcccgcctccgctcgcgcccgtgccttggcatcgtcccagaggccgcggacgacgacgtcaccgccgccagctcgccatcgcctgctagggctagagttgagctcctgccgcctcgcttccagctccctactccccaccgcctcccggtgccacccggggccgccccactccctccgcttctgctcggcggtccccgtggctatcgatgtcgctgtggctttcgatgtcgccccactccctccacttctatcgaggtggtggtgggcgagccggcgcggcacgcggacctgccatcgttcgcgcgggtggtgaactcgtgcgacgtgctggtgggcatgcatggcgtcaggctagccaacctagtgttcctccccgcaggggccgtggtggtgcaggtggcgccgctgggcgggctggacgccatggccgcggaggactttggcgcgcccgcgcgtgacgcgtggattcggtacgtgcactacggcatcgccgtggaggagagcacgctggcgaggcggtaccgcagagtgggcgacttcctcgataagctacggggcaaggggtacttcgagcaaggcgtgccttcctccagtgtgagttctggcgagggagccgccggagttggggatgctgcggttgcagctgcatctgaggacgcaacagcggctgcttccagtaacactgtggtggctgcgcggatagcgcggtggtcgttgaagaggtagtggtagcgggcgctgcgtctcctgacccgtcatcctcgtcctccatggcgggaggcatgggcggccgtgatgggccgaggccggcggttgccatcggagcggacgccttcgtggggaaggcggcgcggtcggagcggacgccatcggagcggtcgcttccggagcggacgccatcagagcggccgaggccagttgagtcgtggccagccgggcacgagcgggtgcgacggcgaccggccctgggcattcgacttccacgttcaagatgctgccgtcaagatgctcgagagaatgcttcaaagggaggtaaactcaccctcttcacaaagaggtgactatatacaaaccaagccactcgaccaaacacgaatttatcttagccagactctgcaacgcatgcaaccaaacaaacggatcttggcttgctagagacaggcttgaattagcctgccttagtttggctagccagactcaggtacgaaatgaaccaaacacactac

SEQ ID NO: 4597 - DNA, 11528 bp, Sorghum bicolor
ggtgagtccacgcttccttctcgatctcccgcccgtcgatctcgcccaattgtagcacctcgcgtgggggccaccggagcttcgctgagctcgacccgtctgctgagttccgttctgacgggccgcacgacaccatcctctacttgcctcgccgtcgtcgtcgtcgttctcgcgcccgaccagcgctcccgccgcggctttgccgccctcccttagcccgcccgacgtgcttcccccgccccggctgcgcccaccggccgcatccgccacccgcagccggtggcgccccgccgcctcgccccgccgcgcgacccacccaccgccgggggattgaaggtctgggcagagagatcagcccccgggggcccaacagccccactgctaacccggcggcgccgcggctgggagtcgcggggctgtgccttcaacgcgcaacgggacgcgttttagattttctgctagcggaatgttgggtgcggcggccgagatctcatgcctgggggctctgtcggtaggggtgaggtggaggagggcttgatttttggccgtttctgtgatcctgaccgattcggtggacggtgggtgtgggtgtcactggcactgtgctcgagtggagcgattttaagggaggagatggatggttgggattcaggaggggaaaggcgcaattctacaggaattttgtagctagcaaaggtatatttgtttgtttggtgaaggtgtctgtcggtgcgggtgccctcatctaaggaaatgtacaagtctttttccttggttagttagaatcgtactaataacctacagaacagaatgaaagagtccatgatggatgctgctgctgccttgtagcctcatgaatttgggcgagtgagggatcgagattgctgtccctcaagattttttttttttgggggggggggattagctctgtcatagtcatagtgctctcaaaggtatatttgttttgtgaacgtgtcccctcatctaaggaaatgtacaatcttttttccttggttagttagagtggtactattaatctacagaacagaatgaaagagtccatgatggatgctgctgctgccttgtagcctcatgaatttgggtaagtgagggatcaagattgctgtctctcaagaattggagggattgcctttgtcatagtcatagtgctcttgaagttaaggtatataagaggaagtgttgcctgtagaatcagtagcttggttgatgaacgtctagctacggatacttcaataagtctcatccgcataccttctgttccatggcaaatctaacactctacttgaaaggactgtcttcgatgaagcgttgggacttgtgcttctcatctcctttacttgtgggtgctgctacatgtgcaaacatttgagtataactcaagtgcaagtcatgatccaactgtttcatttgtttgactactttcccggtgatcatttcctataaaagcaactacatttcattgtcagaagtggcgtgccagattttgtgaaactcgatgatttgaggttaaaaagaagaaccttttattcatgttttacatggaccaaaattaatacatttctaggtgatattgaagatcttgtagaagatttggattgaaatttttagccacggtcacaagagagtttgttggttcaaccttgaattttgtagtatttccttgaactaagtttaagctatggtactactatctccttttgttttgctgttagaactggatctgactgtgctatgatgcattaatgcattattccacaggatctgcctgcatgctttaaaacagatattaattcattattctcttggtaattgcacgattaagtgggattactcttttccttttgcttccctctttctcctttatgtcaatgcaaaaatgacacaggctggcactattattcattatgctaattactttcatttttatcctgtaggaattctaaagcaattcaaggtgtaaagctggtatagatctaatcatggcaaatttcaactcgtcagaacctcgagactctagagaatcaacttcacctgcaccatcaacatcatcttctatatcaaggtataacatatccctgttttaacctgttactcatttacaatgttttgaaatagcttactcataggagtacagatcagctgtctagttgcagcgtgtcatcatcatgtccatttagtcggtggctagtcggctagtctagcattagagtcatcgtgcctacttgccttgctacccaggatatatatagtacaactgtataaattgtaagttgttaagtactgctactagactatagcaccgcgcactgcacaactatattatcataaattgataaacaaagcatacaacaagcatggtgggacaaaactggttaatcagatgactaattgtgattactgattagttgttgaatattttgtcaaagaatgttgcttcggacaattagcttagctggttgttcctgtttcattttcatcttacatcctcttgtgtttgtttgaagcctctccatctcacgtttttccttatttcctttgtcagaatcacagctagcaaacacgcaacctatagtattataacttttttttgaacattaactatagtatataactcgttacttatttgttgttctacagggaaaaaggtgacctggcagatgttgatgatcctgaaagtgcaatgtccactgtggctcgattgttggaagacctccatgctagcatggtatctccatctgggaaggaagctacaaccagaaggttacttgaactggccagagcaaaacaggaggcaaggattttgataggtagccattctcaggcaatgccattacttatatctacccttagagttgggtcatctgcagcaaaagtaaatgctgcagctctacttagtgcactctgcaaggaagaggacctgcgtgtgagggtcctcttaggaggctgtataccacccttaatctctcttttgaagtctgaatctgctgaagcgaagaaggctgctgctgaagctatttatgaagtgtcttctggtgggctttcagatgatcacataggcaggaaaatatttgtgactgaaggtgttgttccaactctgtgggacttgcttaatcctaggtctcgccaagatagagtagttgagggctttgtgactggggctttaaggaatctctgtggggacaaagatggttactggaaggccacacttgaagctggaggtgttgaaataattactggtcttctttcatccaagaatactgcttcacagtcgaatgctgcctccctattggcacggtttatctctgcttttggtgatagcattcccaaagttatagatgctggggctgttaaggctctccttcaccttctaaatcgagataatatcatttctgttcgtgaaagtgcggctgatgctttggaggccctgtcttccaagtctagtattgcaattaaagctgtggtggatgcaggaggccttcctattctgattggagctgttgtagcaccctcaaaagaatgcatgcagggtgagacatgtcattctctacaaagtcatgctgtccgtgctttatcaaatatttgtgggggaacaacttctctgttgctttaccttggtgagctctgccaagcaccccggtcacctgttccccttgctgacattcttggagcacttgcttattcattgatggtttttgatggctctgatggtaaatcgtttgacccagttgagattgaaaatactttggttgtgctcctaaaatctcatgacagcaagcttgatcgtattcttgaggctttagcaagtctatatgggaatggttgtctctctgacaggcttgatcactctaattctaagaaggttcttgttgggctgattaccatggctcctgctgatgttcaagaacatcttgttcgtgccttaactagcttgtgttgtgatggtgttggaatatgggaggctcttggaaagagagaaggggttcagttgctaatatcattacttgggctttccagtgagcagcagcaggaatatgcagtttccttattggctatcttgagtgatgaagtagatgacagcaagtgggcaataacagctgctggaggtatccctccacttgtccagctactagaaacaggatctcaaaaagcaaaggaggatgcagcttacatcatgtggaacatgtgctctgacagtgatgatatcagggcatgtattgagagtgctggagctgttctggcactaatttggcttctaaagagtggtagccctcgtggacaggaggcatcagttaaagcactcaagaagctgatacgatcagcagattctgctacgatcaatcagttactagcattactgctcagtgactcactgagctcaaaggctcatgtcattacagttctcgggcatgtccttgtgctggcgcctcagagagctctaatccagagtggagcctcagctaataaaggtcttaggtcactggttcttgttcttgaatcatcaaatgaagaaacacaagagattgctgcaactgtgttggctgatattttcactatgcgtcaggatatttgtgatgtcttggcaattgatgaaattgtccagccatgcatgaagcttttgacaagtggaaaccaagtgattgccacacaatctgccagagctttaggagcgctttcatgttcagctagttccatgtcaaaaaacaaaatgtcttgcttaactgaaggtgatgtgcgacctcttatcgaaatggcaaagacatcatctattgatgttgctgaaacagcatttgctgcattagcaaatctcctatcagatgcacagattgctaaagaagcgttagatgacaatattgtcttggctttgactagagtgctcaaggaagggagtttagaaggcaagattagtgcgtcgcggtcacttcgtcagttggtcaaccagtttcccctcagtgaagttctcccagattactcgcagtgctgttttataattcatgcattgttggtatgtctatctggcatcaatttggacaatgttacaaatttggaaccccttgatgttcttacattgatggctacaacaaaggagggttcacattatagcccccctctatgcactggttttcttgaagttccagaaagcttagaacctttaattcgttgtgttagtattgggcttccacctgttcaagataagtccgttcaaatacttgcaagtctttgtcagggccgaccttctctacttggtgaatatttaaacagaagtcaaggatgcatcacttcacttgctagtagagttatagagtcaaatgacatggaaataagaatcagcagtgcagtcatcctcatatctgcaatgagggacagcagagaacagtcgatcgatgttcttgaagcatcaaaacttctgaagaatctgatatctgcactcattgatatgctgaagcaacgttcctctttaacatccctagacattgaaatttggaaacctcacatggaaaaaagttcgcttaattatgagcaggatgttttgagtgtgcctgaacttggaaaggtttctgaagaaactgttgcactatggttgctctcactgatttgttctcatcatggaaggagtaaatatactgttatggagctcaatggcgttgatgcagtatctgatagacttgctagctatactgctaaccgacaggtgcatgtttcacattttattttttctgttttcatagtactcactctatctgagtaacttgttgctaaattcgagatattttctgcttcaaactgctgtactgctgcatttagtaatttagtaatctagatgtactggtaatatggaaatcttatatccatcttgaattgtcatcgtgactagcatgcaaagttgcaaacagtgttaggtctaagttttcctgtatttttacatccttgttttgagtaatgctggataagaaagataggccacttcatatgtccatccactttccatgtttctaactcaagtctaaaggacttctttactctgaattggttcctgtaacagactgctggttgatcaattttaggtgacctactgacaagtgacaccagctatacatatgcatcagcacatatggtgtcactagtcttttatgttacatataaaaagaaaaccaatggccattttagactagtgaagactttaaaattttggactattggttattaaaacatttagtcgacaaattctaggaagagttgaaatgatttcccaatgctgtttatgattccacccaaagttcctgtttacataaaaaatcatcatgctaagttcctacctagaaacagaagtccactcctacacccacagatgaaatgttatattttgcaagatgaaagctggttggtctgcctgtctgtttcattttttatatgccaacttgcctagtaaattgttggaaacactaggctccagatttgcaccctttgttcttggtaactccattgcttagataccagattctgatgtgcataaatattactccctccgtcctaatatataaggtgtaaccacattttattcgtgtcccataatataaggcgtgctgtctgtctagacgcatgtacatcgatgcagtagtactagtgttgagagagagaattaaatatactaggacagagggagtattagacagactagttttactatccaattggtgctgactgctgagaacagaacaagcaagcagaacaattgtggtggtctgcttaccatagctgaactgttctacattccatcagacaactttcattctttgttgcattacttttcatatctgtttctattgctatgcctatttccaagctgtaatagctgctccatgttacaggaacagtatgaagactcagaaaatatatggacttgcgcccttctgttggctactctgtttcaggattcagtggttgttcagtcttctgaaataacacgaacaataccttctttagcatccttgctaaaatctgatgatatcatcgataaatactttgctgctcaagcactggctagccttgtttccactgggagcagaggtatacagcttgctattgcaaattctggtgcagttttgggtgctgtagcattgatcggacaggtagaatctgatatgccaaaccttgttacaatggctaaagaattcaagttggcagacaatccaagtcaaataatattgaaaaacctttttgagcttgaagatgtctgcactggtgcttccgctcgaaggtccatacccttgctagtggatctacttaaaccaatgccagacaggccaggtgcacctctgattgctttgcaccttctgactcaactagcggaaggtagtgagggaaataaagttgctatggcagaggctggagctttagatgctttgactaagtatctatctttaagccctcaagactcaactgaaactactataaccaatttattagggattttatacagtaatcctgatcttctttaccatgaatcatcacgcagcacttcaaatcaactggtagctgtcttacgtttgggctcgagaagttctaggcttagtgcagtaaggacgttgcagaaactctttgatgcagagaatataagggacacagaagtggcccggcaagctattcaaccactacttgacatgcttgaatcaggaactgaaatagaacagcaggcagcacttggtgcacttatcaagctttctgctgggactatctctaaggattctgctatgtttgatgtagaaggcaacacacttgaaaatctttacaaaattttatccttcagttcgttattggagcttaagaaagatgctgctcaactctgctatattttatttgagaactccactgtacgtgcatcaccaattgcaacagaatgtcttcaacccctgatatcactgatgacatcaggatctagtttggctatcgaaccagcagtttgtgctctaaacagattactggatgaggactacaatgcagaggttgctgcaactagtgaagttattgatcttcttgtcagttttgttcctggtacaaactatcagttgtctgaagcatgtattggtgctctcataaagttgggcaaggaccgtccaaactgcaagcttgacatggttaaagctggtatcattgagcatgcgcttgatatgattcttgatgttcctgtatctgttagttcatccattgctgaattgcttcgcattttgacaaacaacagtggcattgctaaaagttctgctgctgcaaaaatggtggagccacttttcttgcttttacgtcgccctgatgttactatgtgggaccagcacagtgccttgcaagcacttgtaaatattctggagaaacctcagagtctagcagcattgaagttgactcccagtcaaataattgagcctttaatatcatttcttgagtctccctctcaagcaattcagcaacttggcactgaggtgctctcacatcttctagaacaggaacattttcaacaagatatcaccaccaaaaatgcagttgttcctctggtgcagcttgctggtattggaatcctgagcttacaacaaactgcagttaaagcacttgaaaacatctcacagagttggcccaaggcagtagctgatgcaggtggaatttttgaactttcaaaggtaattgtccaggatgatcctcagccaagtcaagcattatgggaatctgcagcacttgtgttatgcaatgttttgcgttataattctgacaattatgtcaaagtctcaatggctgtacttgtgagattgctgaactccaccatggagagtactgtcacgatagctctcagtgctctacttgttcaagagaaaagtagctcacgctgtggtgtggccatggctgaggctggggcagtacgtgcactcttggagctcctgaagagccatcgatgtgaggaatctgcagcaagattgcttgaagctctaataaacaattcaagggttcgtgaaacaaaagttgccaagtatgctattgctcctctctcacagtacctgttagatcctcagtccaagaaccagtcagcaaagtttctggtgactcttgcattaggtgacattttccaacatgaagcacttgcaagggcaagtgactccgtgtctgcctgccgtgctcttgtaagcctacttgaggaccagcctacggatgacatgacaacagttgctatttgtgcactacaaagcttagtgatgcacagcaggacaaataggcgtgctgttgctgaagctgggggcattttggttgtgcaagaattgcttctttcaccaaatgtggatatttcaggacaggctactcttctaatcaagtacctattttcaaatcatacactgcaagaatacgtgtcgaatgagcttatccgatctctcactggtgagtcggcaatctttatggtgaattgtgtccatgatattttaattcaaatgtgtgttttttcatgttcttgagtgaagtctcatgcccttctattttgaaaattaaatggtttttcatttgccattttgtctttgataccatagacatgaatatctaataaaaacagatgcattaagttacgaaatgattgaattgcaaatgctttatgggtgctatcctgcattcctgcttactaatggattgttttgattatgctctaatgtcaaatgcaatttgtcacagctgccttagagagagagctgctctctacgtcaactatcaatgaagttattctgaagaccatatatgtgatattcagcaactcaaaaaggtgcggttttctgaggcggcaaccctgtgcataccacacctgctttgtgctttgaaggatggaaatgaggctgcccaggagagtgtgcttgacacccttcgcttgcttaaagaatcttgtccgcacatgaatgaagacatcgctaaagcccagtccctgctttcagctgaagccatacctgtactacaaatgcttatgaagacatgtcctcccagttttcacgagagagccgatagtttgctccattgcttgcctggttgcttgacagtgaccatcattcgtgggaataatttgaaacagacaatggggggtacaaatgcattttgttgcctgcaaataggaaatggtcctccaaggcaaactaaggtaattcttgtagatagttgtactcaataatttatttgtagtgcagttgtttttttccctctgaaacccagtattgccagctgctgtaccttgcaagactgggattgccgctctgctgcatgttgtattttattttatttagtttacatctttttttgtctgtggctactgatgtttgtgctgaacgtcaggtggtaaaccacagcatctgcccagcttggaacgagggtttcacctggttatttgatgtcgctcctaaagggcagaagctctacatcatatgcaaaagcaaaaatacatttggaaaggtatggtcataactcataaggatggcgtgtcttctactcttctcttggttcttggcttcttgcctgtgattcttttgtgttatttctcaaatgctgatattttcattgcagtcaacccttggaagagtgaccatccagattgacaaggttgtcaccgagggtgtatacagcgggttcttcagcctcagccacgacggtggcaaggatggctcaagaacccttgagatagaaattgtatggtcgaataggccatccaacgacagtatgtagcatatggatgatttacctgacggctgacgccaaccttatactcctggcttccatgtaaatcagccccccataatcatccaaatttcatttatttatatgtagaaagttaaaagacgcttagataacccatgccatcattcgattattgagtaactctcgggagtgttagccttgctgctgtaacagattttggacctgagtaatttttttgtacagttgaatttatttaatgtaattatatattagtgttagattggtgtaagtgcggacaaacattgctgacagtaacattctgtgtgatgtgtggcgtgatagttcccgtgggtgtgtgttttccgttgttagcacttgtagcctgagttgatttttagttcactgcttttaggaggtaatcgggttgtttttaggtttttacccttgtggggcagctctagattttcctggttgtttttaagaggtaatctatcacgattgccaaacaacctagatttcttaggctgtagatttcaccatagcttactttaaaaatccagattagataaaataaatccttagatcagcggttccaaacagggcgaaagtggaaccccaggtcatggattgtggctggagggagaacatttccagtgagggtaattttcgatatccgttttttcttctccagataagccaggtcgtaactatctcttctctatcaatgaaataggcataaccttatatcggttcgtctgaaaaaggatataactttatagaaaaaagtccacataaccaccttaact

SEQ ID NO: 4598 - DNA, 6964 bp, Sorghum bicolor
ttggattggatttggatgggggcctccgccccaggaaacagagagcctgtcgcgattacgccggccccataactgtgacttgtttaatccacaacatcctctcaggccgatggtgaaaatttatgttcctgccacgtagtatattcatttgtatataataataattatctaattatgtactaactaaatttaaaaaaattatctcacaatttatagataaactatataattaattatttttaacttatatttaatgttccatatatatatatatatcacaagattcgacttaataaggaattttaaaaatttttaaaaaacttttaggaactatacaaggcctcacactccctctccatcaaacctattttgttcattattagtaatactaaggccttgtttagttcacccaaaaaccaaagagtttttaagattctccgtcacatcgaatcttgtggcacatgcatgaagcattaaatatagacaaaacaaagactaattacacagtttagctgtaaatcacgagatgaatcttttgatcctagttagtccatgattggataatatttgtcaaataaaaacgaaaatgctacagtaccaaaatccgaaatcttttcggaactaaacaaggcctaacttattattattattattattattattattattattattattattattattattattattattattattattattattattattattattattattattattattattattattattattattattattattattattattattattattattattattattatagtactactactagtctactatcgtgcattacattacagacaagatgtaaactagtaaggccctgtttagttccctgcataaaattttttcatccatctcatcgaatctttggacacatgcatggaacattaaatgtatataaaaaaataaactaattacacagtttggttgaaaatcgcgagacgaatcttttaagcctagttactctatgattagccttaggtgctacagtaacccacatgtgctaataacagattaattatacttaatagatttgtcttttagttttctggcgagctatgtaatttgtttttttattagtatctaaaaacctctcccaacattcttccgacatattcgatgtgacacccaaaaaatttttatctccaatctaaataggccctaacctgaaacgccaacgaaaacgatataaggagagagagagaggtgacaggtgacgaaacccatggccacgtcatcccctccccatgtctccttcgttccattaccttgcgacgagaggcattcgtccgtccccttcactgctactctacaagtactccctctataactatataactatataaaaaaatcatttaggacagtaatataatctctacaatctaactttatttttttgtttttataaaaatatttataaaaagcagtatatatatatatatattaacaaagtatgttttaagataattctattcatatggtttttatatttttaaactgaacaagttattcataatttatattctcaatatttgatctaactcttgtttaaaatatgcaaaaagtacatactactactactatagtatacatacatatatacataattacttcatataagagtagagcagaccaccactgatgaagatggagatggagaacgaaaatatcaaccgcaatctcccaaagtccaaacagatcccatcgcccaccaccgcacatcacgacatgcccccttccctaccacagcgagtggaggagactgaaaaaagattagatttttttattataattaattaatttattaacctctcctcttctcatctcgtctcttctccctccccctccagctcccgctcctgcaaagtccaacttcaacaaggcaagggattgctggcgcccccgcaagcgagcgagagaaaaaaaaaacttcttttttgttttcaaaccaaacgaacagtccaatccaatccctcgggcaatccatccatccatccagtgagcggagcgcgcgtgtatatatacatacacacggccggccggccgccgccgcaggcccgcagcaggcgtcgctcctaccgccaccggccggactcccccccccccccccccaacttgtccccatccgcttgcccccccccccttcttcttcttcttcttctaaaaattgctctgctcccctgttacccaggccccgagggaggaaaaaaaagatggcggaagaaaacgtgcgggaactgcccccgaacttcccggcggggcggaagcggtccccccaatggcgcgcggaacaactcaggggactcatccggatgatcgacgagaaggaggccgagatcagcgccgcgctccatgaagacctcgccaagccgcacatggagtcctatctccacgaggtaaaatttattcacatactactgcctcgcatcgcatcgcatcgctaaccccaatccatgattccttcctcctgttcccccgggcggcggcgctgctgattgattcttcttgttcgtcgtggggacagggttaggggatactctgcttcgtgctttccgattcctctgggtttaatgtttgttggtgttggtgttggtgttggacttgcacgcgcgctctctctctatctctctctcgcgcggccattcattccaattcgtaatccaatccaatccaaaccgctgatgctgtgacgaggccatggattcggatgggaacccgagctcttctcggatagacatggaggactccgtccggtccatctgacgtgcgcccgccgtgcccctgcttcttcttctgacaggaggcagggctagtgttgtgaactgcgaattcatcatctcgactctctatttttcttttggggattccttgtcgccgtgttttgggaaagctgggtgcttttttttttcagtcaatttcttatgataactgctgtggggattctgcaaatgcttttgcgttgcgtgtaaaaattggttcttgctggcgttgcttccacggtctcgtctcccgcgtctcactcagcctctcagcctggtctttcggctccgcagaatttaccataccttgcttgctactagtagttaaaaaaaaaagcggtggagctgagacgtgcttgtcaacagtcgtttctgacaatgatttcacgctgaaattgtctccgaattagttaactgatagattgtttacttctcagtagtcgcatcaagtttaatttcatcctttcctagtactccgtactgtactaactgagaaccgcatgttgcttcacctgtgtgtttgtgcctcagatctcactgacaaagtcgtcgtgcaagtttgcgatcaacgggctcaagaactggatgaagcccgaaaaggtatttatttacctctgcaactccagcttccagacatataactatcctcctgctgccactgtttgtctgtttcgctgctggtctggtgctaaacttttggaattcattcgtgctcaggtacctgcgtccataactacattcccgtcctccgctcaaatcgtgccggagcccctcggtgtcgtgctcatcatctcagcttggaactaccctttcagtaagttgattgattctaagctgcaaaagattttttttcccccctaaacaatttgcccgtctgagtcatctctgatttttaattcaaatagaaatagacggggtgtcctgtcctgctagttcgttaaaaaggacatttgcaaaatgttttgtgctaagatagttattaaacagttcgttgttgcgtgatggagttggatggagcctagaagagcctgccatgaatttcttatgcttgcgtgccccatgcttgagggtgtgctgtattatgtgatattttcgtatctttcagtttccacaaagcaaagctgtacgcaaccgcactagtttctttcaggcacgtcactagtcataattggcttctagtcaacatctgaacattcattcacagctccttttcaacacaaaggccactagaagaaccgatgctttgaccttttataattcatatatgcattttgtgaagaaaatatctttggcctgatagccttttccttgatataattcaaaacaaggaaaaacaagaaatagtactaattatttgtacttgtccattgtagtactctctattgacccggtcattggagcaatcgccgctggaaatgccgttgttctgaagccatcagaaatagcgccagctacctcgtcagtgttagcaaatctgctacccaagtatgttgataactcctgcattaaagttgtggagggaggcgttccagaaacaaccgcactgttggaacagagatgggataagatcttctacacaggtcaagttcttaatacaatacctaggaatttcatggctcagtgattcttttagtttcttagataattgactgaataaagatcatctcaagctctgaatgctatgacaggtgcactgttaattggtacaatatatagtacaggcattagccatcacacagttattacgaaaatagagattcttctaatataatccaaaagtccttgatactgaactgtacgttgttcttgggattctgacttgatgaacttttccaggtagtggaactgtagcacgcatagtgatggcagcagccgcaaagcatttaaccccggtggctttggagcttggtgggaaatcccctgttgttgtggattcgaatgttgatcttcatgtaaatgcatctctatgtgaaatatcatgttctcaaataaaattaccattttttagttattacagaactgacagtttccttgtaggttgccgttaagaggattgttgttggcaaatggggatgcaacaatggccaagcgtgcattgctccagattacatcataacgacgaaatcattcgcaccagagctggtatagataaccctcagcattatagacaaagaatctcttgcaccaagcttgaaactaaacccccaatgtctgatccatgaagtaaatgtaaatctttgccaggtggcctctttgaaaagagtcttggtaaggttctatggggaggatcctctgcaatcagcagacttgtctcgtattgtgaattcgaagcaattcaagagattgcaagatttgatagaggaaaaaagagttgctgacaagattgtgttcggcggcgaggctgatgaggagcaattgtaaggattgttgctcacacttttgcaggtacagatatacagtagtgaaagttctttgatttatgttaacaatttttttcttggatcacagaaaaattgctcctacagtattgttagatgttccccaagattcagcaattatgacaggggaaatatttgggcccttgcttccgattgtgacggtcagtaatatttctctgccttcacggaacaactgtaattctgcagtactctctgcttgggcacctgtgttactctgactgaaaatgctgctatcaccactaggactcagaaatctacttctgaagggcttatataactaaaaaccacatacacataaacacaataggaatgtggttgaagttaagcacttactattatgggagtacaagtgtacaacagtgtctccttcattctacaaataaatttctaactcattacaattagggtctgatttctttcagaattgtgtttccaggtcgaaaagattgaggaaagcttcaacctgatcaacgccaagccaaagccactcgctgcctaccttttcaccaagaacaagaagctgcaagaggagtttgtagccaacgtccctgcaggagggatgcttgtgaacgataccgcgctacatgtaagttctgcttcccccggaaactctctgaaatgaaaaattaaatgaactggaaaagtagaacatacatagtgtcctaaatcctaatcctgcaatacggcgtgcccagctcgccaacccatacttgccctttggcggcgtgggcgacagcgggatggggtgctaccacggcaagttcggcttcgactgcttcagccacaagaaggcggtgctgatccgcggctttggtggcgaggcgaacgccaggtacccgccctacacgacggagaagcagaagatcctgagaggactcatcaacggcagcttcatcgccctcatccttgctctcctcggcttccccagggagaagcgttagatctatgatctatgatccgtcctcttgtcggatccggtacagcattttgttcgtgttcgtcgtcaggtgcacagtatacaccatcatatgctgtcaaatagatgcaacaactgcgtgccgtgtgctttgtgttacacggttgtataatgcatatatgttgtcacattgacatgtacgtaagggagtttgcataaataagtgttatgtgtctgtcaattattcagtgtgcagaatggatattggataggatgcgtggctgtggtatctctctctgaatctctgtcctctgatggctcatacgtgtatgtactgctgttaactggtcgatgaagccgtggtgatcggagcacaaaaccaaatgcaagggcacatgtgatcaggcagtcagccaggcttcttggtggatcgaaagagtaaagataactcactaggctgtaggttcatttttttttcgagaacatgcaaaggcacgtgtttcattaagcagagactaggctgtaggttcatatctgatagattattttttttcttggcaggaggcaacagccttgggcttgtatagatgagctattgctaattactagttgagctgaaaattagctcaaattaggtaagactagtttgccacgcatgcgtggacagtagaagaaagcgcgtgcgctatgttaggaaagcaggaaaacttggtgaacattagtagtaattaacagtggatgaacagttacccagcggtgaacagcgtctaaacagttgcagaggtcct

SEQ ID NO: 4599 - DNA, 6449 bp, Sorghum bicolor
agcaaaaccgaatctggagagccatatcatatgcgagagtgagcaagtctgctactgacttgcttggccctttttcctcgtagcacagcaaaagaggctgatgtgtcgtcatttatagaacaaaacaaaagaaaaattcacctactttatttaccgttaggaagcgaacaaaatgtacagcgtggcgaacctttggtatcttcgtcccaatctgacctaaaatcatcgcatatactttacagcaagcacagtatataccaaatatagtttttgtctggatttgcccttgatccacttttgtagtacgtatttgatgtttgtgtgtttgtatttgagcgggcactttatgagaatctcgagttgcccttgatccacttccatttcggacaccaaacgaagttgaaaatctagctacccccctccccttgaattgttactatgttccctgtgaccccgtcatcctcttgtttgggccttgtttagtttccaaaaagttttgtataaaatttaaaatttctcgttacatcgaatcttgcggcatatatatagagcattaaatatagataaaaataataactaattgtatatcttgcttataatttacgggataaatcttttaaatctaattagtctatgattagccaatatccatcaaatacgaacgaaaatgctatacagtttattttgtaaatttttttgaaactaaacacggccttgattttcttccctttgttctccgcgcggaatgagaatagaacacttcgatcaggctatttgttttcaacgtagattagatgatggatttgatgttgattggcggacgtagatcgtatgcatctgctccctaatacagcatactactactagtcctatctagtgattaatattatgatatactcctcctctgtcctaaattataaaatatcgatggatcgtgcattgtattggcggtgtatgattagctgtcacggacaagctgccaggatcaggtcatgtgaagtcgtatatacgcacgcacgtgaatgaagagccaacggacataagaatgtccacaccatacccctcaaaagaatacttaggccttgtttagttcctaaaaaattttgtaaaatttttcaaattcttcgtcacatcgaatctttagacgcatgcatgtagtatagatgaaaataaaaattaattacacagtttagtcggaattgatgagacgaatcttttaatcctagttagtttacaattgaacaatatatttatcaaatacaagcaaaaatgctaaattgtcgatttttcaaaaatttttgaaactaaacaagtccatactatttaccactccaagaacagtaaatgcgcccttctgtcgaacacatacagtactcggtgccactttaatttttttttttaaaaaaaccgtatttaattgaatttaatttaatcctacactcctaggtgctgcgatggtactctctctctgtatctgaaaacttgctgctgtacgtatttgcccacctctctccacgtctccaggtccgtatacgcctacggccgcctacgtcgcgcggctaatcagaggccgtggacatgtcacatccgtgacgtggcacgccccaattggtccccgtcccgcccatgtacgtggccgcccgccaccctgtacccggcggcgcgtgtcacgacaccactctacacaccctactactactcctcctcctcctccagtttaggaccgcccactgtttaacttagcccccctaatttctcattaattacatcctaaaaaaacctccaccatcctttagcgcctcttaatgaccccgactatccaaagctattcgcggtaaccacagggaccattccgcaaacgtgtcccgctgcaaatatctcgtgacccccgcgcgagccgccccggcgcccggtggggcccgcgcggcagggacccggcgcgcccccgtggactcctcgcgtgccccgccctattaaaccccaccccacccccggcagcagcagcagtgtcatcctcccttcgacttcgagtcctgacgaaatctgaccaccccggttcacactgcgctgctccgcccgcccgcccgccatggcgatccgctcctccaaggcctgctggatctcgctgctgctcgcgctcgcgctctccgccgtcgcgcgggcggaggagcccgcggcggagggtgcggccgaggccgtgctcacactcgacgtcgacagcttcgacgaggccgtcgccaagcaccccttcatggtcgtcgagttctacgccccctggtgagttttgctcgcgcgcgctaccccccgctcgcatgtccgattcgtttgtttttagtggttggtacatacgggtagatctcgcgctcgggtcgcgagggttttgcgggctcggatcggggattcggattccgctgtgggcttggagagatgcttgtttggtgttacttttcagatgcgggacttggccttggattgggttttggtggcgtgacgcggcgtttggggtcccagttgcgctgattttgtcgctgttcttcgcgtggatttgttttgtttactgtgcactcatgcgcgcggcagcgcggagttccaggtccagactcagatgagtgagtgactagttctagtagtcgttttcgtcgattccttgtttggtgtgggtactcgacggctcaaggatgatgaatcgccgcttttgttcgttttctgcggttggtgtgcttgatttgacgtctttgcggtactctttttcggtcacatggcgtacagaattaggcccgcacaactatagtgatgtgctgttgcttctgtgtgatcacacttgcaactttacagatttgttaattctgtgtttttttactgtagctagttacatgatctctaataattgttatagctaatgtggtcaaatcgaacttgcaggtgtggacactgcaagaagcttgctccagaggtaataatgcttctcctatcatgtggtcactccctttacttacataagaggtgggctgtgttctgatttgttcaatctcatataaactgtgttttcttcgatgtttcagtatgagactgcggccaaggaacttagcaagcacgacccaccgattgttctcgctaaggttgatgctaatgaggagaagaacaggccgcttgctaccaagtacgagatccaagggttcccaaccctcaagatcttcaggaaccaggggaagaacattcaggaatacaagggccccagggaggctgatggcattgtcgattacttgaagaagcaggttggccctgcgtccaaggagctcaagtcacaggaagatgttgcgacccattatgatgacaagaatatctacattgtaagcttccagttcaaaaatttcatgtgtttttatttagtataatcatttaatcagtattacgatgcgcatgtcgagtgatgctcttgagctggcaactgactgataattgcaattttataggttggtgtcttcactgaattcagcggcactgaatttacaaacttcatggaggtcgctgagaagctgaggtctgactatgactttggccacactttgcatgccaaccacctcccacgcggtgatgcagcggtggagaggccattggtcagggtgctgaagccatttgatgagcttgttgttgacaccaaggttttactcgcattctttcttacatttggtgaaagttttggtagcaccagtttatttcattactgataattatgcacaccatccatgctaatgtcatctgagtttgccactagtgacacaatgctgctacattgtgcaggattttgatgttgctgctctgttgaagtttattgacgctaccaccgtccccagagttgtcacttttgacaagaaccctgacaaccacccgtatctcatgaaattcttccaaagctcagcccccaaggtaataacatgacatttgtgctcgaaacagttgggagtacttgtatcggccaaatgttgtttaacttggccattttctataactttagttactactgtatatcaactgaatttgatcgcaagctaccatgtctgcatccaactagctttagtgtgccatgttaactgtattcattgcaatgcatggcaatttgtagtctgcatcgcttaattatgaagttatttctactgccataaacgaactttctggatttatacaacagcttgttctattcatacttgggctggaaaaggatgtttacagcattgcaacatggttttaaattatttgatactgacttgacaccaaatgattggcaggctatgctgtttttgaacttctccactggaccttttgattctttcaagtctgtttactatgctgccgcagaggaattccagaacaaggaaatcaagttccttattggtgaccttgaatccagccagggtgccttacaggtttgattctcacttccccttgtacatgatgctttttaatttatatatctaaactggctatgctaacagtcaaacgcttgaaatgacagtactttggtctgaaagaggaccaggcaccccttatcctcatccaggatggtgattccaagaagttcttgaaggatcaaattgaggctgaccagattgtctcttggttgaaggagtactttgtgagtactgtttgaactttaatacactcttgtgattatttgttttgtttaattaatatatgatatgatatgattgtagagctcattgatccgttatatttggttggtataggatggcaaattgacgccgttcaagaagtctgagcctattcctgaggtcaacaatgagcctgttaaggtggttgtggctgacaacatccatgatttcgtcttcaagtctggcaaaaatggtacggatcctgattattctgttctatttcatcaaattaggtattatttatggtaggcgtaatttcaacagaatgatgtttagcatgtatgtagttctttgtcccagcgattggattctttatataatagataactaatctcgacattctgtagcagtccttaattctgttcagcatgtagttcgtgtctttgtcccagtggtggaagtcttcatataatagattggaagtaatcttgatatatctaattgtgttgcagttcttattgaattctatgccccctggtgtggacactgcaagaagctggcgcccatcttggaagaggcagccaccactctccagagtgatgaggaagttgtgattgctaagatggtcagtttcttccccacgagtcttggtcacgtttcctcctaaacccatgttacaaaaaccattgttgcttaaccctactttgtttccaggacgcgacggccaatgatgtgcccagtgagttcgaggtccaaggctacccaaccatgtacttcgtgacccccagcgggaaggtcaccgcctacgacagcggcaggacagcagacgacatcgtcgacttcatcaagaagagcaaggagaccgccggcgccacccaggcgacgacgacgacatctgagaaggcagctgacgcagccgagaaagctgagcccgtcaaggacgagctgtaaacatccagtgcgtggatggcgctgtggctgtgtaagcatgggagaggaggggggagagaacacctggcgctaacatgcttgtcagcgccaagcctccaagtttagtttttgcgagaggggagagagggcaaagaggaagagaatgcgaggggatctgtgacgtgttttgctctgtggcgcggcatgtctgtgtatcccattgagattatgtacaatttacaaccagtcagcggtaccttttctttagttaaatatcagaagtgacagtagaaagaaactgattgtggtcgggttgaatggatgaataaatagcgagtccgccatcatggaaaaggcgtttttttttgtgatggtgaggttgaatgaatgaataaatggccgagtcatgaaaagaggcgcttttgtggtgtgcctagaaactgggagcagcatagcggtgtctgcatagcaactggctcacccgaagcaactcgaacagaggatggtttgctcacccgaagcaactcgaacggaggatggttttcgggtcactgtgtacattgtgtttaggctggctgggtgcacaggtagctctttgaggttgacgagaaagcaagaagatgcaatggcggatgctaaagaaatggatggccccagcagtcgaaagtggatggcccggccgtcgaaagttgttggatgcaaagtagcacgctcttcgtttggatccagggcatcgtggagaaaaagtataggaatcgccaatcgaatcgtggagaaaaagtataggaatctccgatccataagaatggtaacattttggtcgtttggaacaaaggaactacctaatcttttcctttgaattctgtagtgtccttatgatttcgggatccctatgatcccacaggaatg

SEQ ID NO: 4600 - DNA, 4827 bp, Sorghum bicolor
cctatctaaaataagttgatttcccaaaccaaatgctcctagtgtacatgagcttgacttgtatgtgtccaagtataataatttattttatggaacaaaattgaatcctaaaatgtgatttttttgatggatggatatgtagtgtgtcatttttgtaatatatatatatatatatatacaagccccctgcattttttggttgcatagtactcccttcatcccaaattataagtcattccaataatcttggagagtcaaagtatcttaagtttcactaaatttatatgataaaataataactattatgataccaattaagtatcattaaattttttcttaattatattttatagtatactcactttatgttacaaatcttagtatttttcctctataattttggtcaaatatgaaaatgctttaattctgtaagattataatttgaaatggagggagtaaaattcagtgttcatatatactatgttcaggtcatttctgactttcgtacgtgcacatagtttgtactattacggctgactcaactatggagcaatgagcatccatagtcaccacttgtgattggctaacgggccaaaacaacgagcatcccgatttctcgtgttgtttacaatttgattgattgcacacaaaatatccgtactatattgccaaacaattatgcagctaatgacgaagtcaagtttaccttgtcaaatgacatgccaacaattactgcgggtcgaaataaaaaatatatatatagctagacgacagtagaaaaccgagattccaaagaagcaagaagtccactttagatccctcaactttcgtaaaagtctatttttcatccctgaactttaaaaccgggtaaaatacatctttcaatttttgaaaccatgcatattacgtccctgacatggttatgagcggttttgaaggcagttttgtctttttcatttttatttattttggctgaatatttgtaaaattatagtaaatcacataaaattcataaaatagtaaatctgattttgttggactccagataagtagatctacatagtgaatatataatataatatgctctagtataaaatttttattgtagctttagaactgtttttttctataattaattagaataattcatagctatagtttgtatagtccaattgtggtgaattttttatgttagactaattattatatgtttaaactatggtaaaaaattcatacttattagatcatgtataacttagttatagatttattataatttaacaagcataaacctaaataaatctataactaagtaatacatgattcaatgagtataaaatttttactataactcaaacatagaataattagctcaccatataaatttcatcacaattagaccatagaaaatgtagctataattagtctaattaattacagaaaaaatatagatctaaagatgcataaaaaaattgtactagaacatactatattatatattcaatgtgtagatctactgatctaaagtctaacaaaattgagttttctattttatgatttttatgtgatttactatgatttttcaaaaaaattcagccaaaataaataaaaagaaaaaggtaaaaccgctttcaaaaccaggtcaaggatgtaatgtgcacggtttaaaagttgagggatgtattttatccaattttaaagttcaagaataaaaatcagactttcacgaaagttgagggacctaaagtagactttttcctccaaagaacccaaaaccttgctaggtgggccaggctcctccccagacacactactctgtcggtcggtttcggcccatgggccggatccataaaaccctagcccgcgtggcctttagcaaaacctccactttccgacctgccgtttctctcttcctcgtcgccaagagaagcttggccctttcttcccctcccgcaagccgcaaaggcctccagaagcagccaggcgggcggcgcggcgcgatggaggagcaggtggtgacggagcggatccggcggaagctggaggaggtcaacgccaccgtgcagcagcacctcgccggcgtccaggaccacgtcaacttcaccatgcaggtaaacagttacggggagggtgcgtcttggggggatccgccgcctcggttttgctgtccttcgagggttcgtggtgttggagagggaggcgcgagtagctgcggtagcctggtaggcctcgtaatcttggattggtggtagaactttggtcggattttggggttccttattctgatataaaaattgtagggtggaggagggcgacgatcttactcttgtggttgaaatttgtccggattctttagatgttccgctgaatgctggtcagggtagtggcccgttagtttgatacccatgtattggaggttctgggttgtgcgagtcttgtcggtgatttatttggttctgatgatgcaattacaagtctctgaataagcttatttggcagtgcgcgaatttgttgggtgttggcgtgttgctgcaggatgtagcgaagagcagcatcacagtagtggacaatggatgctaaatttttgagatatgtgaatatagtttttggtgcatgtttttttgtaccatctcttagaaatctgttagggtcaccttgttgttttgtactagtaactagtagtaaccatccactcctgtaattgttcactattatgtttattttcttcacctaatttctggatacgagaggaaattactttatactaattgttcaaggtaccttgacagttgacattcattcttgtgatgatggaaaagggggttggactaatattagtaattattgtactgaggatatttattggtataaaaactgcagacatcgttgatatctttgtaggagtaggaggggaaggggcatgctcccaaatcaaaacacttgagtgctaattattgttgaatttctgttttattccagcaagcatacttcaagtgcgcgcatgattgctttgatcggcgtcgtactcaggaagggatcaacagctgtgtggagaattgtagtgtgcctgtccttaccgccaacaatgttgttgagaatgagatggccaagtttcaggtacttctaagttctaatttcctgcagtacacattccttttcccaaatagaacatcgcatcaggcttttctttgttcatctttttttagtaacttattaattgctttgtgcttatgtagtattgaaattatgattggcttggctgtcttttgatgcagtaaagtgaatagtttcatagctgtaactttttactacagaatctttcagatttttatacaagttactaatatttgttttgcgttctccattttgctctgattttacttatcattgcaaccactcgaatgctgtattgctgtgtgtaaatgaattatcaaattctcaaagttgtgtatgcatgatagttcacagtcaccaggacaaattcctcaacaagcatcctgtatgtggttggttatctgtgatggtgtacttgtttcatgcaatcaatcatgtatgcaattaattgccatatgggaaagtcaacttcccagaagataatttaggattcatgagcagtatatttgtcgctatagttattttgttcgatgaatatggatttatgatctcaatgatacaacagtaggagttttataaggttttcccctgcagcaatttagtttttgctccatccttatgtacattgtacttctggcaaacctgagaaccttctcttttacttcatctgctctgttgaggttcgcatgttgttatccgcaagatggcctagtgcatgtttcccacctggttattttattgtaaaataattattagtggttttcagtgttattggagatggctgtctcaagtatctggaatcatgtacagacaccatgttacacatcctgaactttgaacagcaaactatatccttttgtaggcaaacaactggatgaataatgtagctgcctaactgttactcatctcccagtggattcataggaaccttgttttagcctattgctattttagggttatgattatgcatgtatttctctgcataaactagcatgccacttacatctttgttaatcattgccccttgcttcaggaacggttgaatcggtcattgatggtctgtcaagacaagtatgaagcagccaagctccagaagttgaaaacagatgcaactcaggaactggaatcctgtgtcaacagatctatcgatgacagcatcagggtgctcccacatgtggtggagcagatcaagtccgccctcagtatcaattagaggcactattgcttttagcatatggaatcagatatagttgagaatgtctcatactcacatttgcggcctaagtccacatttttcagtggaaaaatcctaagctagaactatgcagagctcttaccgatatcgatataacgtgatcaaatcagtgtaccgtattactctcctggcttgtcagcatcatcgacattctgaattgtgctgagcttacagcttaggcattgaaatagtacaaggctagatgaacttgttctgctgcatgtaccaagtactcttacgtctcacaatttttcatgttgcttctgttgcaatgcaatttaccttttattgtagagtatcacctgtgcgggggaacattttgtgagacaaatgggaaataattcaaacgtgagaatttcataaaaagtctttgcgttgctgtttgctatgaaattgttttaaaatttatgtaaaaattgttgcaggttcctgtgaacatggcataaatttacctgtac

SEQ ID NO: 4601 - DNA, 3557 bp, Sorghum bicolor
tgagagcgaggaggacgtgcagatagggggtgtggtgcggtagtgatgagtgagcgtctgggtggacatggagccatgttgggccgatgtcgatgtgcgtaggattggggatgtgtcctggattctaactggcactttatgtttgtggttcccaatgggtcgcctcgatccaccaccagctcttgtcacgtgcctccatgcatggctatgtcagcgctaccgccatcatctacaccaccgccatcctcgagtacctcaccaccgaggtcctcgagctggccggcaatgctagaaaggacctcaggtgaagagtatgaccccattgcacctacagcttgccatccatagggacgaggcccgcgacaccctcatcaagggcaccactgccaatgggggcgtcatcccgcacatccacaagtcgctcagtgacaagactaccaaggagtgaaggatggcaaccctcccatgctgctgcttctgcctgactaacattgatatagttctgtacttgtgctattttaattttagtgtctgttttctgcttcttctttgttggatcttgtgcaatgtaaaataccatgtctctctttttccctgttttatgaaaccacttcgatgaaagatagaggttttcttactatagttgcatggtgcatgcaaaatgtgtatcagacattgatggacagactatttgctggatggagaagaaacagttaacgtacttaatcatgacaaaagtgtataggcaaagaacaaatgcatatggtggccatgggccggcaaagtttatttgttctaaacaagcacaaaagagggacatgtgagcctgccacttgcagcttgccatacacaaggacatggagctcgacacccttatcaagggcaccatcactggtggcggcgtcatcccacatccacaaccgctcatcaacaagagcacgtagcagtgaaggagggaaaccccctgtgctgcttcttctgccttactacaatccatctagttgtgtacatgtgctatgttaatataagtgcttgtttgtctacttcttcttcgctggaacttgtgataggtaaaaatatcatgtctcttatttttccaattttactaaatcacttcgatgaaagatagaggttttcttactttagttggatggtgcatgcagaatgtgtcataggcactgatggatggtctgtttcctagatggaggaggaaccaattatcgtacttaagtgtagcctctagtatatattctacaaatgtgtataggagaagaattgatagaaggcggccatggaaaaacccaataaagtttatttgtcctatacaagctctaaagaggatgtcaggccgccactagcagctcactgtccgtggggacaaggagctcgacaccctcatcaagggcaccattgttggtggcggcgtcatcctgcacatccacaagtcgctcatcaacaagaccaccaaggaatgcgggagggcaaccccccatgttgttgcttctgcctcactacaatccatctagttgtgtacttgtgttattttaatttaagtgtctacttcttcattggatcttgtgcaaggtaaaatatcatgtatctcttttcccccattttactaaaccactttaatgaaagatcaaggggccaaagggcctctagtccagttggttagaggaacccggcggcactccttaggtcctgggttcgactccccatgggagcgaattttcaggctaaggttaaaaaaatcccctcgtctgtcccatgacaaagcacaggtctaaggcccggtcccagtcattctcacatgggttacggtgccattgtgtatgcgtggggcaggggttcggggttttctcaacctacttgagaaggtcttcttcttaatgcaatgcccgggggctgtcttaccctctgcagctcaagttttttttcatactttagttggatggtgtatccagtgtgtgtctcagacactactgccgtgagcccacctaatgagcgcgcctcggccgcagcgaccccacctcatgctcacgctgctgccgctgcgaccccgcgacacgttcgcgctagggttaggttttggagcacatgtactagagtgtgtgtatgagagggaggaggatgtgtagataggggcatgcagtgaggtagtgatgagtgagcgtcagggtggccgtggagccacgttgggctgatgtcgatgtgggctagatttaggatgtgtcttggattctaactggtactttgtgtttgcagttctcgatgggccgcatcctccatgcatgcttgtgtcagcgctagtgccatcatctacacggccgccatcctcgagtacctcactgccaaggtcctcgagatggccagcaatgctagaagggacctcaaggcgaagagtttcaccccatggcaccagcatcttgccaaccgcaggaacgaggagctcgacaccctcatcaagggcaccatcgctagtggcgacgtcatcccgcacatccacaaggcactcagcaacaagactgccaaggaatgaaggagggcaacccccccatgctgttgcttccgcctgaccaaaaacgatatagttctgtgcttgtgctatttaatttaagtgtctgttgtctgcttcttcttcgttggatattgtgtaaggtaaaatatcatgtctctcttttttcctattttattaaaacacttcaatgaaagatagaggttttcttactatagttggatggtgcatgcagaatgtgtatcagactctgatggacaaactctgtcctggttggaaaagatacagttatcgccaattgcatcctctagtatatagtctgcaaatgtgtataggcgaagaactaatgcatatggtggccatgatctagcaaagtttatttgttctaaacaaccacaaatagggacatgtgaggcagccacttgcagctcgccatccacgggaacacggagctcgaaactgtcatcaagggcaccattgttggtgggggcatcatcccacacatccacaagtcgctcatcaacaagagcgccaaggagtgaaggtgggcaaccccctgtgctgctgcttctgccttactacaatccatctagttgtgtacttgtgctatgtttttctgttaatatatttccagtagaggcggatccctcctgtttcctcaaaaaaaaattaagcatttgtttgtctgcttcttctttgctggaacttgtgcaaggtaaaatatcatgtctctccttttccctgttttgttgaaccacttggattaaagatagaggttttcttactttagatggatggtgcatgctttatgtgtgtcagactctgatagatgggctgtttcctggatgcaggagcaacagttatcgtacttaagcacagcctcgagtatatcagctgcaaatgtgtataggtgaagaactaatgcatggtggccatggaaaaaaaccagtaaagtttatttgttcagaacaatcacaaaagaggggcatgtgaggctgtattgtggccataacatagaaatgtgtatgtgcgaaagtggagc

SEQ ID NO: 4602 - DNA, 5816 bp, Sorghum bicolor
tggttcttctgtgttggaagagaaggacgaatatgccaaacttgagaatagacaacacggcagggatatactacgagaaatgcatcattcaggcacaccacacacaaaactgaggaatgcagcgttgcttatggcaccatctgttctttgcttgtcggagtcactgaggtacctttctctagtgttcttgattctataaaaaggcttcaccaagggacacttgtttattggctgcgttgatcgatctaacagctgctgttgttcctccatatacatgcctgcctccattgatccatgtccagctgctaactgccaaattatggaagcaggtattaaaatctctttgtttgttatacatcccacaaacaggtattaaaatctcctcgtatgaccatcctttttctcttaatgaaacacgggcctatatgtgcctgatcgagaaaaaaaaacgagctaatcctctataagcatataatttcatagtatgaggaacattaataggtgcagtggtgcatatattattaactagtgagcattgtggtgcgtgtttccctgtgtaatgggttgggtgagatattgtatatattttcgtgtgcatattagtatatatctgcacaaacggacagctgattcaattccgttcctgtttcgttattactgacaaatattgagcagacagttcaatacttttctggaacatcaattatactgattttcgatccacaatttatttatatatctagggaaaaagacagcaactatgatggacagccgcctccttgatgccgccgtatctggtgacacgacaatgatgaaacacttggcccttcatgacccagccgtgctgctgggaacaactccacggggcaacacctgcctccacatctccgccatgcatggccatgctggattctgcatggatgccatggccctgaaccggtccctcctctccgctgtcaacaatgacgaggagactccacttgttgcaacagtgacgaggagactgtactcgttttatatttttcagatttaatataaactagttacaaattttttagagattaaagtagattttattagttttagaaaaccgaaagacaacaaaatgtccggttacaatagctaagggtgtttgtctggtttgaaagttcaggattaaaaacaggactcacatgcatgcatgttggaggctcaaatatctaccactacgtacagcagaagaagttcgaatccacaaatggttcttctgtgttggaagagaaggacgaatatgccaaacttgagaatagacaacacggcagggatatactacgagaaatgcatcattcaggcacaccacatacaaaactgaggaatgcagcgttgcttatggcaccatctgttctttgcttgtcggagtcactgaggtacctttctctagtgttcttgattctataaaaaggcttcaccaagggacacttgtttattggctgcgttgatcgatctaacagctgctgttgttcctccatatacatgcctgcctccattgatccatgtccagctgctaactgccaaattatggaagcaggtattaaaatctctttgtttgttatacatcccacaaacaggtattaaaatctcctcgtatgaccatcctttttctcttaatgaaacacgggcctatatgtgcctgatcgagaaaaaaaacaacgagctaatcctctataagcatataatttcatagtatgaggaacattaatagatgcagtggtgcatatattattaactagtgagcattgtggtgcgtgtttccctgtgtaatgggttgggtgagatattgtatatattttcgtgtgcatattagtatatatctgcacaaacggacagctgattcaattccgttcctgtttcgttattactgacaaatattgagcagacagttcaatacttgtctggaacatcaattatactgattttcgatccacaatttatttatatatctagggaaaaagacagcaactatgatggacagccgcctccttgatgccgccgtatctggtgacacgacaatgatgaaacacttggcccttcatgacccagccgtgctgctgggaacaactccacggggcaacacctgcctccacatctccgccatgcatggccatgctggattctgcatggatgccatggccctgaaccggtccctcctctccgctgtcaacaatgacggggagactccacttgtcgcagcagtgagaggtggacggaccagtactacaagtttagctccatcttttctcaggtgctaccgtgatctccatctgagcgaggcaatcttgaagcaagacaagcaagggaacaatgcactgcaccacgcaatacgaagcggccacagggaacttgcgctggagctgatcgcagccgagcccgctttgtccaaagctgtgaacaaatatgatgagtcacccatgtacatcgcggtgatgagaaattacaaggatgtatccgagaaactgttggagattcctgattctgctcatctgggcggaaccaatggtcacaatgctcttcatgctgccgtgagaaatggcactgcaggtgagacctgtcaggtactatatatgtataccgttttccttcttctcttttctagaaactaaaatctatgcaagaggcgacattctatcattcttttggttttggtccatgccatatatatgagtgagccaagccaaaaatttcatgggaatgccaaaacagggcaagaaaaaaagttgtttcgattttgtgtctatgccaatctatgagagagaagattgtcttttttactatgtttcctgctatcaacattgttaaaactgcttccaacaaaatatgtcaaatacgaatctaattttgggacaaatgaattaccagatggaatattatgatttaaggggtattatgatgcaaaccatttgaaaattagatacatgatttaagaggtattttgatttaaactatagtggaccaagaaatctaggtcaaggtgcagccaattccattattgccacctcacctaacttcatcgttgtgttgaatgattgatcttagacataaccagatcttagggcattgtttggcagcactccagtgcacgtgattcgcaggaggagccagtttatggctccctagctctggctgccaaaatggctccggctacacatacacatcggactatcggaggccagaagggctcgttcgcacgtgcttgtttggttcggctttgtctgctctagtgtcagggtcgcacatggacccggtacaggagccgcaccaaatggggccttccataacctaaacatgatcactcacataacttagtttagaaactaacccctgaatactaaccagagccgatagatgccagctatacttcttctacttgcaatagtgttgacgtagagtactcagtttttatcaaattgcagcttgattgtctagattgtggataacatggagtagatttgcagcagcagtacccagacatggcattcttagcccttcgacggatcgatctattatggtttatttgacggtaaaattgacgtagggaacgtgtgtagggcaccacctctttattatatgtgatgtgggcatcatagtatatttaagattgccaccaataacgataaaatggttatttaacaaaatatgtgatatttgttggacctaacacgcattatgtgccaaagtaatagtatgtgttagcttgaaatggcatcccaaccattttcacagccgacaaagtcaaacgggacggagcaaaatgcattcatgataacccgtgcaatgtcctcattctgtttaatgtagctgggcatggcaaatataagttaaccggcgcatggaccaatgtagatgggtgcaaattattttcggactagtcaattagatatggcttgggccgaaaacagatacgtcctgccgaaagcaaacatgccctttaatttattaccaacccatcacacatgtggtcattcgatggatgttggctgtctttgctttcatgatttgcagctatcgctaaaaagattgtggagacacgtcctgcgctcgcactaacagaagacaagattagaaaagccactccactgcaccaggctgtactttgggacaaggttgacgtgctaagagtaatattggaacatgatcggtctttagggtatgtggtctcctcgaagggtacccctcttctggtttctgctgcatatagaggcaatgttggtgtagcccgagagcttcttaaacattgtccagatgcgcccttcgctaagacaaatggctggacatgtctgcaccaagctgtgtggaatggacagctggagttcgtagattttgtcctgggtttgccacaatttggtagattccttattaacatgcgcgatcaggacggcgatactgctctgcacctcgcagtccaaaagtccaatcccaagatggtcgctgctttactgcttcaccgagacatagacgtcagagtgcttaatgacaatggaaacgaagcaatatggaaattgtggaatgtcaccaaagattccaagacattaaactgggtatgatctatgttttcttaaattagtactactttaattgctccagaataaatcagtacgcattgatccatcttctttacctgaaacatctgatttagactataatctttaccaagctccttctgcatctttatgtgggcagaatgaaatttccatgcttatgttgaaagctgatcctcaagccgcaacagatatttataatctccgcagggaagcccatgataaagtgacagaaacaacaaggaatgatatcaagtcactgactcaaacatatacaggcaacacttccttggtggcgattctgattgccaccattacatttgctgctgctttcactttgcccggaggatatagcgctgatcctggaaatgagggccttcctatcatggcaaggaagtttgcgtttaaggcattcttgatctctgataccttggcaatgtgctcctcacttgttgtagccttcgtatgcatcatagccaggttggaggatcttgagttcctgcttcactacaggtcttttaccaaaaagcttatgtggtttgcatacatggcaaccaccacagcatttgcaactggtttgtacactgtcctggctcctcgtctcctctggctcgctgttgcgatctgtgttctaacgacttcgctacccattctcactaagcttcttggtgaatggcccatcttgagactaagattacgcttgggtcggactttcaagtcggacctccttgatatggtatagcttcatcaccttcagttattggttccagctgcttccctgtttttatgttggaaacataaggaaacagcatatatgttgcaatgtttgctgaacagcactattgtttgggtgatttggaatctctgtaataaagccaggattatgtaatttgaacccataatatttcaagccagtgtagatgagtgatggtattttatttccgagttggacatcctacaactttgctactttgttgatgagagatatgtcagggtttggtaactgtttgcaacaaaacttatgtggttttatatttgaagtcgtacaagaaacagaagtgctggcctttcgaggaagaaatacacttcaatcaaaaggatgcatatctccatctgcagggttaaatatttatctgttagggacggacacgtgttccataaacttatttaggtacgaggctgtcttagagtgaaatgagaggtctgcagcaccgtatgcgccaattatatacatgagccaca

SEQ ID NO: 4603 - DNA, 5724 bp, Sorghum bicolor
caaataaaggagacctatgaagaacattgatgtcattgtgagagccgggcattccaaagaaagcatgtcatatccaaaggtcattcgaggcaacagcctccagaatgatagtgggcttctccacatgccccttatactgaccctgtttgtcatatggacagttcttccacgcccagtgtatacaatcaatggatcctaacatccctgggaagcctttttctgcaccaattgcaagtaagcgggccgtgtccgcctcattgggatatctgagatattgttctccaaaaatttcatcaactgcagtcacaaacctcctcaggctctcaagtgcggtactttcacctatgcgaacgtacttatctgtcgcatcagcaggaatcccatagctcagcatacgcatggcggcagtgcatttttggaaacaactcaatccaagaacattggccgcgtcccatttacacacaaaataatcatcatgtgcttcaacagcattcattatgcgtacaaaaagctcccgagacatcctgtatctgcacaaaacaaaatcaaagtctcacaactgcaataatatatgaacatagacaacaagacaatatgaagtcaaagaacattaaccttcgacggaatatttccgggccatatgttggattcaccgccaagtaatcctgaagcatcctctcgtggccgccttctctatcacggtaaagcattctatgacctttgacagagccaccgggtttttttttgtgattggcaatggtgtctataatcacagcagccgctaacgtatcaaaatcatcatcatcggatgatgaatcatccaactgtctcctagaaagagatcgcttcctactcatgattcctgcggatggatgagagacctttcctcaatatattgcaagtaataacaggaccatgataaaaactaagataaaattcatcatcacaaatagaatagagcatcggcaagctgtatatatgcatcgggaagcatgcattggcaagctgtacatccaaaattatacaatcatccaccagggtatgcagttcaattaagcaaatgtatatgcgtcgccaaaacatactacggcaaggctatgaaccagatcgagattaccagagcgatttacctgatcttcacgccgaggtgacgaccagagcgaacttcacgccgaggcggcgtaccagatgacgacctggcggcgaacttcacgccgaggcgatgtaccagagcgaacttcacgccgaggcgatgtacaagatcgaagacgacgacctggcggcgaacttcacgccgaggcggctcgcgcgcggggatgggaaggcgacgggacgcgctgtcgcgcggccaggcgaagggtcacgatgggactctcgcgcggccaggccacgatgaaacaaacagttgatctgttggttgatgtgggcccttttttaacatttgccaagctcaaatgccaaaccattggagaaacaaataaatttcacttgccatatgttctaggcacttggcaaatcacaagatttaccaactctattttgccaaaccattggagttgctctaataccttctatacctatcgaatcgtatttttttccctgctttattgaatgaaatgaaataagcagtgcctcaaatgccttttttttaaaaaaaagctgtatcattacttgttgagttatcatgacgtacacatgtcaagacaactaactttttttaccagaaagaaatgtacagacaaagaaaagagtttggagcctttatacattcagaggcctcgcttgaactgtactccactctcaccatgcctgacgaggtattctgtgaaatttccctcccattcagctctataaaaaaagatgccttgcttgtcgagtagagccgatggacaacagcaccaagtcacgaactctagctatataatgccaccgcatccagtgctggccagccggagagcacactgaagctcgccgcatcaagcagtaggggctagcaagccatggctcgtgtcgccgccatagtggtgctggtgctcctcctgcagctggcctcctcctcgtacctcgtcgcggcccacgccgatgctgtcagcgtgcttggccgcaaggccggcgtcgtcgacgagcctcccttggagaacgcgccggcggttgggccggggaggtacgccgtcatcttcgacgccggcagcacggggagccgagtgtacgttttcaggttcgacaggcagatggaccttctccgcatcggcgatgagatcgaattcttcgccaaggtaattaattaagacgactacacaaaggctagctagtagattatacaaaaactacttgggtgatgtctagattgcttgaaaagtgaaaacgtgtagtgtggttgttgttttttcttggtcattgcttagtgctctgcaccctccaatctccaattctccattactaatctaactggcatcagtggcaacttccaggtaaggacgctcatcttccctcttgactttgaccccctaaaaaaataaaaatatttcgtagtaaaaagtcattaacaatagcaaaagtgtggcggccatatctactttgctgttaaaagcttcgttcaggaaagtattagtgaccccggcccatccaggggtttcggttgttgcctttttaacaacaggattttctgttatactattatatatgcatgtcactttagaacattttgattgtcgatgcaggtgaaaccaggcctgagctcgtatgctggacagcctcaagaggccgcaaagtccattctgcctcttcttgacaaggctaagcgcattgtcccttcatggcttatgaaaaggacaccactgaagcttggagtatgtgaaaaaatttactattatatattctaaaaaaatactgttatattgtcatcaattccaaataattaccaccgatttgagaaattgttaccctcttctctagttactaattgcatgatccagtaagggtggtttatatgtaattatgttagtagttatctgtttggtccaaatgttgcataattagcatcaaaatatagcaaattacccttgaaagttatagaaatgtgcagctgtacttcttcttggtactgctaaaatgatatattattgtttctcaatattttttcctttttcttttcatgtcaccaataaacatgcaggcaactgctggattacgcctcatcggaaaccaacaagcagaccaaattcttgatgcggttagattcattttattcatctccaatcctgtgttggcacttggacatgtgataaatatatgtatcatccatgttagtgcttggactaaaatataactgctccctgattagaagctttgttcttcaatacaggtcagagatcttgtccacaaaaagagcaaattccagtgcaagtccaactgtatcaatgttcttgagggatctcaggaaggatcctacctatgggtatgagttagttggtttttaattttggtatcacaaaaatatcggacaccaccgaaaattagcgaatttcacgaaattcagctgaaatttcgccgaaagttttttagagactagcatataaagtatgtttttttaaaaaatagatctaaacaaatatcagcatgatttatgactacacatcaacttaatagaaaaatatgcaacataaaaaatagaaaatataagtctaaagttatatagcacatgtattagtatatataatgaaattttggatttttctttcggccaccaccgaaattaccaaaattcacgaaatttcaacgatatttcgccaaaattttggacctactagtagtgacacaacaacaattcatctatgctcatgcttaccttatctttacattaccacatatttgcatgcaattctctgtaatgttagtgtagaaccttagtgtgcgtgacctgagatgtaggttgctctgaattatttgttggataaactgggaggggactattcccagacggtaggcgtgattgatatgggtggtggatcggtgcaaatggcctatgctgtttcttcatattctgctgcgagagctcccgctgtgcctgacggcgaggatccctatattaccaaagagtattttaaaggaaaagagtacaatgtatatgttcacaggttcgaatcaatcatagtactccattaatttgtgagacagagtggtgtgtagcatttccattcctaatcagttggactgatcagtcaagactttgtgctttgcagctacttgcactatggttcctttgcatcacgagcggagattttgaagtccaagaatggaccattcagcttctgcatgctgcgcggatttagtggtatgttaacgacactgccatggccatgggaatttatgcttaatttgctaatttttgaaagaacattgtccagcataatataatgtatacaatgtacttcgttccttaaaccttttgtgaaggtaaatacacctataatggacagcaatacgatgcaattgctagaccagaaggagcattatatgaaaaatgtagggaagagatcaccaaggcactgaatctgaaggcaccatgcaagacaaagaactgcaccttcggtggtgtgtggaatgggggaggtggagctggacaaaacaatatctacgttgcatcaggcttctactaccttgcctcacatgtaggaacaaatactatgcttaacctatatataggattataggtagatttattagtttggatgttcgcaagtaacaggaactgaatttcctcacttgcattggcaaggttgggttcatagatagcaaagctcccagcgcgaaggccgctcctgccgcattcagggctgctgctaagaaggcttgccaattggatgtcaagaaagcaaaagttgcctacccaaatatttctgatagtgatgtgccatacttgtgtatggatcttacttacacgtacacattgctcgttgacggcttcggtgagttgcatcacttcttaaattcagtgaaatttatgttgctttgattgaagtatttctagtgttcttgacaatcagagttcagatggcatagttcgcttcatatatatctgattggatgcattatcgcaggtctgcagccaatgaaaaagatcacatttgtatccaaggtgaagcatggcgagtactacatggaagccgcctggcctctgggtactgctattgaggctgtgtcaccgatactaaacggtgattaaacaggataaatggctgattaaatggacatggcaagccattgtgtagcatttacagggtgtgtaaatgggctaagccgctaagcggttgtgtaggcgcaaacacactactgttttctcttgtgtttatattttcctatagctccactaattatctatcacattcttgagatagcttgacatctaaagaacttatgagaatgataagaaccatagaaatgtcgttgttgtataaaagatgagtctgatagcaagtttggtgctatgagattacacagggccgccttcttgtaagaaaaagactacttgggtggaaattttggtattgccgctggacttggtgctggaccaaatgctggtgctagtcttggtgctggactaagtgctggtgctagttttcctcaccctctccattatctaggtgaacatctactagtgctttgctgcatgaagcatcttctggtactaatctgaatgcttctttgtatgcatgccttgataat

SEQ ID NO: 4604 - DNA, 6327 bp, Sorghum bicolor
cattatagtacttaattggtatgattagataaatcattaaatatattttcataatcaacttatttgaatatacaaatgttgctatttttttcttctacaaagctagttaaacgtaagaaagtttgaccaacacgaataccatagtaacacttatttcatgatagagggagtagtaccatgtttgatccgcaactctagccttgtgggaccagcacgtatgatatggatttagaacccgcacgcagaaggcgtttttttgcccttaagggcacatgccctcacttttccacccattgaattcgcttttgacaagtgtacaaacacgcatctcaaaacagtttcgtattgagatgcgtgtttgcacacttctcaaagtaaattcaataagtaaaagagtgagggcatatgcccttaagggcaaaataaactttacccccacacgatatggtttgatcttttctagccattgggcctcacattttaggattgttggatatgataaaatagcatataaatgtcttataaatcatagctccaaacacgacttcttatccaacccaccaatcctggatcggccgtgcgtgctctcgactctccatgcaacacattctccctcttactctccggtctccacgtggtgatacaacagtctctacatggggttgaagctagggaatggtggcacgtgcccctcgtgcgggggagtggcggcgtcacacacgagatgggcttggagtggtgacacaagacacgactgcgacagtggtgcagtataaacttgggtcagcacgaacacatcacgctgttgtgcccagtagcacaacatggccaatggcctataatgtcatgcctaggccatgacctaaaatcacgataacgctaagccgttgtgtttaaccatgctagtgtcctacaacctgtttgaccatctataattacaacatagagtaaaattattttgtacatattgagtttctagcttaacttttaaaatttaaaactccaacaagttatttagtaccgatacatataatactgctgaataaagtgtaaattttataactatttactatattaataaatgtatttcattgaattaattacatataatttttttgatgtaatatatcttttgctaatatcatagattcgccacagaaacaaccaatggcgaatttaatagtcacaattacaaataattaaaaaaatataaaccatttttaattatttttagaaaaatataaaaaccatatttggggactaatgagatggatatattcagcgatacagtcatggaaatacaactttaacctcttatttttataaaagtattttaaaaaaataatatgtgtatacttttataaaagtatttttcaagacaaatctattcatataacttttacatttgcaaactcaacaaaaagttattgatgatttatattcccaatgtttgactcatactttgtccaaaacgacttctaaatcctatacagagggagtgtttattctgtattaggctctatttggttccttttgattttttaaactctcgccacatcgaatgtttggacacttgtatggagtactaaatatatatactatttacaaaactaaaaacacagctagagaatatatttacaagatgaatcttttaaacctaattaatctatgattagacattaattattaaatataaaacgaaaatgttacagcttaaccaaacacacttttgggcggttaaataatttaattttttagaaaatagaaaatatacagactcggttggactcctgattttgaaaggctgggggaattgagtgtctgtcagatacgatacggctcccaaattaaaaaatcctctccccgtcactgcacacgactccgactggtgggtcccatgcgtcagaggttcattcggtggagaaaacgtagtcgaagtccccaccccaacctttccgccgcgtcgtctccttggtccttcctccgccccgccgcaaaaaccctagccgcaacagcttcttctgcctccacggtgcccaagccgcgacctgacctatctctttctccaagccgatggcgggcggcgggaagaaggagaagggcgaggggctcgggcgcgcgctgatccggcagcggaacaaggcggcggcggccgccaaggaacggggcgaggcgctcgccttcggccgccgccgcgcgatgccgctcgagtccgtcatcgacgtcagcgacatcgacgccgtgctccagcgggccgcggaggcagaccagctcgccgaggccgcgtccgtctcctccgactccgacctcatcatcgacctgtgagccctcgcctccccctcccctttcctcctccatggggataatgaaatcctgcctcttgttctgctggtgctgcgaaactggtgtgttctcttgttgcggattcttacggattggattggttgcgccagggatgcgacgggggagacggaagacgagaggcggcggcttcgtaaggagcaggaggccttgcacgccagcagcctcagggttcccaggcggtgagcatttctgttagttgatggtgttactgtttgttcatggccttgggtttgttcctttttctgattatgaatcatgtgtgtgtgccattgcagaccaccatggcatagtcagatgacggtggaggagcttgatgtgaatgagcggcgtgccttcctggtgtggcgcaggaatcttgcgaggttcgttcagagacatacacgtactctaaatgtttagtgggatgatactttttgtgtagagttatattttgggcgctaagctataactactgaattctatataattgacaataaaataagtgagtttgtaagctttacgatgcgcctttacttgatattatggtatcgcgaatgttacttagttatttttagaacattcctgttgcagatttaccttctggataatctaaataatacaaaacttgcattcctagagagaacagtatatatttgttgtaaaatttggcacagagtgcttaatgcattttgcagcattattttccaatttaatgcttagagtatgcaagactgatgagcaatctcctatgtagattggaagagaatgataagcttgtcctgactccctttgagaagaatattgatatttggagacaactctggagagtgcttgaacgcagtgatttggtaagttttgctgtactgaattgccaggcattgtgggtttggttggttgccttacaaatctttctctcttagtgcatgctcatactggaccatttgttaaactactctaagaaagtaacatacacagatttagatcacttgcatgctttagtgtagttgttggtgcttaaataccatttttcctggaaatattctactctgctgtcatgctgtgctcaatcacgtttgtgtaattctgattgaagagtaacatcctgtgatatcgtttcttatgcaaattactgactgttgttttattttcttctgtgaagttggttatggtggttgatgctcgggatcctttattctaccgctgccctgatcttgaggtactgcttttcttgattttgatataaattgtttagctttcaaatagtatataactcgtaaaccaaacaaatgatgatggcttgctagacacttcttaagactccctcgatgttgcagaactgcgcagtatcagtaaaattgttacataagccttatccatgagttgttcagacttatgtcgcactttccttatccattttaaccaattaatgtacaaatggaaactgtgtttttcctctatttctggcagaagcaagccacatttgtttttgtaccataaaaaacaactggaactgagattcccagatatcgtcattttcaaatattatttgctgccagattgcaatgaaagccatgttcccagaaattatattccttccaaagcaaccatatgttgatctcactttgctttgttccgcattaggataagcttgctatgacttctattttctagaagtgtaaattatgtttttcaggaatctttgttctttcctgggagtttaatttcacgtcaatcttttttatgttgcacttcatttttttttgttggtgagcatcctacattattttttacttgtataacttgtgacatggctttctgtgtgtgtactaggcatatgcaaaggaaattgatgagcacaagagaacaatgctccttgttaacaaggctgatctgttgccgttaaatatcaggtctgcatgttgttcataagacttgattgtgtactacctttattgccttagtagtgacttcatttacatttgtataatgcaggaagagatgggctgattattttaaggcacatgatattctctatgtgttctggtcggctaaggctgccactgccacattagaaggcaagaagttaagtggatactctgaagaagaatctgcttctcttgacttggataccaagatatatggcagagatgaactgttgatgaagctgcaagctgaggcagagtctattgtagctcagagaaggacctcaacttctgtagatgatcaggaagccagttcttcagattctgtttcttcagtggctaagcatgtagttgttggatttgttggctatccaaatgttggaaagagttcaacaataaatgctttggttggggagaagaggactggtgttactcacacacctggcaagacaaaacatttccagacactgataatctccgaagagctcactctgtgtgattgccctggtctggtcttcccatccttttcaagctcaaggcatgagatggtggcatgtggtgtgttgccgattgatagaatgacaaagcaccgggaagctattcaagttgttgcagatcgtgtcccaagggatatccttgagcaaatttacaaaatcaccttgccaaagccaaagccatatgaacctcagtctcggccggcaactgctgctgagctattgcgggcctactgtgcatctcgtgggcatgtcagccatgctgggctgcctgatgagactagggctgctcgacagattctgaaggattatattgatggtaaaatcccacactatgaactcccccctggtgtaacagactctgagatggatcttgaacaaaccactggttcagaaggtccaactacttcagcagctaatgaatcagatgctgatgatcttgatgaagaggatggggatacagttgatcctgctgaaccagacatgagagatgtcctggacgaccttgaatcttttgacttggccaatggagggtccaaaactactgcaaagaagaagaaagaggcatctcacaagcatcacaagaagccccagcggaagaaggatcggtcctggagggttggcaatgatggtggagatggaacagcagttgtaagggtgtaccagaaacctgctgttaatttgtccacggtcagtgcaagcggcagggtctgatgcctcaacttactgcttgcagttgcacaaccactcggcacacatgggcaagagcatgtgatcttttactgtaacaatggctgaagctacttcgatggaactgagaaaagagtgctaagcatgagagtttgcaaaaccttggaaacagcgggccctgaacctgtgtagcccttgcggcctaaccatatatatgctttgagttgtagcgtggtagatacatactacatcaggtggcatgtgctgttttatttgtttccatgtcttacatagttgcaaatataccttgatatgtgaaaaataaaaattattcagatgattgatactgttaagttgcaatgtttggaattttttttttgactgcccttttgttttgtatcattcacattcacattatgctagattttgttattgttcatcgagcgctatgtaaggtctagaagtgtcaaactgaggaagctcagtaccaagcagtcaccatacggtacacccatacattcgctaacatttacgcctgaaaagcttattctactgagatgtgtatgtatagacggtttcacctatacatcctctaacatttacgcatttacgcctgaaaggttattcagctaccgctagcattgtagcagcaaactacagagcttattcagccgctagactacagaaagctataatacgctacaaactacagaaagaaagctttatctgagagaaatacgatcgaggctcagacaaataccagctgatcgagagcctatagctcagaaaacggcctcatcgtcggctggatgtcgcactgaatagccgcagagagtttgcctccactccagggtatgcgaggtgaatcacctccatta

SEQ ID NO: 4605 - DNA, 8810 bp, Sorghum bicolor
catatatgcaacaacaatgttattctaaacttatattaaattttaatttctctaaaattattattattatttttcttatattttgatgctcacaaaattgacacaataaatcaaatttcaactattttaaaaacaagcaaattttagggtgttacaggagggttgggcctagcaggccgagagaaggagagaggggaagaaaaatgttttgccattttcttttttaaataaatttttcaatacactttccaattgaatttttaatcaaattgtcattttgtttttaaaacaatcatcacaataaaaaatgcaccagcatacatggatgcataaaaaatgtttcctaaacttagattaaattttaatttcccaaaatttataattttcctatattgcaatgcttcaccaaaattatttaattaattcaaattcatctatttaaaagaagacaaatttttgggtgttacaatggctaagtctcgatttggcaaggtttgttaaaaagaaagtcacgatttgaggagaaactttataattagaataatctatgaatatatgcattatttgagtgttttctacttgtcttataatttataaaacttactgtattataggacacatagggagtatgtctattgggattagtagcccggccgtataagagcacgcatcggtttatatatagactagtaagtaattaaggttacttaaaaggttcgataattgttctgtatatacatgatacgatagttgtcgcgcttgggactcgatgatggtaatgtgttgtaattagcatatataaataaatatataagcatttggagaggtggctaatgtaggtttcccttttggaaattctcggtacaaaagtagggttcccaagcaataattaaagggaatggacacaaacaactagtactgcaccgtggtggaggagatgatggtcacatccccaccacgtacgacgacacagccggcacatccatgaccagcaagaaaagcagatcatcaacccagatgcaatgcaaaaggggctgcctctggcctcttctaggtgcttagatacacagtgcaagcgcacatctgtttttagcccggcgccccggcctatttatttcgaacgtagcatgtgtaatctcattttggttcccgccaaaaactaaatacttatggccaagttcatatttgctagttttcactgtcagaaattaggacctcatgaagaccatagttattccctgatatgggcacaaacttttgatttcacatttgctagttttcactgtcagaatgcgcgctttctgaatcagtaacaaccatatataggaggtgggaaaacaaatacaggaaacattattccctgattctcagccatcatgcagtagttatctatctgcaagaacgaaacaataagaattattgtttccaacaacaggagccaggagccagcctatgatggaaaataactatagtagattgacaccatgaaatgtgcaacgtctggtagtctttggtatttttactttctgaaaaatacaatatacacgactaccacatactttatttaagagcaattctcgtctatgaaacagataaaaaaaatttgatgtgtctaggtacacaaaacaacatgatggaactagtaacctagctagaacggcacacatgtggctctcttgcacatcatatttccatctttttacagaatcttgtttggaatcattgctcccccgatcccttctccatctcattcaccccatggatctatatatcttggtgatacatgtacaagttatatccatccaccatcgaccactgtagtccagcaccatcttatattctgccgacatacttattctccgaccataaacccctcctcaacccctcaccacactcactctagctctcactccctgtgcacacacctcactcttctccttcctgctgctagctctcttccacttccactctcagctagctagctcatccccatagtccatatgctgaatctagtatcatttgagacgccgcctctcggaaggcaggagagatcagctaatactaccactgtcactgcagcagcggccatcaggggaaaaaaggaagaaagctccagcaacacttgcttccatgggcacctggacctcagtcttggcatctccttgtctcatggcagcggcggcggctgtgacgcatccagctgtggcggaaacaagcaggcgagctatggtggtcggcagggcagccgtgacgacaaggacgatgttcgttgcatcaccaccgccgccgccacagctgcaaatgtgattacagcaaggcacgaccatgtcggtgatttgacagcatcatcaggaggaggtggctgggcagcggcgttcatgccgagcccgaccagcttcatgcatccatggagcctcgccgcacggcagcagaaggctgctgcggagcaagaccggacgccgcctaccacttacatgtcaaggtgagctaaaatgttacgctgaaacactgaatattaactttcttcatggctatacgtgcatcagtttttacatgataaattaaagaactccgtatgttttatgatccatgtttgagcttcatatggataagttttcctggttagctagctaggtcaattggtgtgcttctgaaatgagacctcatttgattttcaggggaaggacaataatgcatgataattaattgtgtgtgtgtgtgtgaggggggcgggggtgttcagagtttatgatttgggcacttcatagaaatgaaaaatttaaggcatatagttcctccatgtattttgattttatcaagcaacatgatttcacatggggttatagacatgcatatgaggatacgaagggccatagtctatagatttgcaatcatgatgcatagaatgtatgctctgtagtggaaaaaaggaggatcaaagtgatctacatacaaatgattgcaatcattaacattttgaaacacccatccatgattagtatattctgcaagctagccgtcgtgtgcttggaactacgtttataaatgatatattgcaaaaaggttcttatatactccgtaaagtttctaaacgtgtacatatataacagatgagaactacgtaaagtttctaagagctgaagatcgatgagaactacgtaaagtttctaaacgtgtacatatataacagatgcagctatactagtattgtttctgagctattcctaattaagtcaaacttacaagcttgaccaagtttattaaaaaaaacaacagtatttccgatccaacgccaaacttttaaaagtatttctccctccatcacaaaataaaagtatttgtgagcttgttctgagtcaaacttttacttttggaaaaaaatagtaatattaccgatgccagagacaagcatcatcaatagatctattgaggaatatattttcaaagtttacttgtttgaggtgtttgatgttatataaacctagtcaaacatagaacaaactcagaaatccacctgagttgggctggatagaatactacttaactttagagttgcatgcatgttagtttttcaaaaataagtgcatgcatattagtgtcaagttatatattgtctctttttcttctatttggagaaggagagagaagaaatactccgcccgttccaaaatacaaaggacttgagtcttttccaaatcaaaacatgtatcctaagtttgatcaaatttaaagagaaaggtatcaacatctaccacattaaagacgtaaaatataaagatagatttcatattgtgtatatctatgggtgctcatttgatatttaaatgttattgttgttttgaccttttgtataaaatttggtcaaatctatggtactttaatttaggataaatttaaattccttatatattaggatggatagagtatttgatttcacccactgtcctatttctcacgaataaagtttgtcatcaactaattaatttttacacattttcaaagtcataggtagtcccataccctttttctttcaactgtgtctggaatatgaagaatttttttcattttgttttctatttagaggaaaaccaagaagataaaaattttcaaatttattaacagagttcctagtaaaaaacaatggatttccacttagatgaaacatcaatgtcacaaataaaatgcaagcagagagtaatattttaatttagctttccatatataattaagatacctccatatatataggagtaacatgcaaacagataagagcatgcatgcatgctgatatatatacttccatatacacattttatttttgcatacatatataatgcatgcatgccgatgtatatacttccatacacatcgtatttttgcatacatatataatgcatgcaaagcaggaattggaggcagccaaacataggaagacaaggattagtttaattaggactgtggtcatcgtcctacacaaggtagctgctggactatgaatcgtaacggcagtcgtccagtccataagtaagctgtggtatagccagaataatgcatgcaatgcatcatgtgtggggggcaaagcaaactgaacagctagcagacgcagaggaatggaggatggctctctttcttgttcttttgggaccgttatggagcagcagcagagcatgcagaggccatggcgactcgcccagacgacgacgacgagacgagagagagcacgtacgtacatcggacggacggagtgctcctagacgagagatgatcttttctttggggagggaatatccatggtggtggtgtgtgcatccatggtggggttgcagccgtgcaggggcagcaatgatggtgagcgcagcaggcatgccatggctgctcagccctcctccctctgctagctgctagttgcagtgcagtcttttccataaaatccacttttggggtccccgtcccgtcccagcgcgacgtacggccttgttgccatggctatactatcaccatatggatgtgtgctactgtcccctaactaaagtagtagatgtagctctctcatcaataattgaacagctgtgcagctgtgctttgtggctatgcatgtgatgggctcatgatgtgcttccttcttctttttttttattctatatatgaagactaggactggatcggagtgcctaataatcttcgaactgctaaaatttccttcagtactttatgaagaaattaacatccttggtagcagtacattgttgtgtctaacttctgcatgtaaagttcccgtttctgaataacaacttactacctcagcagcatgtatatatgttctaaacaattactgtgcctgcagttcgtatggaagttccactgaaatttgttcctctatttgattccatttttccccttaattatatattgctctatttgacatagatgtgcttcgccaaattatctttgcctctgtcatgtcaaacagtaatgatgaccgtgtggccacatcaccgtcggccgtcggctggccgccagtgcacacctcccggcgcaacatcgtcaccgccatgcaagtacccaagcctactggcgccaccgccgccgatggacccgaaagcacgaccacgacgcacgccacagccggcggcggcgaaaagaatgtggcgccggcgccgccgacggacagcacggtggtggccacactaatacggccgccgccggcgaacatgttcgccaaggtgcacatggaaggatacgcgattggcaggaagatcaacctcagggcacaaggcggctacgactcgctctccagggtgcttaccaacatgacaacaaacttcttttgtcgtaagtaccccactggaaaattgaaccccacccttttttttgcatattaaccctttaaataagaatcaagagcaaataataaagagtaaagtctatcaccggttttaaacttatttgggtatgtcatctcggtccataaacttacaaaacgaccgtttagatatctaaacttgttcgtttgtgtcattctggtccctaaacatgaaaatctcccatatagattctcaaactcttttaattgtgtcatcccaatccctaaagttgtttttaagtctcatctagatcaaaacaaaacaaatctaaaaactctatatcaaaaaataactcataaatttttcatatgaactcaaataaaaataaactttaaatcaaaattatagtcaacaatgtgatctataacttcatagttgaaaagtttttaaattaaaatcatttaggctcccaaaatattttttttaagtttatggattttgaaatttaaaattaaattttttgatactaaacaaaattatagtcaacaatgtgatctataactttatagttgaaaagtttttaaattaaaatcatttaggctcccaaaatattttttttgtaagtttatagattttgaaatttaaaatttaaaattaaattttttgatactaaacgacttcaaataaaaaacttttcaactagaaagttgtagaacgcggtaagggctacaactttggtataaagtttgtcttcatctaagtttatatgaaaacattatgaattttttttatataaaatttttagacagctttattttgacctagatgagattcaaaactaagtttagggaccggggtgatacaattgaaaaaatttgaagacctaagcaggtgattctatgtttaggaaccaggatgacacaactaaataaatttaagatctgggatgacatagacgaacaagtgtgaggacctaaacggtcgatttgcgagtttaagaaccgaggtgacgcgacagtataagtttagggatcggtggtggactttactcaataacaaatgtagtgtggcatatggttcactattattttttaggattagtaaacgattaattcatactatactttaggaaacaaatagttttcctttcaaatgacccattttttttttagttgaggaccaagctaaggaggacatcctcattttttttagcagaaaggatatcatcaaattgagtggcctaatttgaattaatactcgcccaaacagcccaagtccacaagctaagtggcccagttgggttaagactagccccaccagcccattaattaaggacatcttcgaactgagtggctcaattgggtcaatactagcccaaccagcccattagtctatgcattttactcaatattctgtttattacgggaagtcgagaaccatagtttatgcaaccactggacctacacgtcatactcaaccacaatgatttatatattaattccacatcgttgccaaataaaattcattcatattgaacgttcgtcataaaaaaaaaaactccagtgtctaatttggtgagacacacacttctaactagaagcgttctattcacaaaaaaaagaattgtcaattctcaaataaaaaattgttagaggtactgggttccaaaaaaaaggttagagagatatggtttgctttgagaattattattaatattatattatatgattgcttcagagttggattccaatttctctaatggtgatatgtctcattgactgtttaaaaaaacgggtttgattctataaatgctgcagccgcagactgttcaggtgcaggcacgggagaaaaagatgtgcctaatagtgacaaattcatatttctgtatgaagactttgagggtgaccgaatgctggttggtgacgtcccatgggagtaagtagctgcagccgattgcttgccatctgccaactatattattatatactatatcatggttcaatatataaaaataataatatttgatattaggtaaatttatattctgaaatggttcgatctaataataatagtattaatattatatgtttagatattcaggaatggaatcttggccttcattaatgttactgcaaaatgacaactcgccataataatgtgctgagtccactgaaatttggactactgagagaaatatagtatactttgcacatgagaaaaattataagtcgctttgaattttttggtatatcgaatttattatgtatttagacgtaacgtatatctagatacatagtgaatttgatgtaccaaaagaatcaaaacggtttatgaaagaagtattatatatggattttaaaatttagaacatgttatataacatggaaatgcgaggagttgcaccacaaagtgggaaaaataatgttcttgtgcatttttttgcagattattcctagcgtctgctaaaagattgtacattgtccgcaatccagtatcaagtgacaaaggtaattgcaatataatgctgtttaatttgtcctagattgattaccattcttttttatatatttgtttgtgaggttttctacatatatgtaaagagactaactaccattcatatataaacgttgcttataccacgatatggttgttacacaatttcttttcaggtcagggtgaaggtgacggaaaatataaaaccgaaaaagcaacaaatgactgaaggcactcttcaagcaagtggtcacaaggacacgagcatatatgcactatatgcttgcacatctcttaatttggcaaatatagctccgaattacgtacttttcttcttgtactaattaagtgaggtagctagtatccacgtgagttatatgttgccgttgttgtttcctaatcaatgtgcatataattttgatcgttatgtaagaaaaagatctagaaaggcaaaaacatgctgtcagcattggtctcaacagtgataaataaggcaggtatatgactttgttg

SEQ ID NO: 4606 - DNA, 14637 bp, Sorghum bicolor
acgaaacgatttttttaagcctaattaatccataattagacagtaattatcaaataaaacaaaaatgctataatacttgttaaactttaacaacccaaccaaacacccctaaaccctatcagctcggtttgattcttactgtggagcgatgtggcttaaataaaataaaacagctgatgtggtttgaaacgaaagtcaaaagaaaaaaaatattttgtctgacttgaaatatgtttgatatccgacattcaaattcacccggtttctcaaactccagcgtgcgagcacttcggccttgtttagttatgaaaagtgaaaagatttcggtactatagcactttcgtttgtttgtgacaaatattatccaatcatggactaactaggatcaaaagattcgtctcgtgatttacagctaaactgtgtaattagtttttgttttcgtctatgtttaatgtttcatgcatatgtcataagattcgatgtgacggagaatcttaaaaactttttgattttcagggtgaactgaggccgtgtttacttcctgagcgaaaaaatttcgcgccactgtagcacttttgtttgtttgtgaaaattattgtccaatcatggactaattaggctcaaaagattcgtctcgtaaatttcgaccaaactgtataattagtttctatttttatctatatttaatactccatgtatgcgtctaaagattcgatgtgacggagaatcttgaaaaattttgtgtttttgggtggaagtaaaagccttcattctggacctcgggagcgtgaccatgttttttttcctttttaaaaaagagagaaaatttgtgtgataccaaaaagcgcggctgtcacctggtctgcctatgcccatgcaccgccttctgttggaaactcctttttcctgtcgctgccgtcatcattccctcgacctggacccactggcgccccgtaggatccacgccacgtggagggcgcacgggcgcacgtggtgcaccgagtccatctgggcatctcataaatcccccgccctctcctgaccacgagccctctcgactggagactgctgttcccctcgacccgattcggttccgaccccatggcggctcccaaaccctaacccgcagatccctccccctttccctgcctcatctccgaacgccccctcgcctcgccaccggtcgtcgtctcccgccgccgtgcccgtcggcgcggcgtcaagggtccgctccgctgcaccccgcgggcgcggggagaaagggggcgggcctcggcgacctccccccgctgcgcgaggtagagtcccgtccatcccgctgtgttttttttattacccgaagagaggtagtggttccggttgctcagcgcgccgaggattcttggactgggtacggcgcggctccgggcgtgcacgggcgtggagaattgggcgcgtgctcgcgaaccctagctggttccgggtgtgtgcttctcgcggcggctcgctttgcttggcatgcgttgtttcagctaatttttgtttctctacccgcttctaatgattgcctgggacacctatacttggcgttctccatacttgtgggtattcacacaagtgttgaccgacacgtgctgtcctcgcgctaattcttcgaatgcatgccagtttatttgcttatggtagcttgggatatctctaatactcattctttccccacataagtgtctgagaagaccattttcttgtcgcactaattcttcgaatgcatgccagtttatttgcttctggtagcttgggatatctctaatgctcattatttcttctccacataagtttctgagtacacattttctccccgcactagttctttgaatgcatgccaagtttatttgcttcttgtagctagggacatctctaatacgcattttttctccacataagtgcctgagtacaccattttctgtcaggtgcaaatccaaccgaactgattgcagaatatatgaagtagtgggtgttgcatgaccttctctatggatatggatttgaacgcatcgcctgtgcctgacgatgatgagcagcagccttatgatgagccagtggaggttgattatgctcaggaggggcatgttgaatctgctgtcgcaacattgcgccgggtacgcaactatcttcattggtgttggtgttcattccatgtactgtgcccttggcatatctgttctgggatcttactaatgcttgctgattagttacgataatggtttttagtacccacgtttacttttgctgggttgacattattagctgaaggaaatgacctccaaagtgagggaatctcttaactatatatatcttaaaataaagttatcttaatgtgcaccacgaccatagttgttgtagaaccatggtgttgaagttcaatatgtttccttgttgaagggtgatttactttggctgcctttatgttgcatacatgctgcatgcatagtttatctatgtgccagaagggccttgcggctttttaaacagttcattttagtttttttttctagcctgcaagcttggttcgatgctaaccataccttctatgtgatcttgctgtttttgacaggagcgtgaagagagacgcaagaaactaaagagagagcagcaggatgatgggtcaaggctacattcccagcagattaggaatgattatgcccctcaacccaaaaggcatagtcgctttaaagaggcacctcagggtacgaagtattgggcaattttctgaatagtttgggttattgatacattccaccttgtgtcccccctgcttattcattattcttgttttccactattctttttcctatttggattctatatataatatcttggtgtggtttcaggctggttggactgtcctgcatttggggagccaatagataaaatcataccatctaaagttcctcttgatgaaacattcaatgagtcagtgcctcctgggaagcgatactcctcaaagcaactagttaacaaacaaagaaaagctggccgcgaagtaagtattgcttgcttgttcttgtggacctactgtaatccctcctactactatactaattatcatgtgaaggtagtctcgttttctatttaacatttgttgtatacagaaatttggttcattgacatcattctgcccctagaaatgagctcttttcttgtctacaaccctagtcttctgaaaagaaggggtgttaggcggcatttatttcctaatcagcactgggtgggctagatggtcatgtatgctagatgggagggtggttcttagttgtctggtaccacataggtgtattaggaacccatctttttggagcaatgtgcaactgccttcttttttttgtcttctcttgtgtattctcatgccagcagcgcgcagcaaatcatccttccatttccttgtcttcgccctacaatgatatttctcctgcacagttataccatctttgcatgctctgagatccttccaaatgtttgccgtcatcacctttgatgccccagaatagcaaaagaaggcaaaagggtgaattcatctgtattaacataaaccagaacaattagttctttgtgcgtgcactccagtgttatgttctccagttgattttgaaccagtgttttaatgcgctggcctagttgctacctaggtgagaaagcgctaagccaaaagaagggagggagggactgcacacttcagaagaaataaatacaatgaggggaaccagcaggcagctcgctctccgcatttcccatcctcgctggctccagtccagttaccagccgatctctccgtccgcttaggggtgtgcaggttacagagctccgtaggtgcttgtggacagtggggctcatcactcttgctgtgctttgttatgcttggttgtgggtttttggtggtgtcgaggattgggaggcagcatccagtggatggcatagatagctagggcatatgaggtgacggtggagggtatgggcgccctgggtatggctttagttgattattagtcgctgattgctcgtggttatggctcatcagggctcctattttgtcctgatattctacgatcatcccctttgccgaaacacccctgcataagtagcggcatgtattccatatgcacatagatggcaaatcacttaggcttgtggtatcagtaggtggggtttgtggaattccgtatagagttaaaatattgtttcatcatcgtttttctttattatgccatttattatgtgcgatttgtatgcatcagtgctcacctaaatgctaaaattggtcacacatcgtttagccaaatattgtgcaaaatggccatttaattaggctgacagaacatacattctgtattgacttttagttttcccatttcagataggtctggtgattgatttgacaaataccacccggtattattcaccagcagaatggacgaggcaaggtactaagtatgcgaaggtgagatcacttagcttaaatgctttcttgtttctcatgtacctttttcttaactaacaaagtttttggtttagattgcatgcaaggggagagatgctgtacctgacaatgaatctgttaataagtttgtctatgaggtacaatcatgcatacctctgcaaaagcattatatttgactctggatattatacgtctatatgagccactgtcaatagttttgtttcctgttccaaccctgggcaccattgcttatgctccaagttattttatttattctacctaccttattgtggatgcttggcttggcaatatgagtgatgcaagaagcatatcgtcaaggataaggtgtgcttatctgaatcttagaggatagttggagtggaaattgttaggtggtggcttgttggttaagtttgctgatcgttaggagatttgttggttttggtttactagaggttgtttgttgtaatggaccaaacctttatatttataaagagttgccgatcaggcatatccagcacaaactaatccaatccagttagggatgaaaccggatcggatacaaacagatattacagatattgaatacggatagttgtttctttccgagatttggagtcaaatacggatagtgtcagcagtcgtgaagctagagcaaattatagagtggtgctcttgccttgtgggtgcagagactttgctatacatgttgcatatatggcgtgcgtttgcgagggtggcttagggtagctcggcctgccccctaggcccaggccagggaagcctagtctgagttgctgcaagtggccatgtttgtggcaagggcctgtttcagccaggtccaacttcgctggtgtttgtgggtgggttagcagcctggctggctagccaactaactccagctaccaaactcatactgtgtttgcttctccaaaactgagccaggctgaacatgagcatgagcaatacaacaaactccaactacgaaacatcattggccatttcaaacgtacatgatgcacacaaatttgtgcccagctacaacatcagttttgggcctcagttacaacatcataggctattgaaattcactaatttcagcatacaatactcaatctgaaagctagaaaagcagcatctgctgcatccctagttttgaaaccctgatacaagttactgtccccatcatcaagagccagacaaagttgtatccagttagagtagacaccagggtgcctacctcggtatagaacataccaggtcaccatggaacagctgcagggcctacttatttgtaggacaagtgcaacaagaattagatacatacattagcatggccagcaaaagcacaaatacagatatggctataggaaggaagatgttcatcctagcaataatttgcttgggctcaatgatgccttgttgatttggaaacactttggtttccatggcatcttcatcacagcccatgtactctaagaaagaggctactgcctcttcctttgttggaaacccctgatagctgttcctcttaaaaccagcaacctgtgcattgcagtcagcccagtgtgcatacactccaggcttgtagcccttgtacacaacataccaagtcatgttccttcaaaaaaacccgaacatcaatttagatttcaattctgctagtctttgaaatggaactgaataagcctcagtcataaagaaccaaattgaaacaactatgactgcggcattgaagaacttcagtttggtttgaaccaaatggaagttcttccatgccgcaaccatatggtgcttcattactactaaatgtgacatcataggcaacaaaagaaccacttagctggggcctcagacatttatgttttttgcacaaattttacttaaaacaatcatccctggtggcaactttcttgattctaaagaactgtttcatgattaccatggggtcatgagacactccatcctcagccatcaggtgataagtccaagtcctgttgcattggggatggatgtatcccatggcctgatgatacccatgaactgatgaaatccatacaaaccagcagcaaatatagatgtgtagccacctcagattgttaaaaattatgccagccatggcatctggaggaccataaacttcttgcccttatcttgagtcatggacccaattgttgcaaagtaaagtttatggttccttcagatgtgatgaatgacactagaaaaacaggaaacccatatcatacatttttgtcatcataggccaagaagaaaccaaaaagcctcagagtacacagaaaacatgaaagacaaaaccagtgtagacagaaaacagtgtagacagaattcaagcatgaaataaacagcagccaacagaggctgctaaaagtatgttacaattactagttctgcccaattaagtaagggctcaaatgctgcccacactcccaactaaactgaaccaccaaaaggttaggtgttagtacagccacgctgcacaaaagcctaacaagtaccctgtactccaaaagaaggggagagagggggggggggggggtggaggaactatacatctcaacagtcaaccccctcctggacatgcacccattgatgttgtccaactacatgaagtagtgcttggctaggtaattcctaagccataaggtcctatgtgcaccactcattagcacaaagcccctagcttgtgccttgttgtccaggaggtagccataggcaaccagcagtgcgtcctcactgtacccctccatctccatcactgcctggtacaagttatcctccacataagcagcaccagtctccctgagagcattggccacattattgactgcgtcagacatgttggtcaacataagcatctcatcctcactgaaattcctcttcctctttccacagacagtagaagcaggcacaaaagtggttttgctgccctcacggagtatctcagtttgcttactgctgtaggtcatgggagggggctcaaccttggtccgccgcgcgccgcgagcgaccgagcgccgcgagcgaccgagctccaaagaaacgaaccctagcggcgtttcccagggccaggcggagacggcggttttggctgccggaagccaggcttcagaatgggccagggagacaaacacggtaagttgcagcccaaaggcgcagccgagccgctgggccgcccccgcaaacgcacccatggtgaaattttagaaaaaaccattgttttctcaaaatttgggtggtgcatttgcacccactagctacaagctagcttcgcccctgagtgtcagatgtgtcggatattgatatcttatgtcataatgtatcagaaatccaactttgagtattcggatacggtacggatcctagatctctggattcatatatatggattatcgaagtagggtttaaacccttttggatcggacggatatcgggaatgtccgtcctgtttccgtccctaaatccacgtaatcgcacttagttgctgctgtgagcctattgtcgacggcgaacacgttgcatctcttgctattctgttctcatctgctagcccctaggcctattgtttatggcattgttgtcacccatcaggtttgtgtgatgttttagattttacgcttttaccttttctatgttctgctagactgctacatgcttattatattgctaattgttgggtaagtaatttgttttcttgagtaaaaagacaatttggttttgactactgaaatacatgcacagcaacagctgggaggagctgctactgtcctctagaggcaggctttgttgtaactgctgcggtagtagtagaatcagcagaagcagtgaaggagcaaaatttgttttgtgtatgtactatctggaacatagttgttgctagctgtatgtataagatgtactagcactgcagcaggtcgattactgtagcaacggacctaagtgcatatgggtactacctcatgtacatgtaacctgtgcgagtttaaatgaagggacaatctgcagtggttcctctcctttcatctttttcctaaccataccccgttagggctatcactaatttcaaaggggcctgcacctttttgcattttcattttcttggattctctaacaaattgatttggatacttcttatccgtaacctggtcattttctttttgcttgaagcatcttgggtgtaaatggtataaataatttcccaacaaatttaagaaaagctcatctttgttaacaaattttgttggttctttcaggcaatgatgttccttgatcgacaaaaacaatcaaagaatcctaaatatattctggttcactgtacccatggccataatcgtacgggtttcatgattattcattaccttatgcgcacacacgtctcttgtgttgctgaggtagggatactagaccccaaatgatatttgattgattatattcttcagtattatgtgactgtttttttctaggcgataaatatatttgctcaaaggcggccacctggcatatacaagagggactatattgaagcactgtattcattttaccatgaggtccctgagaatatgatgctagcatgccctccaacaccagaatggaagagaccagatgatctcgatttaaatggtgaagctaagcaggatgatgatgatgacaatggtgatcctgaaccactgcgtgtaagtgttttcttcaaaattgataggaaattatcagatctacttattcatgagatagagttaactattgcctgtgcccttggtatcacctcacatatggtttcattgctaagcaatgctatgttttgacaccacaatatgtttgcagaatgaatcagaggataaaataatcaccaacgacgatgtgttaggggacgaagtgccatatgaccagcaagaagctttgcgtgtcctatgttatcggttgcttgaaatgccccttgtaagtaggctatttctacttctacccaatatattatgtattaatttcgtatatgctttacaatgaaaacatggactatgataattgataaccttttgtagaatgtagtttaatacctctgaacccatcttcagtaactatttcatttctgggagcataacttaaaagttagcatggagcacatgcttgaatatttcatgtcatggaatgcaggctgagaatgtgagagtttgacattccggtctggcaaaatacttgtgctagattacaaggtggtacattaacaatgtatttttttgacataattcatctggaatcttgagtcttgacaagttaataaggctcagaaatgacattttggaaatgcttggaactaatagaattttgtcatgattaaactagtttcagtctatagatatatcatattttgtctattgttctatgcactacttttgagttggattggtttgtaacataaatttctgcaagtttatgcttgttgctctcaaacgggcctttttatttagagtgccctgatcatctttatttgtttataggtaagggggcattcacaatttcctggatcacatccagtttctcttaacaggtgagtaacatcaaccagtaactcaaatttctacattttttgtgcattatgatatttttttgttcctatgttatataaaggacatgatagaaaatcttgtaaggaaccattagtacatgctaatttttatataaagttttaaaaaagcgtaggggttaggcagatggatgcattaaataagcattagaagtgttgcaggtctttttgcatcatgcagggttttcttagaattctttcacacttgttatgagttccttgtaatccaatgctgatattttgcttcaaaatttctattctcagagcattagaagtgttggttctttttgtgtatatatccttttttttatctaataatgcattcgttttgctttgttcagtgaaaatctacaactacttaggcagcgatactactttgctacatggaaagctgatggaacacgatatatgatgcttataatgagagatggttgtttcttgattgatcggaatttttgcttcagaagggttcagatgcgctttccccataagagccttgaagtaaggttccaattttgctggagaaacaatcatagagcatgcctcttattgcaaaaccttaatcttatttctttgctatgaagggtctgcatgatatgaccttgattgatggagagatgattatagacacggtaccagattcaggcttgaagagaaggtacttggcatatgatcttatggcacttggtgcagtgtccaaaactaaggtaatatgctgtggaatatatacttcctttgttccaaattataagatgttttggctttcctagatacactgtagtgtatattttaatacatagcaaaaatctatgtatctaaaaaaacttaaaacgtcttataatttggaataaagggagtaacattttgttatttacttattcctgacttactccctccgtcccaaaataactgttgtttttgcttccccagaaataactttgattcaatatatattcaaaatattaatatttatggtacataattagtatcattggaaagatttttgaatctagttttttaactaatttatttggagatacaaatgttgcacgtattttctataaatccagtcaaacttgtgacacggaaacctaaaacgacagttattttgggacggatggagtactcctttatccatgaaactttggcgcccttagtaaagaaaagagatgtagtaagcatcctttctgaattatttcttggtacctgcactctatgtccacccatcaatattttgctcatcatcgccataatcatgtttgcttagtctggttagcagaccggcctacaaggttcatgttgccacacgattagtgaactgtagttgagggtgtatttatttttttctgctgtaatctatatgtgatctccaagctctattgtaccatagggtgataaacacacatttttatggcttgggattatctttaattatggaaattgtggatgcagttgccattttctgaaaggtggaaaatgctggaagatgaaataatacggccacgttatcatgagaaaaagcaatttgagagtggtgctaagagcaatccgttgtacaaatatgacatggaattattttcggtatcggattctaggattccttatgaattatgatgttcaactcatgagtcctgcagagttaattttcctttttttttgtttattatatgacattaccaggttaggagaaaggatttttggctgctctcaacagtaaaaaaggttcttaaggagttcattccatcgctttgccatgatgctgatggccttatatttcaggtaagattcttttttctgtttgtttattatgacatgaagttggtaagacgtgtctgctttatatggccttcatgtatggagcaatttgtcgtatttcgagcaagaagagaaatggttaaagtagtctaatatatctttatttggctgtaatgtaactagtaaatgtgatgattctggtctacttggtttttgtgtgcaactggacgaatttgtatggttttgggaatagatcatattattattgtaggaatgggcttgaataatggtcactttttagtgctgtttgtattttcaactgtttacaattggtttcaactgaagttcttattttttttagtgtaatatataatggttaaagtagtctaatatatctttttagtgtttcctacttgtgaagacttagaacattttgttgtggatgtgtaattttaaacagtgcctcactcatatttggtccccgtatgagtgaggatcatgttgaggaccaccctctctctttaatacgagacgcagctctcctgcgttttaaaaaaaagttatttacatgtaaattttgcttttacttggcttatgcttcaattgttcttgcagggctgggatgatccatatgtaactcgtactcatgaaggtcttctgaagtggaagtaccctgagatgaattctgtggacttcctttttgaggtcttatgcccatttttaactattttgttttaaatggattagtcatcgtgaagatactattttgaaatttggcttttgttttgtatatctgactattgcagcttacaaatgataatcgtcaattggttttcctttatgagagaggaaaaaagaaacttatggatggtgctcggatagcatttactggtaacatgcatttcattttcatgatgacctcgttcattgtgtagtcagcttatttgtctcttagagtgctgaaataatattcttcaacaaattttaaaaatatttaggagtattatcttttgatgacatgtttctattcttctgccctactattctatttattgtatatttattgctgttcttaaacttatacagatgatgtagatccatcctctgtcgctgggaggattgttgagtgctcctggaataaggaagaacagtgttgggcctgtatgcgtattagatctgataaatcgactccaaatgacatcaacacataccggaaggctagttcttatatactttctattgtacttcatctgttaatttattttcttttaagaatattgctgtatgtaaatatcgtcttgatctttgtttgaaattttaaatgtactcatttgaaatggtctttgctattagggtaaaatcattttccaaaatacagttggcctgtcacattggatcatagtctgtttgcatggctagttctccttacgagttgcattttatgccttcatcttttaggatcctgctctctaagacgttcacttcagcaattctcaaagtgtcaattaaaacagccttgttctgttcacagttgagcatcattgtttttgtgggtggttgagcatcatattttgcccactgttggaataagtactctatatttgggtgggaaagtgaaaccactacagtattcttacagtttatttgcatggtatgcaggtgatgaggagtattacagataacattaccgaggaaaagcttctcgaagagattgatgagataaggcgcctcccaatgtatgccgataggatgcatgctcatacgaagatggcacaacagcggcgaagattgccaccatagtgctagtctcgttgctatagtgctggggcgctctcctaccgcctctagccagcggctggcttctgtagctgtgtaattagtagaggtttcagtagccctcctatgatgattgctggctgggtctggccagccaactaattctttgcacctcatttgtgtcttctccctgccctcccaaccacccacctgtataggcgtcgccgcagagtagtttccctgtaaattgtgtattctatgttctcccatattctcccctatggttttatttttcatgggtgtagaatagcgtttaacaagaggctggtgttgtaggtacattagtgtatttgtttaccatctctcggtgttgccttgtgctagaataaatgtagggtgcactgggttgccatctgttgccgatggtcgtgtggttcctctggccatatggctgcaaaatatgggttatttacatcttttgttttgtgcgcacctgatctgatcttttgcttaacgaagaaatctttttttttggtaaaaaaagagaatgtgttaatggtaccaccctctgatggttctttttcgttcacatggttagatgatgtgaggcgtggtacatgtttttcctcaaaagtatccgttgctttgagacgatttaaccagcatgttagaatgtatgtaggagtgagaaccctgggataaatcatggtcctggtgagaatgttgggataagtcctggtcctgttctcgatttctatgtctgctggaattcgtattcataggccttgttcagtttttggaactgtagcactttcgtttgtttgtgataaatattgtccaatcatatactactagctagagtcaaaagattcgtctcgtgatttacagtgtgtgattagtttttgtttttgtctatatttaatgcttcatgcatgtatcgtaagattcgatgtgacagggaattttgaaaactttttggatttcggggtgaactaaacaaggccatagttaatatgacttttatttctatttgttt

SEQ ID NO: 4607 - DNA, 6170 bp, Sorghum bicolor
cgattttggagtgttttaggactcttggaacttgtttgaaacatggcttgaagcaagctctcatctcttcacaaaactctccctttcaagcctcttttggtgattttttttcagatatatttgatccggaagtttcagattgttcgtggttgatcttttggagatatttgggaacttatctagctattagttttaactgattttctacgagcacctagatatcatcatttagaggtttcttcacaaaaccctaatttcaaagaattattttgaaatctccttcaagttttgatctttttgagttgatatcttaggatagattctaaatgggttagtcaaggtttgtgccaagttttagattttttgggacttgttttaatttattttaaaattgtcttgttagaaaattctgctggaaatataaaaaacttgctcaggctgattttggaaattagctcaggcttgttttgcaacttgcattgattgagttgatttttggtggagatcttgtttatggtgtttcaaacctctccataaaatttcatgatcttgaaggttgtttgatcagtttttttttttacttttgtgagttgtgtttcaaaaaaaaaaaaaactagcctagattcttttgcagttggtttccgagtttgcttattttgatctccatttgcttcggtgattgatgtcgctttttggcttgtgtgatctatggtgggggtaaaaaaacgcttaggttgtttttgggattcaggccaactcttcgatgagaatttcatttagctatcactatcattgactcctctttggtcgtctgctcagtccttcacccttctcaaatttgaaacaagccctataactaatttgctcatacatccaacctgacaatatagacatagactgtctccaacaactagacataacacaggagacccgttggatggtaaagggcacgccgtggcaaatgaggtacgcacctagctaaaagttgtttttttacaacgaacgcaaatgaaacaataatgtacttttttcttttctccacctccggcgaaacagctgtttggatagcaccatataaaacgcttatctgaattcacctggactattctattggacaacgtttttgtccgctaaaacaatgtgaagcacgcattttgggcttggattcatcgtgattgctctgtcgcatgggaacacctcaagggatgggagtgaatcaattggctttttagggcctgtatggattcaaggaatttcaaaggaaatctataagaatagcaaaacagaggaacagaagtaagaacgagcgtttggaacaaaggaaatgcttattcctttcctccggaaccgtaggggcagatgctcattttacaggaaggaaagaatccagtcaatcttcaagttttcttttcatgcgtggttgcccgaggcaaagcacacgtcaagagagagagaaatgagttaatcacaggatatgaggaatctgccaccatcctgctgcaatggtgatgaatcccttaattgtttcctgcgttaatcactgccatgggtcccaccaaaagtgaattttcctacgttttgattcctacgatccaaacatctgtccaagttcattttctttagttttccgatcctctattttttatcacattcctattccttttttacgtttttttcttttcttgttttttatattcctttattccaaacatacccttcaatgaaagaacgggagatggcaaaggtgacgtgtctgtagctacgaatagcccaccgggccatatgagcccatctacggcgccgtagcccaccgggcagtgccacacaccaagcgaaaaccaagtccactcggaaaaaaaaaaagagaatcaaacagaatgggtgcgccgggcccgcacttcacaacgacccggacccacttatcagtgacggggcttcgcaaccactaggagccactaaacccccattccccagccctaaacagcaacccctaaaccccagaaccttctgctcccgcgccgccgaaaccctagtcccccccacgccatggccctcgcgctgcgcttccggcgtgtcctcgccgcggcctccacctcggcgcccctgctccgcccgtccgcctcagtcgcccgtccctcccccctcgcggcccccgcctcctcccctgtcgcgccgctcccgcgggcgccgtggcggctcctccccggcggcgccgccgccgggttccggtccacggcggcggcggctgcgcggggcggtgccgactacggggcgtccgacagcaagatctcccccgacgagatcctcttcgagggctgcgactacaaccactggctcatcaccatggagttcccggaccccaagccgtcgcgcgaggagatgatcgagacattcctccagaccctcgccaaggtcgtcgggaggtacgacttcgttcctttttcgcgacgaaatgcgtggcttcgttacggattgggcttgctgttgtggtgaattggttgttgtagtcgctgagacgcgattatgaattgtgcgattgcttcatcttgttgtgccatggcttgccctgtgggttatatggtaccagtcgggtgtttgatctaaattagatgctacttcttgtgtgtcaattagatgctgttatgcttgagatcaagtactgtaattatcaatggtgtagaaatatgattatctttcaggtgataggactagagttaaactaatgaggttgtatattgagcacgagtgatttgagggacattacgagcctgattggttgcctaccaaaatttgctatgccaaggatttggcaagccatgattttggctagtatttggttggctaccaaaatttgccaccttctcacatttggcttgctaaatctttggcaatttttttgcccaacttttgtcttgccaaatccttagtatggaaaattttggtaccaaccaatcaggccctacgcctagaattgcaatgaacatatgtaccagaagtggtattattagtttgtgttaatgtgatgtgagattaaaaagttagcttatagtgccaagaccatctacctccctttcttgtttacatttggttcaaacatttccaggggtagtttctattttggggtctaaagtattgttaggtccacatggatgtttatgttgaaacatgaaagatatcagggcccacctgaaactaatggcatgactttcaagtttcaaggatcacacgtgtacagtctacatcccctagtttctgcagcattgtactttacatggtactcagcgtttgactagctgggatcttgtgccactgatcgaagatcaatgttcggttaattgcccccatgcaaatattcgtattttgtatatacttaatgatttgaattgtaacttgtcaagttattgttctgttgatgctcaattctattattgtatatatttagtggcataactctcagctagtcaaatcatttgacttgttgcccttatatttcataatctctatatgagataaacagctagtttcaacaaatcaatgtaatttgcctcatttgctgggctctgaatttcttgtagttatgaggaggccaagaagaggatgtatgcttttagcacgacgacttatgttggttttcaggctgtaatgactgaggaaatgtcagaaaaatttaaaggtgggtgaagtagctaatgaaattaaattcatttcatttttttcttgtctgtaactaatatgattacaacttttataatacattaatacttacccccctgtcttggtattttggtcaggtttacctggagtagttttcattctgcctgattcatacctatacccagaaacaaaggagtacggaggtctgacccattctcatttttatttacgagttgataaattgaatcagctttgcttgtataccttattagtaaatgaagtgatctttaaatttcctcgaatttgtaaacatgccacatttttatgtttatagtgcatccagcacatgatgcttgttagaaattcattctgatacatgtattgatttcaccaggagacaaatatgataatggtgtcatcactcccagaccaccacctattcattatagcaaaccatcaagaactgacaggaaccgtaactaccgaggaaactatcaggatggccctcaacagcaaggaaattaccagaaccgtcctcaacaaggtggttaccagaacaacccgccacagcaaggaaacttccagacaaaccgctcacagcaagatggaagaggctatgccccacagcggaattatgcacaaggtgggcaggatggtagaggttttggaaggaatgattacgcagaccgttcaggctacaatgggccacctggtggttttcaaggtcaagctcagtaccaagggcatgtaaatccggctggacaagatcaaggttataacaacccacaagagcgcaggaacttcccgcaagggcagggaggaggttataggcctggtggtccttcagcacctgggtcttttggtcaacaatcagcacctgggtcttttggtcaacaatcagcacctgggtcatatggccgaccatcagcacctgggtcttatggccaaccatcaacacctggatcttatggccaaccttcgacacctggatcttatggtcagtcatcaacacctggtaactatgggcaggcacctccatcagcgaatccaggtggtagagttcctggtgcgaatcctagttatggtggggatggcagacaggggacaggaccggcatatggtggagataactggcaaagagattctggtcagtatcctagcccaggtgaaggacaagggaactggcaggtatgagagcatttgatatacaatttcacttttaaattgccattactgtttgaattaaaatagagcagtttaaaccaggacactgtgttttgccagttctagattgaattcatacaccgactatgtataggttcagatctctgactaccttctgttacgatttttagatttgtgagctaatctgttcgttttcaattcccatgctgctatttgtttaaattagtttttgtagaggactacagtagaagtgcaggaatacatcagagccagttttaacaacagctttttcatgcagcagcctttcctaagaggaacatgcatgttacattcttttctttttttggtacaaaaatagttccatctgctttttatagaaaagaaagaaaaaggcttggaaccgcacattgtggctactagcttaccagattgcataactcttaagcgaactaaaatttgtaaacacagttaaaagttgtgtgtatgttgtatcaggaagcaaccagacacaaattgaatatactgtgagacattttgatagttgctgaaccatatctactactaaccaatagtctgtctgtattaggcgcctacagaagcaacaggtcactaataatatatgaatttgtgttatccattgctggtcattgacacttaatctttcgccattgtgcagggaaggcagtaagagcttgagtgttccattgaagacaagcatggtacttgagatgtagaaatccccacctgtaaaataaacaactctggttattattcttctctcttttttgcttgtattcgaactctaaacttatggacacgtgttattaccagacctgccgatgcaaattactattttagttttttttggccggatgttggcatttttaaatggcacagaatgtggaactctccgttgtcttcgtgtattgtttgtagggatgatgcactgtaaaacacgtgccagttactatagtaattctgagtggagttgtttgttttgttccacggtcggagcgaggcagattgaatgagatccaaaattttgatcatatgggatccctttatgtgtgatgcatgcatcaccaataatgatacacacctttgtgtgggatgcatgtattttcaattattgttctcctaagcgtgtatgtttaagcttatctgtagaatttgttagtcattcagtagtgtttttctatcgtaaaaaagaatcagcgaatagtagccatagtttttcaaacaaatctaaatgccaaatggtaattagttggtcactcgttgtttggccattatttggtcacttgtttggttattgtttgggttataaatgg

SEQ ID NO: 4608 - DNA, 4240 bp, Sorghum bicolor
agctatcaaatttttggtagaaagctaagatatattttttctaacatcacttataatgttctccatcatatcacaaaagttgatattaaaactcaactaatacgtggaaaaacagaaataacaaatcatgttaaggggtacactagacaaactgaaatagttggagggagtaaattaaaccaaatgtaagtttagagggtaatctggacatacaccaaacttgaggagagtaataattttgacttttttccttccaaagataatatatacaattcggcattgcaggtgtagtagtggactagttatatgtgagtcccatcatctaaaatatatttatctcactgcttcctcatccacacaactccttccattgtcattcacagagtgagatcttagaattgtttactcttgatttcattgttgcaggcctgtgatgtaataatcacttctttcgcatacgcatggagagcacagacatagggtagttccatcttgggttccaagggtagcattcccccccaccccataagccccctattgccgggggcggatggagtacataagtgtcccctattgcccaatgtatcgttggaattagatatgaagacaaatgcgaaattgttttcattacataacaagccggatccagacaactttggtcatgaattttgttcggattttaggtaacggcaacaacaatatctaccacatattttctgtttgtcaagtcaaatacagaaatatataaattatgaatatagcacatgcatgcataaatttttagtcaaattcctcatgttattttcaatttttaaacttttgcaaaagaaagtttgcatttactgactatttggttttctcaatttgcttggagtacacaataatattttggtgaagttgactttggacttcgttcatgcatcatacatcgtcatagacattgaaaaagataaccagaactacatcatttaccttttgcagtgcgcacataatgatggacatccaatagaacaattcaaatataatatttgactgaatcctctgactggaaatctgggatgtcattcttatgttcgtaaatgatattaaaaaaatcagaatcctgccttatcctgaacaaatgtttagatattcaaaaaagttatgaatcactattcgccctttctcagttttggtcggttggttagaaaatatccatacatttacgcccctacaataaaagatgtgacagctatgttagctccttagaaggagtagcaaactgagatagggacatatgttccatgttttataggaatgcctacattttgaaaacgcgaatgttcttgttcccacgttacaaaatatgatactccaagttcttttcactcccgttctggaaacggagacgggaacatggctgctatggataggagtataatatgccttctttctgtctaaaaaatgtaattataatctatgggtataagggttgtaaaaaaacacagttttatgcatatagctatagtggagtactgtctccgactctccgtcccataaaaagtatcattctcacttctttgagtagtcaaccatttgcaactttgtccaaatttaatatttgtattaagcaattagtatcattatatgaatcattgagtatatttttacactaaatttacttagagatacaaatacactaataatattttctaaaatatagtcagcacgaacccataacaaacacttttttggttggacaaagtagttgtttgtgggccccatcatctaaaatatagaggatctcatccacgcacgcaaatgcttccatcgttcacaccgagtaagattttattgttatctaactgctagtctgtacttttataatcactttttaccagtcataaggtagatgcgtctattgctatatgttgtactgagttactgactagtttttcatcttgtgttccggcttccgagggacggatggattatatatatcccacattgcccaacgtatctcagcagcacacacatacagaagcactctagctaaaagtttgttgcacagagagcaatggcttctcaggcttccaatgttgtccgccctagcgacgccgagctgctgcaggcacaagccgacctatggcgggtgagcctctcctacctgacgcccatgtcactgaggtgcgccgtcgagctcggcatccccacggcgatccaccgccacggcggggctgcctcagccgccgacctgatcaccgcgctgtccctcccttcgaccaagctgccgttcctccgtcgcctgctgcgtctcttggccgtggcgggcgtgttcaccgtcgacaagaccaccgccgaggataggtactgcatcaaccccgtgtcctacctcctggtggacggcatccctcatgaggtgcacatcaaccacacctccctggtgctcacctgcacctcgacgcgctacctcgacgcggcgctggggttggcagagtggttcaagaaggacgtggtgacgccgccattccaggagctgcacggggcggctctgttccatgagagcatggagagcctcgacccggattaccacaacatggcgaacgaagccttggacgcccacgacaactttgggattgagatcgcgctgcgggagttcagggacttgtttgaggggattcagtccatgacttactgctgcggtacctgtggtgatgacaagtttgccagggccattgtccaggcctacccgcacataaaatgcactgtgctggcacctccaaagatgattgccaacaaaccggctgatggggtgatgataaactatgttgaaggtgacatgttcagtttcatcccacctgctcaaactgtgatgctaaaggtaagaacctgttcagtccactaattatgctgtgctttggctgctcgaaattacatgaactaattaattcaaacgatcaaaattccagtgtgagattgaactttaatttgagccactaccacttccatacctactaaatgacaaaccgaaacattctcacttttaatgtttatgacttttgcaagctcaaatagagcttaccttgaatgttcactgcatgatttagttacaaattaatcattgcgtacgtgtaacggtgtgtccaatctatgcatgatgtactatatagcttgtgctgcaccactggactgatgaggactgcgtgaacatcctggctgcatgccggaaggcgattccttcacgagaggatggcggaaaagttatcgtcggtgacattgtgattgattactctgggcctatgttggaaactcacctcttaatggacattggcatgatgaccatgacaaaaggacgccaacgggatgaaaatgaatttcgtgagatcttcatgaaagcagggttcagcgactataagattttaaagaaatttggagctcgtgttgccttcgaagtgtatccgtaagattgcacctggactttttatatattgtgggttttgtggcttggatatcctaaataaagagggtctgccttagagtattcatggatcaccgtggacctaagcagataatcttggttgctttcttaagattctcgtggatctttcatttggaagagtatggcaaataatatccgccatctagagttggcgttgaattctatgtactttgtacctgctttgttattttaagtgccataatatccggtatcatataatatattcttggttatatagcctgttcatttaaacttatctgtcaaatttaccagccattcaataatatttttatcttataatatataaatcagtaatcactcaatgcaatcgaacatggcttatcagccaatgcaagcgaacatggtgttcagattagataaattgtgatcaattacataatcctgtcattagcaacggctaatgatagttccccatagaaacactgtatttccgtcgagacacctttttcagcgaaagacaaccacccctcaggcttgtatatatgtacaaacacttttcatcaatagatcgatcggtcattttcattgattgctctcgcttttattttttcacttgtaatatatatgttatcacacacgcacgttctaaccaactgagggaatagcggaaggggcagacggagttcggcaaaaacttcctggagtcacggtttcccgagctagaagatggtccatccttccatgaataccatggtagactccatcaccggcgtagtggtgtccgccatccaccgtacgtgg

SEQ ID NO: 4609 - DNA, 6791 bp, Sorghum bicolor
aagtcaaatatctttatagtttaggatggatatgaaaaaaatgtcttctgcgcattatggttttcattaaaatttaggcataggcaattgaaagaaaatggccaaacatcttgtaagcccaacttgcttgcagttaactttagctaagcgtcaaaactttatagggaggcatgacgtggtcagcttcaccacgctagtggtagatgggtcctagtgactctttttagagtagagatattgtttattttactatgacttatttatcaatagagataatttaataatgatttatttattttattttttttataaaattttaaataaaaagtacttacttcgtcctaaaataattatcgttctcacttcttaagaaataattttgattaaatatattaaaaaataataatatttatggtacataattaatattattagaaagattttttaatctagttttttaacgaatttatttagaaatataaatgttgtatgtatttaaacgacagttttttttgacaagttatttaaacgacagttttttttgacaagttatttaaacgacagttattagactggtagctatactgctgctggagtattggtctactggacgcatctggcatgatgaggcttgaatgaggtgagctgtgcctgacggccacatatgccatgccattgcagccttcgtgacggctgacgcaccacgggcttgaatgcctctgacctctgacccgactctactcctactccactgccagcagtcagcagtaattggcttcttatcgcttcctggtactccctccaacggctacctattcacagtctcaggtaggaatagtaggagcgataatgccccgttttgagacgagcaaccctacttgtaagaccactaagcccctaatgcctaccttaaaaacattttcttatgccaaagtgtgacacctgagacttgacagtagggagtactcctgtagtggtaaaatgtttgaaccagaattgaaatgagagctgaaaaaaaaagagatgccgaagattgcaggccatgaccagggacttgtttagttctaaaaaatgaaaagttttctagcactttcgtttgtttgtgacaaatattatctaattatggactaattaggatcaaaaaatttgtctcgtgatttacagctaaactgtgtaattagtttttgttttcgtctatatttaatgtttcatgcatgtgccacaagattgacgaagaatcttgaaaactttttagttttcaggatcaaccaaacaaggtccgggaactatactgctgcaaagagtgacttgcagtaatccaattagtgcacgtgagactatcctgtaccaagtcaacagtcaaccaatgctccacctaggggttttattttttggcaaataatgctccacctagaaggacaataataatttgtcagattttatatcttgccatggttggaacatggcgatttcaacttgtgatgcaggacggtaacattcttattatcattccttaaacgaaaaacactacgtagagcaatctacgtatttatttattgaaagtatttaaacgcgacaactggcacaatattatatcaattaattcatggtaaatcatacggtcctacctaaaaaatccacatacacgttctcgacgaaatgaaaactaagaaataaattaatccacgcaatgttttgatttgcattacattacatatttcccgacgaaactgaaggcaagtcatcagtgcctttcgacgaaaatttgaaaaaacctacgagtaaaaaaatcacttttgttacagaaaatcaggagcccagagaaactgccgggagaaacaaaacaaaacaaactcgaactgaactggtaacaacccacgagctaatcccgcagtcttttcgcctgccagcagacctgggaaatgctaggctagccgcccccgatatatagggtgccccggacgccgctactgtttcttcctccgctggcttctgcgccaccgcctcctgcagtcctccctccctgttccgttagctcttgcagcagcggcggccggtaatggcggcggtttcttggagagccgtggtgctggcggtggccgcggtgggctggcttcttgttggcggcggtagcggtggcgcgtgggcgttcccggccgaggatttggtcacgcggctgccgggccagccgccggtcacgttcaggcagttcgccgggtacgtggacgtcgacgtcaaggccggcaggagcctcttctactacttcgccgaggcgcagcaggacgccgccgccaagccgctcacgctctggctcaacggaggttcgttgctaccactcgccttctctcacacacagtaaagtttgtgtgctgttgttttttactctgtctgaactgaagcgacgattttgtcggggaaatgcggctctttttttttctcggtcctcctgcacgtttgcatctgaatttccttgacgaaattcagaaatgaatcgtttagtttgactgttgttgaatttcactcgatttgactcatgctgcagggatcttaatccctcccttttgtcacggtgccttgaattttgatggactttgtttctttaacagatccattggattccagttcgcctctgggtctggggccggccgtcttgttatctgtcttctagtttcgtttggtaattttagcagaaaaacaaaacatgtctgatgttctgtcacttggaatctggtagctgtactgtttcattagacacatcatcaacacgttccttttaaaaaattataatttattggcgtattaattattagattgctgtagccaggaccagggattgaatgaaattaatcatcaatttccgcgaatatgtcttttttaaaatataatagtacatctttaagaaaaaaatctatatttttattccctcgccagcatatgtttccttgttcaggtgggtgccaggtagtgtttcctggactggaaacaaaggactagctcctattcgttacctgttccacacctaccaagaaaaaatagcatggaattatcattgttaacttgcatcttgattccctgtttactaagagcctgtttagattgggaacggaaattttttgggtgtcacatcgaatgtgtcggaaggatgtcgggagaggtttttagaaactaataaaaaaacaaattacatagctcgtcaggaaactgcaagacaaatttattaagcataattaatctgtcattagcatatgtgggttactgtagcacttaaggctaatcatggagtaactaggcttaaaagattcgtctcgcgattcttaactaaactgtgtaattagtttatttttttatctacatttaatgttccatgcatgtgtccaaaaattcgatgggatggatgaaaaaattttgggtagactaaacagggcctaaggaagtacaagggtatctttatccttggatgtcaccatgtgaccttgcccgtttagagttctgtgtggtgtggtcccatggatgtcaaaagaagtgacaaatcatttgatccccatgcagcaaaagacacaccggaagaaagcttccggcataattcgatttcatctcagtggatgaaaagaagaataacaataatgaacttctttcaaggaacagtacatttgttactggttacaacatgaccatgaaattaatgaatgactaggaaatgcattttagagttgctgcagatattctccctgcttatagtctcagcccatttgatttgtcaggtcctggctgttcttcgattggaggcggtgctttcacagagctagggccattctatccgcgaggagatggtcgaggcctcagattgaacaagaaatcatggaacaaaggttgacctttaggctgttgttatatttccatcccattcttcaatgagaatggaaagtgcaggtcttaacgttttgtttgttcatccatgctgttttaccttcaattttgcagcatccaatcttctgtttgtggaatcaccggctggagttggatggtcttattcaaacacttcatcagactacaacactggagatgtgcagacaggttagttgcgctgacagtttattaaacatagcgaactaagctggaattctggatctcactgtatgtcagtttaactatgcagctaatgacatgtaccaatttttgttgggatggtatgtgaagtttcctgagtacagatcaagagctttatttcttactggagagagttatgcaggtaataaagtatttcaagtgtgaattctcatgtttaagtatagtttgtttgttttgtatggtgaatgttattgataaataacaatgcagggcattatataccacaactcactgatgtacttctcacccataacgagaaatcaaagggtttcaagttcaatattaagggagtcgctgtaagtaattgagaataacttagtcaatgtcctaaacttcattattcttactaagttttaactcaaaattgccttgaacagatcgggaatccgcttctcaagcttgatagggatgtccctgcaacctacgagtatttctggtctcatggcatgatctctgatgaaatatttctagcgatcagccacagctgtgattttgaggactacaccttcaacgacccccacaatgagagcaagtcatgcaacgatgccattgcagaagcaaacagtatagttggagactatgtgaacaactatgatgttattcttgatgtctgctacccatcaattgtgatgcaagagctacggttgcgacaatatgtatgcttgctccacatggtgcaaaatgtaatgtacagaatcatttgtttcctcgtttgattgcctcctttttattgcaggccacaaaaatcagtattggagtggatgtctgcatgtcctatgaaaggtatttctatttcaatctaccagaggtgcagcaggctctgcatgcgaataggacgcatttgaagtataactggagcatgtgcagcgagtaagtgtgccagtgctattgctaccagttaaatttttgtcctagcacttcagaatttagatgcttttataagaactggttttcaactatgtacgttcttacagtaaagttccaagaaaagagtttttttcgcacttgttattaactatgtatcctcccagtatatataattctaaagagtgtttctttcaaaaatgttgaaaatacatacaacatataaatagtagttgtgatacgtagacagaagcgccaaaggatgctagatcagttggtctaggcacctcccaggtgctgagttctaatccagtgggagtgaatttcagtttgggttcaaaaaatcccctcactcgccctcataccaaagcactaggccctcggcccagttctcacttgagcaacggaaaggccacaatgtatggatgggggttggggttttgggggttttctcaccgggtgagaaggcactttcttcttaatttgaaggctgcggcggcagtcttaactgccccggttgaggggtttttttttgatacgtagagagaagcccagttatcagaaattgagtataaattattaggttggtcatcttttcaatgcaaactcacacgggccatttgcataatgtgccagtatcctgaactacagcaacaccgatggcaacatcaacatcttgcctacacttcaaagaattgttgagcacaagataccactctgggtgttcaggtgatgtaacaactctccttctcctttactttacataaacagttctgcttcatgtcaatatcttgtgacacgatgactcgacactacagcggcgatcaagactctgttgtgcccttgttgggcagccgaacccttgtgcgagagctagctcacaacatggggttacaagtcacagtcccctacagcacttggttccgcagaggccaggtatagttttgcatgttctataaccacagtttgtgtccagcttgacaaacttgttgctgataatcgtattaaacaagattctgatgcaaagagaactcttctgaccatggaaatatctttggtcacttgcattctaggttggaggctgggtgacgcagtatggcaactttctgaccttcgccacagtgcgaggtgcatctcacatggtgccatttgcacagccagaccgggctctcaggctatttcagtcaattgtactcgggcaaagactaccaaacacaaccagtccaccaattgagtaaatgtatctacaaaagaaggtggagatagaaaaaaaaagtagcttagattttttttcagttttgctgttcataaagatgtgtaatgtgttggatggtcaataagttctttattatttatgaagagcagaaataatacttttaatggtatggttattgtcattacatatgtatcatcaatctgcatccctcgaagtttggaacacagaggggtttgtgcaagtgacagccaaaatagactagggattactcttccaagctcaacagcatttcactagtccaaaaactattactgtacatggcaagctctctctgcaataatgtcaccttaatgctgtgtttagctcgataactgacagttcctgtcggcagagacatttctgaagaaattccgctcgaccagtgtgcaacagcacatggcacagaaagtgaatcggcatcaggaataaaatagtcagaggcttatctgcattggatggcacaaagaatgcaatgaactggtaggttgttaatacgcggacagggcacacagcatggaagctgacccagttggaagctggatgt

SEQ ID NO: 4610 - DNA, 4151 bp, Sorghum bicolor
tgataaactaagaacgatataattgcaaatataaacaagtagagcaaagtcataatcattatattgaagtataacaaagtcatattcacaatattgaagaacaatgatgaacaaatgaagaacagtagaggaattaccatgaatcctcttgacagatccggaaaccaaccgaagattgactccttctagttctaatccaatgtagttatgctaaactagagatctagttgatgtggtggctctagggcttgatcagagacttcttctcctgagatgaatgaatgaattagggtttcaaaggtcctcctctccaggggccagggggcctgcttatatagttcttccaaatgaatatgcgccgtcggatcaaaacgaccttaatcgcacggttttccttaatcccttaggtcggtggagcatgatccacgagactcagcctgattggctactgagctagggcgggcgccctgtccccgggcccgctctgcctcccgctcgttcccatggcttctggactcttctaggttagggaaaattgcgcggcacgttaatatctctatggaaacccgacgtgtgggcctttcctccataattcctgataacccctgcagaaatagacaaagaccaaaactcgtggaattctgtcagataaaaccctaagtctaggtgtcggttgcatttggatccttttctttgtttatttgttgattatatttgatacttaagaaccgtcaataatgaccccatatcactgccggttcatggcttaaaccgacagtgatatgaatcgactgctcgatctgatttttattgttggttggccttatcactgacggtttaaaccaaaaaccgacacggatgcgccaactgtcagttttttaaaatttggcagttgtgcagccggcagtaaagaccaaatctatagtagtgaaagtaagcacagctccctagatagatatgatgacatttggtaacccctaaggtacataaagaaccacctatgaatatatatactatttacctatatggtaccttatgtgttgggatatggtaattaggaaggaatagatgagagtatggtggtggatttcgaacacgaaaagatgacgtgacttgtggcttcaagaacatgaaagttggctagagataaaatattttctaatgctgcattttggaattggttgcaaactgtctatatacatgtttacttagtagtgtttctaacttctaaacagtattgcattagtccttaattcttgtaagagatcagattattatttgatctagagtgtgatagtccgggtagtattcttgtagatgaaaattttattgtagtctcggtttccaccaaaccaagtttagattacgttgttcacagtcatcttgctcagacatatcctcatgccgcaatttgcaatgaaaaatagcacatcctaagaaaaggataaagaaaaggaaagtttctgtgtaaaaccaaatttcttcacgaaaacgggccctgctgtttatctttaatttggcaagtaattccgcatcacaggataatgcatcacaccagggaatattccacataaattcaaaattggcaacatgaaatgttcgcttccactccaaatttaattttgagccattttggcttttgtagatacaattttttttactatgaatctagacatagtgtatatctagatgcatagcaagaaattatgtacctagaaaagcatttagctatattcattcttcccgttggacacccatttccaaactttgagccaactagataagcatggatcttgccaaaaaagggaggtaattaataagtagaatgaaaaaagattcttccaggttaccatgaaattggctgtcagatggatctggcacactagagatgcctctttataaatggaacacgcctcctgactcctggtcaagtagagagcggtagagaccacatatctagctcatcggaacagagcttagtgcatccagcgcgcacaaaaatggagttggctgtgctgatcatcggtgccggaccagctggactggcgacggcggcatgcctcagccagcgttccatcccctacctcatcgttgagcgtgaggactgcagcgcgtcgctgtggcgctaccgcacctacaaccgcgtcaagcttcacctgtccaaggagttcagctccctgccgtacatgccgcatccggatggcaccccaacctacattcccaaggaggagtttctgaagtacctggactgctacgcccaacattttgacatcaagcccaggtattgcacttgcgttgtgtcagcagcatacgatgagggaaccagacgctggattgtcgctgcacgtgacacggcagcgggcacagaaatcctgtatgcagcgaagttcctggtcgtggccaccggtgagaatggagaggggaggattccggagatcttgggtctagagagcttccacggggaggctatccactcttcaacctacaagtcaggaagcagctatgctgggaaaagggttctcgtggttggtgctggaaattctgggatggagattgcctatgatctcgcaagccatggcgccgacacctcaattgttgctcgcagtccggtatgtatattttgtatagtaatgtataaattcatatatgtgcattctcctatcagttaaagtagtttattgtgtcatgtataaaacatttgtatgtatattatagatttgtctatacataataaatgtatacttaatccaataccatgtatgttctggtattggccctttgtggatcagttcctattctttgatttattgggcgatgaatattcttttattctttattgttaatatacatacttggaagggatgcttttttagtgttccttgaaccttcaattttttatttgagtgtaggtacacataatgaccaaggaactgatccgtctgggaatgacatttatccaatatataccaattacaatagtggatctttttataatgaacatagccgatgtcatatttggtgatctatcaaagtatggcatcgtgcggcctagaattggccccctcctactcaaatccaaaacgggacgatcttgtgtaattgatgttgggacagccgggttgattaagaatggcatcgtcaaggtaagggcactattcgttttaaataagtcctcccggtaagcgtagtcgaatttacaataaatttcttaccgaaggtgtggtgcaaaataccatgtcgtctctctgctaggtgttcaaggggatatcgaagatcactggaaacaaagttcaattcgaatgtgggaatggttccgaatttgatgccatcgtgtttgcaacaggttacaaaagcactgcgaatttgtggctcaaggtacgaacaagagactgtctgaactgtttcaagtttcgtagtaatacacagctgccttggcatggcttttgtccttatgattagatgttcattttcttttatatggcacaggacgacaagtgcatgctgaacagtgacggacatccaaacaaaggttatcccaatatttggaaaggtgaaaatggcctctatttctctggttttgcgaggatgggattggctggtatttccaaggatgcttacaacattgccaatgacgtggcgtctgtctattgaagatatcgtgtctggtctgcttattaggtcaggttaaatctgtgttagctcttggttatgctgttctttgcaccatactagctagctagtgtaagaaatccgtagtagtgcattggcttgtatatgtgtcagtcaattgaacttcttatgagattgcttggatgtaaacggtgccttatgcatcactaatagttctcggttgtttcccgtattccttgatgcatgcaaatagttgatgctgagcatgtaaacctctcgcaatatcgtttaatcatcctaaaggaatgcaatttttatttttgaaggagtcaaataatttgaagtttggctttactaactattatgataccaaataagtaaattatgaaatatactcttcatactcaatctacttgaagacataatgttgatatttatgttttttttctataaatatggtcaaacaatggaatgtttaacttttacgaaaccgagaacgatattcttttttagattgagta

SEQ ID NO: 4611 - DNA, 4868 bp, Sorghum bicolor
tggtaaacctagcactaggtagctcagagatagtgcttagatcgagaggaaccaacttcgtttcggaacggtcgcgtttcgacgaagttagcgtgcctaagtaggcaccagacgctgcaccagacgctctgtgggtgcgtccggtgatgtcctttagccgttggagtgctcggtgcctagggttaggcaccagacgctagcaccggactcaccgggtagcgtctggtcccatacccagggagttagtaaacttctcccgagcaccgaacgcgtcgggtagcgtccggtcttaaactcaaggaggttggaaaactcctcggagcacctgacggtgccaccggacgctgggaagtagcgtccggtgacctgtcagacgcaggtaaagttatctgttgggtgtcaccggacgcttagtgcagagcgtccggtgcaacatcaacagcgtccggtgaccctgtttttagtggaaaacggttggtcgacccttggacttcgtggggtgtatttatactcctgcacctcgtccacgagaggtctcttgcccttttgttcagcaccttgtggtgcaagagagaagcaagagcctagagaggattgagatttgagatatttcttgtgagaatccttctctagttgaattccaagagtcaagtgtgcatccaccactctctagtgccttgtttgggtcaagtgagagttcattgcttgttactcttggtgatcgccatcacctagacggttcggtggtgattggaggcacgaagaccgcccggagttcttgtgggtggctcgtgtcaagcttgtgagcgattttgggcgattcaccgcgacggagtgtcgaagaatcagcccgtagagagcacttggtccttgcgcggaccaagggggagcaagaaccttgcgcgggtgctccaacaaggactagtggagagtggcgactctccgatacctcggcaaaacatcgccgagcattttcttccactactcctttactttctagcatttactttgagtttttacattccaagaattgccatgctagaatagggttggaactaggctgcaaaacttttatccggtagctctctagtcacactaggcacaagtggttgaattagagcttataggttgcttaaatttttagagaagcgcaattcacctcccctcttgggcatctttatcctttcaggctcttcctagcttatgactcctcatatgcgtttagcccataatgaggtgtttttgctctgctccttggtcactatatcgaaagataaaatgacggaaataaataaacgggggcttctttttgtgtttattaaaaaaatcaggtgaccaattcctaagaaaattagaccaacaaagtgaatcgtttagttctcatcaaaaaattttcgtcctatcacataggatgtttagacatatgcatggagcattagatatagattacaaaataactaattatgcagtttgtatgtattttgtgagacaaatattttaatcctaattagtatatgattggacactaattgctatagttacaaatatactataatacctaaaaacttttttctttacgtgaactaaacaaggccttacacacagaacatcgaaaatcaggatccttgtgtccaataccgatatgatttttctatcgccataagtgccaacaaaaatgcatgttcctggggcaacccacgggtcactctaatgaaattggggagcaatgtggcgcttcttgacaattcctcttctgggatgcacgcgcaaagcaacaaaatataatccaagcgggctcttgacagcccatgttctcggcaccacaaacggcccatatttatttttgctttccttccaccaaaaaaagaaaaaaacaaatataacggcaaaaatgaagcgagaaaaaaaaaaagaaagacaggcaccacccgaaccagaaccacagatgacaggctcacagtccacagactgacagactgcaggaagggaaaggaacggacatggcggcggccggcggcgagagcatgatgacgagggagcagctgctccacctcttctcccgcttctccttccttatctccctccccggtcggtccccgtcttcgctgcatttccggttcgctccccatccggttttccctaatctttgttccctgtccccgcgttccagaggtcaagcagcggattgccgacgccgtcagggacaagcaggtgcgacgcccgcgcaatccgggcgccatttccggttctttagattagcgctctcattgtctcctatgacttgtagtggatggggagcggttcttgaaatgttgggttttctgcctgtcctcatctttgggctttggctgattagcttgacgtttcacttacacagctcgattgccttgggttacttcaaaattttggtttctaccttgcgatgtgggaaattgtaaaacgattatgcagtttgtttagtgcaaattttcgtgtcaaggcctgggcatgtatgtgaaagttacagtatgtttgtgctttgctctccctgtaggaggccgtggccgtgaccactgaaatacaagaggagattcttcacgagatgggagtaggtacgcaaattgcattccacttgaacaccatgttttctctccgaggttttctgtaggctgtaccatttaagcatgtactagtttacaatgatttgatgcagatgaggaataagaatcagattgagaacgatgatgcatttacaataggtataaagaaagaactgcaatgtaacaccctggactattggtcatgttatcatatctacagctactgatatcatgatgtgacacactgacaccatgtaccattttcttaatgttttgatgaaggttttttttaaaaaaaaaatctatggttaactcaatatttaaaatatctacagcacatgaaggtgtaacattcactagtcttgtctattcattcagtcatgctcaggtaagttaaacgttgtagaatataaaatcattttaatctgcctgctttgacatgccaggcatacctactagtttactatgctggattgctggtcattgcttttgtatcaagtagttttgctgagtacttgattgctcgttggtttaggtaaacatccaaggatgtgcttgctgcatttaaataatctagatttctagtatcgtacttctcaaaggaatattgtttatttccttcacttccagatttgtttttaaaaatgattgtactcctctttgccttagtgtagaaaatcaacaatctgacatgatgcatcttgacatgttatttcttcatgtcagatccaagttttggcattggttgcctaggaaaggtcaatgttgtttacgaaaatgacaaggacttgatgattaaattctatcaatttgttgccaagtaagtgtcttacatgttggtcccaataagtctaaaacagcattaccgtaagaaaacaaggggggcagggatgactgttacagtcagtaaagtttagcatttcccttaacccttagtcagctaacataatgctggtgagcagcaattttataacactttgtatattttggttgacctacctagtcttgtagttacaatcatgcatggtactttatttgttttcagttattagttccatgtttccctatacatctaatagtagggagtgagcactaatataagtatatttatatattagatataaatatgaacatgaaccacactaatgattttgtgttatatgttagttattgattcgttataataggaaatgagcaatcaattagataagtgaccttcgcacataacaagatacataagaaaaaccatgtgaaaactggtgttataacaaggaaatgttgtggcaacacctactctattacattagagatttacctagagtaaatgtggtcaaagactgatttagtttttttgccattttatttaatagagaagaaatggctattgatgaagctgagcttgaacccagagaattggctgccaaactacatgctcaacaaataatacaagaacaggtgaatagataccttccacatatattcctgttgaaacattcgtgttatttgttgttttgttgatcaagctgctaattacgtggtgtgagttattgctccagcaactgaacatgctagttgaaatgaggaaatatagcccagagagccaatctgtcatacttgggactgtatgtgcatcttcctcatgcccccagattctatattaaaagaaggcatacgtgtttacttgcctgtaatccttttgcagttgcacagagaattggaagaagctaattttgacatcaatacatcgatcttgagtccagagcaaatccaagagattgttcaaaagtgatatatttccaacagatgagatgactacctgctttgtctgtggtgcttgtgtttgtataattgctaaaaagtgtgagcagtcctgtctatttgatttctagaaaaatacaaattgcatgtcgagaagtgtagctgttacaagtaaccctgcagaacaaactgattttgcaaaggtagttcacagggatgtacaacattctgaattttgcaaatatacttctcgtgcatgctcctttcttggcctctctggagttacaaatattgacgcacacaagtattcattctcgctattttaattctttattaagtctcgtttaaggctgaaggaaaaaaaaaagaactgcataaccttgctttggttttattgtatgtgctgacccattagcaatctttaaactggacgaagacacgtaataaaacaattcgtcataaatcgtcttagacatgttaagccttgcatcatacgtagctctctgtccaatcccatcactatggatgcaa

SEQ ID NO: 4612 - DNA, 3294 bp, Sorghum bicolor
ttgtagctagatgtgatggagtgtgctccaaagcttgacatactccatgaagtgttgggagatgaaacccacatgtcacaagtctatgtctttaatccatgttttgttgtgcaaggcctcgctaattgtcttttttttgttttttgaaatgcggaagatgtttggcgctatatcttggggcctttaaccttggagccacgcgatactctagaaggatgctctcgagccatcgccaactatgattgatgttgctgcaacaaatagaagcctatcagttgcatcacatgacatgtcaaggttgttcgtcacccttccttcttcctcccattctttccacaaccatctaaggtgtagtgctcttgcaaattttccaagaggaagtatccctaggtctccaaattcagttggtattgtggaatgtggccaatttactttatatttccccctagtttttctcggatccacctagaggaagctcttcctgaggttatcaattttcttcagcgtggctttggaagctcttagagatgtgaggtagtacacagtttgtgaggtgagaaccgctttgaccaaggtggaccttctcgcatgatcaatattcttgcctctccagacaatgagcttgctcgccactttgtcaacaagaggctggaaatcaacccttcccaatcttgtgtttgttagaggcagccctaggtattttgtcaggaagtgcgttcgtcttgcagggaagttgcacaagacctcatcaaggtcgacaccttgacatcttatgggaatgacagacgactttagaacatttgtttggagccctgacacttcactgaaattggcaagaatatcagcaagcgagctatgtcgtccgcatgatagtttgttttcccctaaattttgctaagtgtccttccattgcaaggtcaaggatttttttttgcagtgggtcttgacaaatagcaggggtgaaagcggatcgccttggcgtaatcccctgccgtgattgatagacgcaatggggatgccatttaacgatgcgagaagatgatgttgatagtagagcagccatccactctctccattttgatgggaagccaagcttgctcattagggtgagtaggtactcccaacaaactgagtcaaatgcctttgttatgtctagcttaaaaaatagggctgggtttttgatatgtggaaatgacgtacaacatatcatacccacataaagttgttatagatgcttctttttttaatgaaggcactctagctcttggaaatcagactattcatgtgaggcgctagatacattgctaagacctttgaaataatcttcgcgaaggagtgtattaggcttatgggcctaaagtccgagaccaattttgccccatacttttgtggaattagcatcacatttgctatgttgagtatagataaactgaagtaatactcgatgtatgtgtcatagatttattgtgatgggtgaaaagttttggacgaggaaactaaacaaggtctaaatctacatgaaccaagaccatataagcatcttcagatgcaggtccccattttctctgaccttccgaatatcaaatggactctgacctctgacctcagtgccatatcctagatctctcataaatccaaagcctcaaacaactcccagattcaattaagtacctgacttggtcggtgctgtaccatgttgccacgtgtgctcgtcccctttctccatcaaatcgagacaacagcaagcgaacctccaatagcgccacgccaagtgtcctctatccctgtcacactactgtgcttccatagagtatttatttcctatatatattaaacctcagcttccccttaaccgaaacaccacccaaacccaagcaagcaagacacatttggctccgtcacactcactcactcatctgtccgtccatcatcatctctagctagcttccagtgaaagctgcaagcgacagcacaaccagctgagaagaagtttgtagaagatgggcaagctctggacgatcctcactcacctccactcccttgcagggtatgaagtgcagttcatcttgacttgtttttttggtataataatgttgtgcttctgttttcagcttcttgttaattaattcaattatgatggagtgtgaaatccatttgctgtttgttgtttgttcctgcaggccaacggtgatgctcttgtaccccttgtacgcgtcggtgcaagcgatggagagcccgtccaagctagacgacgagcagtggctggcctactggatcctctactccttcatcacgctcatggagatggtcctcgagtccctcatctactggtaattaatcactttactgactgattaatcttcttgtaaggacttaaactgaagattttgtgtcaaatggactctgtttgcttgtttcaggatcccgatttggtacgagctgaagctgctgttcatcgcgtggctggcgctccccaacttcaggggcgccgcgttcatctacgacaagttcgtgcgggagcagctccggaagcacggcctcaccaccgccgccggctccggcagcaagaaggacgacggcaagtcttcgtcgtcgccgtcgtccaaggataaggacaagcccaagagcaagttcctcgctttcgtcacacccaagaaggtgagctcctcaacagcagattcagctctcgccataccttcacatcacgaattctttttgaagtatttcctttctttgactgaagatttcatcggtgtgttctgtctgaatgtttcaggatcatgaagcttactgaagcagggtgcagtgaacccatccccgtagtgtgtactccactagatttctgttgtgtgtgttcttgttcttctcttgaaatagagctgttcgatgtgtgtatgaacatcctgtatttgtgaacatcaactttaacatggaatgaagacatgacgacctttcggtgttgatgatgtgaatgtgtgaactttatgtcaatatgcagtgttctgggacagatttttccctctgaacaatttatctgctttctttctctctgaaaacggcccgtttctgttgtgcaaatctgaacagagagtcattagaacaacgtcaccttatagtctcttcggagacagtaaggccttgtttagttcaaaacttttcggttttggtttctggaacggtagcactttcgtttttatttaacaaacattatccaatcatgcagtattaggcttaaaaattcatctcgtgatttacaggtaaactgtgtaattagtttttattttcgtctatatt

SEQ ID NO: 4613 - DNA, 3248 bp, Sorghum bicolor
gttattttttagcgacactagggaggcatttttttttcctcttttcatgtatctaaatggggccttcaaattaattcttctaagacacattagagaaaggataaatcttcaaaattcataaatcagcaagatagactccaatcagtaatgataataatagccattggatataatttattttctaaatattacatatttttgcattaggaaaaacaatataaagtaaacttgaaatttacatcaaaattacatatcccgctccaccattataaaacataatccaaagtaaccttttaatttttataaattacaaatgtgccattgtgatacataaccttagtaacccctttaatgcatctaattgatatttttgcattgttaacatgtaaactaaaatattcagaatttgcatctaaattacaaatgtaaggtattatgaaatgtttaaataaccataagttattcattatatgagtttctaaattaaagtacccacttatatcaatattaatatataagaaacaaacttaatagcacatgttccatcctgcataaatgagcaataaaagtatatttgtatatgttttggcaaacattccttaacgacacatatatgaaaattatactagctagaacttcatttgtagttgtgttaatatccatgaccataatttatgcaatttgtcttttcaatatacaaataaatttatatatttttgcagagatagatatgatatatctttattgatagtataatgtaaggactactatttttataaaatatactactgcacatatagtgttttatatatataaataatctatttgttgaaaggtgcaggatgtcacaccttggttttcagttttattttagaataaacattatttttaggtttacatattaaaaacttcttcaggttagcattgttattggtcgttcctagaactcactttaagctcactaccatcttgagagacttgatgcagacttaatgaccttttataccagtgtagtaataaataagagtgcagtttatgacctaatattctcattgtaaataaatacaaaatgatagccttaaattaaaaagtttatttggcataagagtttgaacttaattaatggaaaaaaaaatctaccaactaataactataagctaaagttccaatgttcaagacacatgtaagtgccacgtagaatagaaaaactatgtatatggaggtaaaaaattgtgaagtaactaataatgtcatcacaatcggatatatatagcgtccatagagcatctacacaggtattactactgggtaacaatttatctacttttgggtactaacaaatctaatactgatgttctttaagataacactgtagcccgtgcaaaagcacatatttggtgcactagttcaaccaaattatattactaaatatgttttgtttgtcctcgtatgaaatactactacaattggggttgttacaaaaaaatgatgatcatatactacaaaaagaatgacctaataactttgtagaaagtgcaaattattaatgtatacttaacctatgcacgtccataccttccaatgatcaagttaccttagagtactgctggtatttttaatatccctcatgacaaaattacttttatccaaaagtgagctgcaagtaaggtactaaacatcatgcatgtctcattttccgtttgaagcttttgctgtttccaatggcatatatccatggacgtccttagctgttaaggaaaggagttgaagtcatttctatatgtaactagatataacttcaaatacaggtgtacggactactctcttcgaatctgtagatccttgtcgccgtctataaaatagaacgttgctgcgttcgtagtcccatcctcaaaaacaacaaatagctagagtcgctagagatatcatcgagactcacactcacccatacaaagtaagcagaagacggctactggcctcctaaaggaagagcaagaaacatggccacttgccaccagcttcagccgatcctcactattgtggtcttcaccatctttgtgataggtacggtaactcccacagttgatttgaacaagcgtgttgtgtttgtagttccatacttgcagagtaactctacctgatgaactacatatgtaatctagaatgattacctacattccagaaattttacacatgaaggccttgtttggatgttgttggattcactttaatccatgtgtgttggtgtggattggggtggaatttagtttaagttccattccaatccaccttaacacatgcggattgatatgaatcagacaacatccaaacaagacggaaaagattgtttcttcatatttatatatacccacatacagtagactccacatacattgtatataacaaatacatgcatgatcaggagcaaatggcgagcgatgcaacacgtcaagcatccaggtggacaccatcaacaccggcacgatagtgcccggcggcgacaccatcttcgtggtggaggtgaagaaccagtgtccatgcgccgtcaggaacgtgcgcctcgacggcatgggcttcgcgaccacagtggacgtggatccggcggcgttccgcgccgacgacggtggcgtctacctggtgaacggcggccagccaatcgccagtatggccaccgtcagcttccagtatgcctgggaccatttcttccagatgcctccaaggagcttggaggtcgacggcccgtgctagctacgaggaggacgaagcatgcatggtgcccctcgctatcctataaaaactgaacatgtgtttcgctgctggtgttttgttctggtgtccagcttaaatatgtattgtcttccttcatcgtacagtgttctagtggactaagtatagtttttatttcagtatgttgagagacaaagagagatgtcggtgagttctagagagagagagacagagatgcaaggtgctgttcgacgaagcttggtatgtttggtacatgtaaactggaggtgtgacgatgatactactactaatatatatgcgacaaacttcagtgagtttgggacatagaaattttgtctaatatgctgttaaattcatgagtcttgcaaaatttaaagactgataaggtttacagtatggatggaaggggaatcacctgaaatattgaattttgtaacaatgtataatagaagtgaatttttttactctatgatgaaatatatttagaagttctaaagcac

SEQ ID NO: 4614 - DNA, 7566 bp, Sorghum bicolor
gcattggctcccgtaaggccttggccaagttctagtggagttgcacgtaggatgtcgttgtaggcctagcgtccttgtgctctgttttgctcctagagttgctgacaaagttgcctattttcctccaccagcgcatattgttgccgagcaatcaatcttgagcctcatggctagtttcatagagaacctgataggcaatgttgatgttgccacaaggagattgatcttggctacacctcttattttccacttgatgggtgtttgtgattgggagtgttcatgtagaattcgtgtagatgcgagaggccaccatcatcgtccttctcctcctctgacttggtatgctcaaggagttggtcgtagttgttaaggaaccaaaagaactcggcagggttgatgaggtcggatggatcgatcctgagattgtagcatcgatatcagcatcgtctgacccttcctactcagtgcctctctcactgagtttgtagataaccaccttgatgcatcgaggttcaacatcatcgtcactgcatgactagtcaggttgatatgaatcatgatcttcagactccttggttcgaagtttggtgggtaccaacatggctagtcgaagccaactcgaatgtatcactaacacattccttagcctggtaggaaaaccatgaaggacacgttccttagcagtgatggatctgcctcagggccaagtctagatccttctggacctagaaagtcatgtcgagctcgtgctcttgactagcttcagtgaagatgtcgtggacgtagtagcttaggtggctggcgagagcaagtggcccttcgtccatagcttcctccagtccatcgacaaattcacggaccaggagtggctactcctctacgagcgattctagttccttgaggcacaggttctcgagttgatcggcaatgaagtcctggctatcgaaggtgattttcccacccgactacatcttctccgtgtcatcgccaatcttgaatatgaggcccatctgaaacacaatgaatctatacataaaaggccactacctggcgcgccaactattggaagaattagctccagcaatacatagcagcatattcaattcacatatagagaatcaaatgagtaccacacaagacatagagattatatttgtttaggcacgtggtgccctacgtctaattttaagtatcttctctctgtattcgttagttacaggagttgttgcgtgttgctatacgctagaatgtagaagatgaaatccgattgggatccccatacccctcctaatacaatccggagtagggttaccatagatccgatcggttagtagaaatgttttctagtttgttacacgaaaagcgcaacagaataattatattctaacgtttagatatgatggtgtcgatatccttagaatatcttgatctccaggcccgtggattctcgtggactatgtgggccttatttctcgttgtcttcgacctagtagaaagacatggatcgggtaaacggacggtgaaactatcttgaacccatatatgtgacatagttatatctaataaatcaaaatatcatataatttagaacgaagagagtacatacttagtcaatactgcagcacttgtccgatcaaccagtaagttcaaacactgaaatttgaaacctgctggtaataactaaaccggcatgtttttccctgacaaaacccactatgcaacgaacgatgtacagagaaaaggatttagactgagggacaatctgcaggatgcatagtaattgcaagaacgatgttcttcaatgacttgctggttatttactaggcacaaatctaatgggaacgacaacaaaagaaaaaaagaacagtttcagaaagaagagggcgaaacatgaacagtgcttcaccacctaaaatcctcacgcccgcatcttcagccacaacccacaagcgcgcgatatccacccatctacccaccaccttttcccgctcaaagaaaccatgtcaatggcggccgccgccgccgccgcggcatcatccacgctgctgcgggcaagcaacatctctgtcgcgcgccccgtcccagtcgccgccggtcagcagctggtcccaagcggcgttgcctgctgcatccgcaccgtgagtgggcgcagagctgcggccgtgcgcgcggcagcggcaggcgatgggaccgccccggccggtgcccttccggcggcgctgttgttcgattgcgacggtgtgctggtggacaccgagaaggacggccaccgcatctccttcaacgaaaccttcgccgaggtccggttccttccatcgatactctcgttaatttatctccattttcctgatgcggctgcacctccgacgttgatcttttctgtggtttctatgctcctagttatttaaacagatggctcacggaccattctttgttttcttctgacaaatttgtcctgcagcgcagttgaccactaatgactgattgagaccatgcctttggaataatatgcatttcatgaaattttgaaataatggtatatttatattcgtataatatatgggacttgggtccatcttgtttcaacaatgcagggttcaggttaattagtcttacctggttcaggttaattagtcttacctgctacggttggaagctgacaatagcattaatgctgtgaagctaattttgtttaactaaaaaagcaggaggtttttaacgcaaaaaaggttttttttccccttaataaaaaaacaggggtttccccttaccggctagaattatatataatgaaaaagagaggtttattacagacataagcagagaaaaaccagaaaaagattaacaaaacccctatagccggtgttcagttaaagggaagtattctttcagttttgccactgggcacttgcagcgaaccacaaaattaagcctatatgtgggttcacgggctacctcgcttgcatccctcatggaagacaggcttggcttatcgaggacattttatagtaaattgcccttagcctaagcaatctgtgcatttaagaaatgcattacgtggaggaaccccttgcctttatgtattttcttcacgcacttgcctcgggccatgttagataatgtatagttggattctttagttaaaaaaacatcattttgcacaagtcattgagacaatacataattaaaatggtgaatggcataaataagtggcaattgtttgcactttgatcggcctgcttggattgatgtatcctgcatcaaaacttaaacatggatatgatcaaaaagctttatattgattgatgatgtggtttagtgagaaggcttagtctgtaactctgtactcgatattaaagggtaaaaggattaatggacgttcttgtggataattgattaaatctaagagatgcctacaggaaacaggaattaaatctaagagatgctattaaaagaagaactaaatttactgattcttgttctttcaatgtgtgtgtgatcaactatgttgatatttacagaaggaattaggtgtgagctgggatgttgaactgtatggagaattgctcaagataggcggtggaaaggaaaggttagtcttttatttactcttctcatatttttctcatttagcttttcaaattatcttagtgtccacggaagcatttacattaaatgtcagactaagaaattacggagatagcactttactttggtttttaacatttcttcgcatcttatttatcacctataagaagcatgatctagtaagaagaaagaactctaactacttctaaatttgaatggaaaaatcataaacataaactctctgcatgagacacatatccaattgaaaataattattatatattaatcattgatcttttattcaattataagtatttgttttcaggatgacagcttacttcaaccagacaggatggccagctaaagcaccaaagactgatgagcaaagaaaggagttcattgcttctcttcacaagaggaaaacagaactattcatggccctaattgagaaaaagttgcttcctctgcgtccaggtgttcaaaggtcaatatttccaacaatttgttggccttacaatttaactatagtttaaatgaacctataagttgtgacattcataaatatttcttgctgcttgaacacaagtgatttgaaatgctgtcatacaacatagtgggggaattaaaatatttgtcactcgtaacaacaaaatgatagtctttatgtcaaatactttttaaatttcgtgtagtaacatgcagcactatgccaagagatacttattgaaatttctttttttcttctaacactagaaatcatgttcctctaccaccttataaaattcaaacttaaaactcaaagtgtacagtaaaactagtcttactaggggatagattgaacaaactgaaatactttggagtaaatggaactgaaatgtttttgggatcaagcacacaaagtggactttcggttattttttttttatcttactttgttttcaactatgagtgatcgtgaccaaaagaatatgaaagttaaaactctatggtatggtcaaggcattcatactttgggaaactttatttctcccttcaatgatttacaacctaattacactttcaatctataagggcaaaagtataagaaatgaggtgaaacacagtgaaattgcgaacttaaaaacttcatgtcttttgctgaagctcatggtacatgcactagaaaaacacgcaatggaatccaaatctgaaccagctagcttcatgagaacaaaagctaaaactattaagctagtcaaatagctgctagattaatttttaactttacaggttaattgatgaggctttaggaaaggcagttaaagttgcagtgtgcagtacatcaaatgagaaagctgtaagtaattatgcattttccacctgcaagtgcttttactagctatatgcagttagagttcctatagctatttccacatctggaacaacagtttctgtcaacttttgtcatgcagaaaactattggttggtgaaatgtttgaagttatgacaaattaatttgatcagttagcaggacacctaactgaaataacaaaattcaaacaatgaaaggggaagtgttgaaacttagctgatgttttcaacccagtacttctcattctagatccttacctttccttggcattagatctgtaaatttccatatatcatccctagttagcaaaagccttttgccaatttcacggttcaaatgaaatattttctctaataatattcatttttccctgcgatatataaaaataagttgctttttctaacttgaatgttaaaaggttaagaaaataaataagctgtctagtataaatttagccgcattataagatgtcattatcatttgtaccatccaagatttactatttgtcagttattttaggtcaccagaccaagatttacattctcttaacatccaatcaccgatgattaagaaacatattttatgcaattaaagcagggaaaattatagctattcttttcctgattacaggtttcagcaatagtgtcatacttattggggcctgatagagctgaaaggattaccatatttgctggagatgtggttcctcgcaaaaaacctgacccagtaagttgatttcacagtttaatgaactctaagcattagtccatatttccctgttgagttattttcttgaaataatattttgcaaaatgtaaataaactatgataatttcttgtgacttaggcttggtgccaccaaagggtccttgatatggtaccacattacactattcctgtggcagcccaagattagttatatttgtttatgacaaaaatataaccttttctcatgtagctatttacctaacataaaatttgtgtattacacttgggtaaaatcctttatctatgtgtgtttttttatggttcttttcaggcaatctacatattagcagcaactacacttggagttgatccacaaaggtactgaataatacgtttggaacattttttgtacaaattatatctattactttcacaaatatcattgcaaggaataatgtggttaactttttagcgttgctagctttgctatttttaagcagcttataattaacttggtttagttaggatactagcgcaaactgcattattctttgtcaacatacttctacacttttaaatttactcgatctatcattgcactcaacatgaaagtagatgttaggatgtttccataacccttgatatcttttttttcctaatcatgcttcttttatgtccagctgtgttgttgttgaagacagtactatagggcttgcagcggcaaaagctgccggcatgaagtgtatcgtaacaaaaagcgggtacaaattttcttcttcgaaacactttcaataagcatagtttataacttgacaacaattggtagacctttctaataaaggtgttaatctgactagtatatgagatgaaatgccaaattcgcgtagcctttgtgtagtatacacaatatgctatactagagttgtaatcaacataatttcgtgcacgcaatgtgttgcacattagatatctaacctgatggatgtgtagtgttttttgctcgatatttgaatcaatattatccacatgtcagtttatttatcaaatcttaaattcttaaatttttctgtttcagaaaaaaagtcttatatttatctaaattataattttattttacttctgtgttacgataattttaggacacatgttgttgattgttcaggttacagttttgatgctcattttgtaatcagatgtaccataaatatgtttttcagctacactgcagaagaggactttgagacagcggacgctgtgttcgattgcattggtgatccaccagaagtgcgcttcgatttggatttctgtgccaacttgctccagaaacaatatgtaagctgaaagagagcaaatgaagtgatgtaaaggaattcaaatgtaaaaagtaagaaaataagtcctacaagtaattgttcagtgatgagccgaccggacttagtttttgttcattccaaaagttgcccctgctgtgcatagtgaatccactccttgctgctcttgtttggataaatggacaggcaactaaacatgtttgttgattggctttgcctgccgttgtcgatgggcgcctcggcgctcgttatcgatgagcatagcacggactagttgcgcttgtggaattattgccataacccataatgctcttttttaattaatgtgtagtagttattatgatttgattgtgacaagagaattttcatttctgtaatagctcaatagtatgactgtagtgtatctggtttcggaattgcgctttttgttagcggtaggttcctgatgttggggaacctgtgcttctttctgttgctgtaaaatcatcattcctggcagatcgcctgcatgccagatcgctacactattactactactactgggacatcacgaggaagcaggccagtgaagacacgagcaaaatctgc

SEQ ID NO: 4615 - DNA, 4236 bp, Sorghum bicolor
aaaacctcgacgaatttgcttgggaagacgctttcttgaatcaatccaccaagacatgacatcctgatcctggacgacagagacctgctgcaggcggaatctaccaaggcaggcagcccatacctctcggctaaagacgcagcctaagatgatatggtccatcgtctccgccaattggtcacacatgatgcacagattatcttcctggaggccatggcgccaccttctgtctgccgtccagcacttcttgtgcaagacaagccaaaagaacagcttaacacgcggaggcgctgaggttttccaaatctgagttgctcccaagggtctagttttacagaggcaatggcaattgttcttgtcctaaagtttagttcgcaaggtcgctgtgactcgaacagttcctgagctggaccagcgttgtgtgttggaaatactttgatgttgtattgggcaagcctgcttgtaacctgtttaagaactgaacatcaagattgcattttgcatttgccatttgaaccctggtacctgtgcacatcaaaatctgaggttttgttaccatttgctgttgctattccggttattgttactggtgcaggaaaaattggaaaaacgaattacaaaagttttgtaccgagttgttattgacggtggctttgtcatctctgcgcttccatgcattttcccattgtttcagttttctgctttatttaagcatctgtgccttatgtatccctccactgtttgaccgtgtatttttctaaaatattcagtacaaattgaaccgttatactatatgtttgtcatcacagcgatcagctcgagtttttgtctacagcatgaacggctgaggaaaaaatggcagctggagtagtactgtgtctctatcttcgcgtcctagtttgtgcaacttgtttttttgggtacgtgttcaagacatacaatcgccaattcatgatgacgcacagaacttaggatagttttgtgatggctgaggatatactgccaaagtttgctctggattttattttatttcatttcattttgagattacagcaggggttaacgttcatcaaacctagtagcaggttagcacttgtttcccaagtccctgtgcactgttagaggtttactactgttagaagtttactctttctagtgatatatttttgtaggaacattcggtagagtgacatttaaatgtgcgtcattcaataggatgagaataagttaaatatgcctctcacgactcatatagaatttatctttttacatctttggtgggggtacaattacataaatgaaacgagttaattgtcacttctgttcgctggtctgaaaaaacacggctgaaactgtttgttgattattgtgagagaaaaaaactgttgtcttataaacccttttctgtcaaccaacaatgtttttctctcaggcaaaggactttttacagtcctgaaaccaaattggaggatgataagaagtgttgtttttataacaacaataaaaccatcaaatgtttgttttttgagtgtcattagcatgatttgtttggatgctcgcaaaaaaaaagcatgatttgtttggaggatttttcatcagcttttggcttgcagccgccaacaaatatagcccttttttccaaacattattagagcaactcctacagctggccaaatgcatctgtgaagctattatagctattgtggcccaaaaaatgctttccaacagcctttccatccggtcttctatttttccccactggctattccgcaatcgtcgctggccaattttcgcgagccagagctgcttgctatccgcggcgccaatcgattcccgcgcgcgggcttcgcctctcccgcgcttgccgcgcgccggcctgtccctttcccgcgtgtgccccttctcgtgctcatcttctgcttcagatcagggtgttctgttttcatctcatctctccacgacgcggatcctcgaggtcctcgaaatcgtgcagaggcaccatgtcgcaagcacaatcagaagcggatctgatgtgtgcgagccatggccatggggagcccaattcgtctgagctccagtcgttccccatattctcggcggccacctgttgggagcaacagcagtttccttcgctgccttggttgcaaaattcagggatacctaggctgcggcatggagttcttcctcccaatgcttcatctgctgcatcagcccccttgtctgacatgtattccggtaagatccaaatagctagatctatttttttttcaatgatcaggccaaccgaaatatatgcctgtgagattagatgcagtttgttaactatttattgcaagtgacttgtgaatgaaagcattcttggcaatatgttctgtatataactcagatttggtgtgctcttaatcatgaaagcattcgtgttactttcagatagtacagtttgactagttgcagtaaagtgaaggttcgtgcatattacaaatttatttattgaactacggtttgtgtattccagtaagtaatttttttgtgtgtcagtctgatttgctatcatagtagattttaattccattgtacctacttcttgaaatcatatttcagactttcagtatatgatcttgattgtccatgtgtttttttttcttcacaggcgccatggattcagaaagatcttttactgacataattacaaggggatgtaatcctgctgccttgtctgaaaatgtcccagctcctaatgaaatgccagcatgtgttgaggtcccagcaagtgtgaaagcaaatccgaaaagatccaaaaatttcagtaaagaggaggacaaattgttggtctcagcatggctaaatgtgagtttggatccagtgcatggagttgatcaatcacgttcgacttattggaaaagaatatatgaattttttcataccaacaagacatttgagtctgatcgaactcaaagctccctaatgagccgatggtcaggtattcaacatgattgcaactcatatgctggttgtgtttcaaagatagagactagaaatcagagtggcgtatctattgctgataaggttagataatataccttgctcttccaattgtatatgatgtttctctatgtcatgcagcctctgtgtgtttgaattgtaggaaaaaaatgcattaagaatattcaagtccgaggacaagcatcatcgagatttcccgtacatccattgctgggaaaaattgaaagaccaggccaaatggaagaataggaacaatcagagtggaacggctgcaagaaaaaagcaaaagacgacggcgaattcaagtcctgcagtggctgcacaattagctctcactactaatggtgaagatagtcaggctgcaatgcctacagtgcatagacctgcagggaagaagaaggagatcgacaaattacgacagcgttccagcatcgaagcattggattatctattggcaaagaagaaagaggctgatatagagaaggatttgaagaaagaggagaggtgcaaaaaagccttcgcattgcaggaagaaaggatcagaatcgattcagaaaggatcagaatcgaggaagaaaggatcagacttgagaaagccaaatttgagtttgagaggaacctcgaagaaaagagaattatcaatgtcgatacaagtaccatgtccaataaacaacagctattatatgaagacctcaagaatgacatacttgcacggcgtactatcaaaaattagatagaacatcagtttatgcagtgatacacattttatgttttgttaaatatttgaatttcttgcatagatacagtatcatggtgtgttggttctatacatctggattatcagattttattggatatagtatcacatttacatacgagtggttgtattcacaagtggccttcacacaaatatgccaatctgaaatgtaaaaaagccaacaaccaagcacattatcttttttattaaacacagtcaccatcatgtaggaaacaataagagtatagcatcattacagtccaacgacaaatgaaatcaatcatttatagtattagtgtataaatctggataattttgccataagtgctcaataagatcagcttgaagttgtgtgtgtgtttccttgtccttgatattcttgtaattttgaatgaaagcatctagctcaggtgtactctcatgggatactttttctcccatgtcgtcgtaattgaaatcgtcttcgtcaaccccct

SEQ ID NO: 4616 - DNA, 6398 bp, Sorghum bicolor
tatatttgagcatttggtgagtatgtttattgtttttttaaaagggcggtaaaagctttgtcgtgatttctattagatgaaggaaaaaagtaagtgccagcctagtttttttttgaatggaaactgagccagaaaaaccataactgaggggagtgtcgtactcaacccaaacaactctggaggaactaacacgactcacaccactacttgcagtgtggtcgaaaactactcaactaaactccgctattgaatgcttcggtgaacaacacagagccaactcaactcaactggcaactcagcttggtcgaaactcgacctaactagaacctgcacaacgaacaactagccgaaaaataacttagcaaagaaaaagagaacagagaagccaaacacccctagcggaaccttcaaaagcacgagcaggaccaggcaacaggaaggcagtagagcacaacaagaatgcctcatgatgtcttcaagaaagacacggcgcagaagacgctgacattgcaagaccgcaagggaaggttttcacctgcaaatccaagaatagacgggggaagaggtacaagaaggacgcctccaatgagaaagcaacgtccgcagacgccaccgtccgggctttcgctatgacctctcactcctgcgctaccactggcctccacgatagagacagtcacaaaggaaggcgtcagtgacgaacgcaggcgtcctcaccaacacccgacgccaccacgcataccgagcgtcctcacagcaagcgcaaccacatgatgatacccctgaccaatcacagtgatgggtcacgaagagccaggtggagctgcagaccaaccatccgagagaggagccagatgaagcatgctgaagaggtggcccatcgctggaacaagccgaagccggccagcagcaagccgaacaagggttgcggcaaggaagaaggggggatgaccagggaaagaagggggccaggtaagtcgaggtagaagctccagccaccttgcctgccaatccagcccctcggccacagtcgaccggcccccacgcggccccgtccgccaaactcgcccatccattttgtgccacgtcgaaaccctaggtgtgcctgcaccacctcctcgtcgccagagccggatctagcgagcggggagccagatccacccacaaggtggctggatctgggctgccagccaccaccatgaagagcacgacgacagcgcaggtcttaagtgggagaggaagaggggtggagaggaagggagacgcttggccgccgccatccttgccctccaccggagctccggcggcgagctccggcagtagccaagatgggaagggtggagggagggactcgagtgtggaggcgacggcgccgcccaagtcgtcctcaagggggagcaacgcaggggccgtatctaggaaaagaagttcctaagttgagtgtctttattgtcttcaacctattttttctcagcggaagctccaacacctcttgatccatcattagactatctagtgtaaaataaaagttgtcctgagtcaattttgagtgtcaaaataaggaaaagatgctcaagcgcaggtgtatgttcattgttcatctagaaatttacttgtgcacggcttgtatatttatctcaaatcgaaccatgactatatgtgacgcatgatatgacgattagcgtaccttgatgctttcatatgattgtaccgaacgatattttgatcgattgaaatatacgcgccagcgaatatcgaccccatgatatggtcaaagattccacaaactagacaacaattcgtgcaacgacataacatctttttcgtcatcagtatctttcgttccatttcacaagtagccaacgtttccgtagcccactggattatatatatctcactactgatcgatgagacgaaaacgtctctatatatctcactcagctcaatcactgccaacatccatggcgtctcatcacgcgaatgcggtataccaattattcatggatgcgacaaccacacctctagcaccatggcaatggctactcttgctcgtcgtcgcttgcgtgctgctgctgctcacctcctcccgccgtcgtcccctccgccgcagcagcaacgacaaggccaggcggcagctcccgccgtcccctccgggggcgcttcccatcatcggccacctgctcctcgtcggcgaccgcccgcacgtctccttccgtgacctcgccgccaagcacgacgaccgcgggctcatgctcgtccgcctcggcaccgtcccgaacctcgtggtgtcctctgcgcgcgcggcggaggcgatcctgcggacgcacgaccacgtcttcgcctcgcggccggcgtccgcgctcttcgacgacctcgtgtacgggtcctccaacgtcgccttcgccccctacggcgagcactggcggcaggtcaggaagctcgtcaccgcccacctgctcaccgtcaagaaggtcaactcctaccaccatgcccgccaggaagaggtaccaatcactgttcaaacgttattggtggatttctcttccatctaacatagagcctccatctacgccgacgacctcgtcatcttcctcgcgccgaacacggtggatttctcctgcgtcgcacaaattctcgaactgtttgcggcgtctctggccttgcaacaaatgtcgacaaatgcgccatctcaccgattcgatgctagcaggaggagatcgatgctgtcctgcaggtttttccttgcaagctacaagctttcatgtccaagtacctcggcgcgctgctatacctctccaggctgccccgcagctgtgagcaggcaattgtggacagcgtcgcagcaaggctacctacctggaaggcaggactgctcacggcgacagggagaaccacgctcacgcagacgaccctatccgccatccctgtgcacgtctcgatttgctgcgccctatcagcctgggcaatccaggccaggcgatcgacaagcgacaacatggcttcctctgggccggaactgactcggcggtcggaggaaaatgcaaagtggcgtggcaggtggtttgctcgccccgggacttaggcggcctgggcctgccggacctacgagtactcggtttcgcgcttcgcctccgctgggagtggatgcgccgcaccgaaccggactcgccatgggcgtcgttactggtgcgcgacgaacggatggtccaacggatgttccacgcatcggtgcagttcgtcgtaggcaacggggcgtcggtcaggttctggatggacgtctggcacccggccgaccccatctactgcttcgccccggccgtgttccgcgcggtgcctgccaggcggcgtgcacgctcgatcagggacgccatcgccgaccaccaatgggctagagacgcatcggccgcctccacgacggagtttatcgcccagttcttgacaatctggcatatgcttagtaccgtacacctacaaccctcagtacaagaccagctgttgtggaaatggacggcgaatggacactactccagcgcctcagcatacagggcattcttcatagggcgaacgccgttctacggagccaaagacgtctgggcggcctcgacaccgcccaaggccaagttcttcttttggctggccctccacggacgtctttggacagccgaacgaagacgatgtcatagactacaggcggttgatgactgcgcgctgtgcgatcagcagccggagacggccgaccacttcctggtggcatgtgtgttcgcgagggaggtccggcaacgccttctatccgccatcggcctcgatcaccttctcccgtctggtgtttcaaggctggtgggctggtggcaggacagccgcgccctcctacctcagcacctcagacgaggcttcgactcgctcgtagtactcgtctcttggacactctggaaggaacggaacgccagaacctttgacaacaccagttgcacgcctactcagactgttgcgaaggtcaaagaggagccgaacgcctggctcgctgcaggtttccgcggtctagccaccttcggcgcactgctctagtttgcgcccggacgttacgtgtagcaaagcagttttagaacaggtttcctgctttcagcagcgccgtttgagccggcacctcgccgtggaacgctaacctgtggtttttcctccaccttctcttaatgaaacatgtgcaacgcacgatttcgatatatatatatacacacggtagcggaatattattctacaccctaggtgtagaatattattctacaccgtaagttaagtagaaaaaatactgagcagtactggagagtattcagtatcaacttgttcaacactcagaaccacgaaatagtgaacaatactgaaacacgaatactgaacgatactgaattttgctcacagtttggtgtagaatagtattctacacctagggtgtagaatagcacatatatatatatatatatatatatatatatatatatatatatatatatatatatatatatatatatatatatatatatatatatatatatatatatatcacacacacacactcacacactcaaatataacaggtgtgtctagtgctggataagctccgggaagcagcgaccatggacgcggaggtggatctcagtgagatgatgaacgcgttcgccaacgacatcatctgccgtgctgtgtgtggcaagttctccagggaagaaggccggaacaggctcttccgcgagctgaatcacaccaccactcttctggtggcaggattcgatttggaaagctacttcccagggcttgcgagatcgctaggtcgtttgttcgtgagcaacaggaaggtgcagcaggcacacagaagatgggacgacttgcttgaggagatcataagcgaccacgagaggcggcggcgaacctccaagaacggacatggtgagagcggcgatgatgagcaagatcagagcacagcagacttcactgatgtgatgctctctgttcagcgggagtacggtatcaccagagatcacatcaaggccatcttgatggtgagtgagaatgatcgactacccagctacaatattttttttttcaattgagatctatcctaattaaacgacgcatgtatctataggacatgttcgaggcaggcacggccacatcatcttcggtcttggaagccgccatggcggagctgatgcgcagccctcatctcatggccaagctacaagccgaggtgaggaagaagacaccaatgggacaagaaatggtcagggaagaggacctatccggcatgccctatctgagagccgtggtaaaggagacgctaagggtacacccacctgtcccgctcctcgtgcctcaccaatccatggcggactgcgacgtcgacggctacacgatccctgccggaacgagggtcatcatcaacgcgtgggctatctctagagacccaaggtcatgggggaagccggaggagtttgtgccggagagattcatggacggcggtgccgccgcggacgtggatttcaggggaaatgacttccagttcacgccgttcggggccggccggaggatgtgccctggtatcaactttgggttggctacgatctacatcatgttggccaacctcgtgtattgttttgattggaagctgccggccggcgtggagaaggaggatattgatatgatggaggtgtttggattgacggtccaccggaaagacaagctcgttcttgtccccagaccacatgtataatactatatattgcaaacgccatgcgattggtgatggaaatttaactatcacatgtttcaccatatatatgaggccgtggcattgattagttgaagtttatgcagaataccacaaattgcgtgggactacaggccctttcagatgacagttattgcatatatttcatattagaattatcattcattcagtgcaatttttatagacgtaatctacaatttttggtaccgagaataaaaaatcaattaggaaaaaccacaagcttaacaaaatctgatttgtgttggtagaaagacagttaacaatttatgactatttctataggaagacaaggacaaaatttaatatgttgcaaagataaagaataaatcacaaaagtaacaatttacttgtgctagctagttgatggcacaaaagtgttatctgaaatcatattaaaattcaggcacctgaaatattggagaagtgtaatacaatgtgcctcaacaaaaatcgcctaaatcactaccggagagccggcctttgccgtgtgtccacccgtttgccgtgagcaacacacggcaaaggtcgagtttgccgtgtgtctaatcaaagcacacggcaaacgctaggcacacggtatatctgtcctctgccg

SEQ ID NO: 4617 - DNA, 3172 bp, Sorghum bicolor
attaatcttgatgtaggaactatgaaattcatgcataaagtcatgtaaaacaagtttcatgcataaagtcatgtaaaacaaatttcatgcataaattcatgtaaaacaaatttatatatgaagttggctgtatgccaacaaatgccgtaaaccttttaagcttagatacaagatacaataccttaggtgatgatatgggaatcatgtatgctagattctgcctttgttcacctgttcatctcaactgaaggctattttgccatacaaagccggctgacatggtcgtcagaaaccatcttcttgaggatgtaaaacatttatttgggtgttgctcatatattgagacaggctatagagttgtacacatccagacaacttaaaccagtcaccacattttagatgcctatgtggtcctgggacaactgtaaaatgttcaattcagaagatatcattacttacaccaaacttagtcatggatgaatggcaacagccacagtaatatagtatttaatttagcccatgaaaattaccctgtactgatatttctatcgaaaaggttttatgttattattactcagaatgtttctctcttcctgttttgcttgtattcatagaatggtaattgttggtctgtttattctgtctaacattctttgctaataaatattattatgaatttccccagggcaattttcagatacttcacttcagcaatggaatggctacagaggaacaagtacttccatgttgttgttaaaggggttgagcgggatggctggaaatttgtattacttgctaggttctctcctttgccttcctacatcatcaactacgctctatccgccacggatgttggatttttcagagattttctcctccccacagttatcggctgcttaccaatgatactacagaatgtgtccattgtaagccttgccggtgcagcagtggcctcgaccacaggatcaaataagtcccatgtatactcatacctgtttccagcgataggcattgtgtccagtgttctcatctcatggaggattaagcagtattcctctgcccttgctattcctgaagagatgaaaagttcacctactaatggaaattccaatggcgatgctaagctggcttcggcagcatccaaaaatactagctctgggaaaactaggaagagaaggtgactctttttttaaaaaagtaacagcaggaactctgccattcattaaggggataaagaggagttatatatacagagtgggccaaaaaaaaggcaagcaaacacacagccaaactgtggagcaaactgtacacagggggcttcagtccggcagtagagcctaatgactaggtgttgtgaaaggccttctatattgcactagatcaagtatccccctttactcactatgtactacattgtgataccgaataccaagcagatacagttgatgctagtcaaatatttggatttccacattggtttatcactactgtaagctatcttgtctgttacatgccatcagttttttttggggcatttaacaggtgctcactttaccttgtttgtcattgtgcttgtcttctggctgataatatcataaattaaatgtgacagaagctcacatgttgtacacccgtagtgatctggtggtttagatttctctcgtcctgagttatattgtgtcctgggaatcgatattgattttcctgccaaattatatcaaattcgatatgtgcaccatgagatccaaccagattatgttttttttttgggataacaattgaattcaaaatagtgtttgcttttctgtggtggtacagctcgtgacatcatcaatacgcagttgtatgtactctttgcccacaatccaaagcaaataatgcagtgaactccaagaatcttatacagtatctacaaactttggttgcactcctttcccatctcattacttaacccatgttctgctcctccattctcgtatcaaaaaaaaaaacttcaagagatgaagatcttcactcacttgtgttcctacattcttcttctagtagtcttcaatgttccaaaaggcctatcagataatcctcctctgcaggatgtatgccccatggctccccagggtgagcggaagctgttcatgaatggtttcctctgcaagcatcccagcaccatcctggcctctgacttcaagacactgctgctgaaccatgccggagacctggacaacatagtccggtcatcggtgaacgtggtcactgctaccgagttcccaggcctgaacaccctgggcctgtcgatggcgcgcaccgacatcgcccccaatggggtagtgctcccccattctcacccgagggcgtcggagatgatgttcgtccatggtggcagtgtggtggtcggcttcttggataccaagggcaggctgttccagaagagccttggcgagggggaggtgttcgtcttcccccgtggcttggttcactacatcatgaactatggttttagccatgcgacaacgttttcggtgctgaacagtcagaaccctggcgtggttggcattgtccatgcaatgtttgcaacagattcagatgtagttgaggggctaatggccagaatgtttaagtttggagagatgggagtgagtgataacattactgctgatttcccatgggcgctctgattaggaacaacatagtggttgcaattcaagatcaccgtctaaatgcctagtaatgaataatgtatgattgtggtgtatctgattaacttctgtaactgatgtagctaagtttgtagtctgaactacttgtaggagtaatcacaaattcacaatcatcccttatctctctttccaggattatttatgttattgcaatccctgctctccctttgttgcagtcctttgcaattctgctctctctctctctctctcacctttttttttgcttgcacaatcctatttctctttgcaatcttatgtcagtgatgattccctagtcgcgtcacgcaactgtagcttcagcatcaccaagtttgagtattccaaggacagcataaccttcctttgtcctttgctttactcagtggatctctacaccatttgttgtttagcattatctccaggctccaactccttgaaggtgagatctctttctttgaaggtggaatctctctcttttc

SEQ ID NO: 4618 - DNA, 3982 bp, Sorghum bicolor
catgcgctcgaacttggctttctctttatcactttcacattctctttgtgcatcacggatggcatcaccaaaagcatcatcgccccgatcatcttctgccgccacctcttcttcattatctccccccattgcaacatcattgaagccaccgtactaagcaataatcttggcatggtctaattcttcttcttcttcttcttcttcttcttcttcaccttcatccattataatcccgctccatgtttggtccaacaaatatagtttggtacgaaaccagactttaataagtgtgaatgaagagttcttgagttagaatattccatcaaattcttgcacacggcacatggacagcacatgaaaccgtccctcttatttgacttggccacacttaagaaatagtgcacgccattaatgaactcttcggagcgccgatcggcattatacatccaattacgtgttaccatctgcattaaatataacatatatattatgaaaaccatgcacacatatagtttctcatcttattgcacaatatgtctaagatacatagttgattaatttacgaaagcttggctacaacaaatacaatcgcaactagcactaaaaaaaccaaaactaaaatgcacttaagcaacataattagttcgcgtccgatcccaactataatagatagatcattcgcttgatcaacatcattgaactcctttcatcggctcactgcctcaccaccttcagcctcaaccacctgtgcaaaagatttcttaatgtgttcagtgtattcttcctctcagtaccaacctgtacatccgccggtaccgtcccactgaaattaaaagagagaatcaaaagtttcattaatatcatttaaaaaaatatgcacatatataagcaaatgtctggaaataactcacattacgatctggacacttgtagaatatacgacccttgtttactccctctttcgacactttgtactccatcaaaatcttctgcccacacttgccacaagtaatgagagggagttccggacggtatcgcttttgaacccgttgagagaccgaagacccggtcacggttgccatctactatccatactcaatttttaaacaattataaattctacatttactagtaaacatgtatgatacaatggacattatatgtattaataaaaataaatgaagtgatattaacaaaccaattaatttgaactatcctactttctaagatcataaaaatatactataattcattcttgcaaactacattaaaactaggtcaaccatgaaatgtgattcatgtgaatgattcaaaataacaaagtggatttgagctaaaaaatgatgggaacatcacaagccgaaaacaacatgaaaaagacaagaaaggctgaagttagtcacctccaagcacgaagagacgatgacggagtcgaagaagatcaacgataggcgttggagatgaagaacaaatgaagaacaagcaagaagaagctccaagaacaacaatggtgctctcggtttcaaatgggcagaggggaggagggagccggcctataaaccggatctttagcaccggttcagggcaaaaaccgatgctaaagggtttgcctcggcccgtggctctggccggtgctaaaggggtctttaaccccgggccgcaaaaaggccgaggtttttggccattttgaacatcgaccaatgcctcattctgtagtagtgcgtctgaatctgaacacaaaggggtcactcatgtcatgtgtgtgcacatgtccggatgccccttagcttacctctttgccgggcaccttgcacgggccggccccgttgcatgcaacgcaagcaaccgcatatgcctacatacgatgcgatacctatatctgtacgttcacatgcatatatatatatatatatatatgcagacaagccatagacctctacacaaattagtggctagctatccatctagctaggaggagtagcaacccattgacgatggccatggcggccgccggcgagagcggcgtcagaagggcatgggtggtggacgtggagaagacgctggacgaagcggacgcgtcggtggaggtgtcgcggtggcagcgccactccatctaccgcgtgccggcgtgcatcaaggacctgaaccgcaaggcgtacaagccgcaggtggtgtcgctgggccccttccaccaccaccgccaacgccgcgacgacggggagctcctgcccatggaggagcacaagcagcgcgcgctgcggcacctgctccggcgcgccaagcggccgctggacgagttcgcggccgccgtggagggcgtcgcggagcagctgcagagcgcgtacctcgacctcggcgacgagtggcgcggcgccgacgggagggagcggttcctcgagatgatgatcgtcgacggctgcttcctgctggaggtgatgaaggccgccgaggaggacggcaggagtagcgtcagcgactacgcgcacaacgaccccatcttcagccaccatggcgtgctctacatggtgccctacatccgccgcgacatgctcatgctcgagaaccagctgccgttgctcctgcttgagaagctcgtcgccgtcgagaccggcaagcctccggtatgtacgtcgtcgttatcatccagtgcatgttctgttacgaggccaagtgaataagcatgtcgttctgcatgagcgccgacgcacgcgcagagcgccgacgtgatcaacaggatggtgctgaggttcatgtcggggtcgccgtcggccaggctgccgccggggagcactctggggctccacccgctggacgtgcggcgacggagcatgctctacggcccgaagcagccgccacaggaggtgtccagggacatcgcgccggagacgacggacatcatgaggtcggcggtggagctgtacgaggccgggatccggttcaagaagaccagctccgacagcctccacaacatccgtttccgcggcggcgtgctgagcatgccggcggtgtcggtggacgactccaccgagtacatgttcatgaacctgatggcgttcgagcggctgcacgtcggcgccggcaacgacgtgacggcgtacgtcttcttcatggacaacatcatcgactccgccaaggacgtcgcgctgctgagcaccagcggcatcatccagaacgccgtcggcagcgacaaggcggtggcgcagctgttcaacagcatctccaaggacgtcgtcctcgagccgcagagctcgctggacgccgtgcagcgggaggtgaacgcctactgcggcaagccgtggaacctgtggcgcgccaacctgatccacacctacttccggagcccctgggcgttcatgtcgctcgccgccgccgtcttcctcctcgccatgaccatcatgcagacggtctacaccgtgctgccgttctaccagcaggaccaagctggcagcagcagctcgccggcggcaccggctccattgtgatgttgctgcggcatgcagctttattttgtgttcatatctgcatgcaagcgtgccggccggccggcaccatgtaaattgggtgggctttgtttgactttgttctgcatgcacctcttttccttgattttctcgatgaggtgttgttcggtgttgaatgatgttttgaattccttttcgttgtcttttggaggaggaggttttgtgttttccttgtttgagttgttattaaaatggacgattttgaatttgtaaaaaaaaagggtgatccatatgcatgcttccatgagtgtcttgtgccggttgacacagcacggcggatagataatacggagtatatgttgttgctcgtgataaaaccagcagcacagatacctcggtaactatttgtgctggaaccatcacagcagatagtttgtttgcgtcgcagtgtataataacttttttgttcgactagtatctcatccaaatatagatttctcacatctatatactcttataaa

SEQ ID NO: 4619 - DNA, 3734 bp, Sorghum bicolor
gaggatgaaacgatgaccctcaatgcgaatttcacatgatttcccagagcttggaaacaacgctatctcattcaccgtggttaaacgatttctttctctctcctaaacatttcatgcaaacattctctttttgctgagttggtgtcctacttaatgtgcatgatactctcatgaaatgcccattgagattggccttagtacctccgtgtggccacacctcaatgtccctgtcctaggtgtgctcgtgcttcggcgtccccagcatcccttgctcccgcagctctgcgcgaccatgccctggtgtcctgcgtccgcccactctggtagctccgcaccctgtcctccttggagtctgctcactctgctcaatcgctcctcgacattcctgtccttcatgcaccacgccttggtgtcgtctcgcgtcttatggtctcgacatgctttggtctccgccggccccgacgactccgagaactgtgcgtcacctacatggcttggccactttgctctagtctgtttgcgccgtgaattaggtccatgccgacgactttgccccacctcgatccactactccatgcacacaccaccgccaccgccacggcctgcctacgagcttggtgtaggagagcaaaaaggggatctagacttagaggacaggtagggagcttctacctagtggaagctccttttttctggcttcgtcagacaccgctgtgctatggagcagtgtttataatagagaaagtcccaaaacagctttaggagttgctcaagaatctctcccaaacatctcctcagttgtaccattggaaaagccaagccttggtggccatgtggattaaaggcccattggatttctgttcaaaaaggtgaaaaatcaatggcctagcccagaaaactttgtagcccactttgggttagggtctaaatctgtgcgtgctaaaacttgggtagtagagcggcctaaataaagagttgtttggaaaagcatttttggttggcttccaaagaggaatggtcaaattactgacccaaacttttgggcttttggccataatcatcagtccccaagaaaacggcaactggacaaggacatgcgacgaggcattgtcccggcaaacaaagagcaacaaagcagctggtggtcacgtggagatcagacacagactctgatagatcaccgggcggacaaccaccctgagcgccctagcgttggtccgctagctagctagctcttgcagttgagctaacaactaacatagatcggaatcgattttttttttgtttgtttctttagaagataaggttcaaattagcgtactaaagttctggagctagcgttatgctgacaggccactaccaaaatggttgagttcttctagtgtttttagttagtagtcaaaacactagagaattctcactaggaggtatttactagggaaagtttatactaaattttgaatgctaaaacactaggagaaccccacactactatgagaaattgaaaaatctggttgtgcgccgccagttcatctccaaattttttgtagacaaaaggtttccctattgctaaagcgttcaaaacaattcagcacagcgtatagacccgcctgccaagttcatctccagattaagcgtcaagcactagccagttgatcaagtacactgttacttaacgtaatctatcatcatctagatagctatatatggttaaataaactcatgatggatagtagagggaaacgaaagcaacaaaatattgttagtttcggtcaggttctccgtcgactcatcgccatctcgtccatccatcagtttgtgcgaagcactgcgtttttcccaaccaatctacaccaaacttaacttcgcacttataatcccctattaataattcattcatatatatatttagctctcattcagcagctcaaataataatccgccgaaacgcagccaccagtacccagcctttgatcacttctccgaatcatcaaccaagaatggacggaagaagaagggagctcgccgtcggccgtcatcccctgcaacggcggtgtagtcgtcgtcgtcttcttgctcctcttctcatcctgctgctcgccgtcgccagcagccagtcacccaccgccgccggcagcatcttcggtggcggcgacgacgactcggtatcggtctgacccatatatacacctctaattccactatgtactcggtatagtcatttgcagtgcgatgatccatatctatgcatccgcaggattgcagccgagagtgcgagtcccagcactgcacgggtacgtattaggccttgtctagtttcctgtcgtaacacttttgtttttatttgataattattatctaatcatagattaataactagactcaaaagacgattcatctcacaaattaagaacaaactatataattagttattttttatctatatttattgctctatatatgtgacgggaaattttaaaaagtttttagattttttaataaactaagcaaaggccttgcgtgtgcgctgtgcctgaactgaatgttgtgtgcgtggaaccaattaatatatatgcagctgactgatatgtttttttgccatcgatgacgacgatgatgagcagcgccgctgatgcgctacggcaagtactgcggcgtgtcctacacggggtgccccggcgaggtcccctgcgacgccatcgacgcctgctgcatgctccacgacgcctgcgtccaggccaccgacagtacgtaatatatagtaatacatatacatgcaacagttatatatatatatatatatatatatatatatatatatatatatatatatatataggttccatcactgtagcattatattctcttcattcattttatttatttattccaagatcatatcgaacgagtacaagatctcttcgatctctttatttctcgttttaatttcatcctgcctgctgctagtttttaataattgatgcgttaattaactcgatctttgcctgtgtgtgcatatgcatgcgcatggaacgtacgtcgtacgctcttgcagacgactacctcaacttgctgtgcaaccagagcctgctggactgcgtggcggcggcgaggccggcggcggcggcggccacgttccaggggaaccggtgcaacgtcacggacgtcgccgacgagatcaccaccgtcgtggaggccgccgtgtacgccaggggcatcctgcacaagccctagcatgcacgtagcgtgtacgtacgtgtgtatgtatccgtactccgtaggccgtagcagctagacaacggataccatgcatgcatatacgagctagagggggatctaccagcagggaccatgcatgcatcaggctcgtcgtaccggtgggtggagcggctgaccaaatttggtgcggtgtggatgcatggcctatcgcagccgaagtcgacgtctttgttttacaaaaaaattgcgttgctcaatgtgtacagtacacatcggaaaatatacttctccctccattccaaattataagtcattctaaaaatcttagagagtcaaaacatttttaagtttgattaaaattatagaaaaaatattaagatttttaacataaagtgagtatcctatgaaaatataattaaagaaaaaatctaataatacttaattggtattataataataattattttattatataaatttggtcaaaattagaataatttccgtcatcattcttc

SEQ ID NO: 4620 - DNA, 5869 bp, Sorghum bicolor
acaataagggtaggaatgggagaagatagatggaagatagaataagctgtgaaaacaatatgggtagtaataagagacgatagactaaggatgtaacaagaagtgaaagcgggatggaaaggagtaagctaggccgaggatgaaataagaggtgtgcactagtagaaaaaggtacaacgccgacgccccttttttataccacaggcggttttggttatcacgtgtctgtggtataaaaagagcggtgtcagaactgccaaccgcctgtgaaaacacattaccacaggcggttgtcttaagcaagccgcttgtgtaaatgttacatttacacaggcggctttcttaagacaaccacctgttgtaatgcattttcacaggcggctgtcttaagctgtccgcttgtgtaaatgttacatttacataggcggctattaaatttacacaggcaggcggctattaaatttacacaggcagttgttttatccaaccgcttgtgatttcttgggtataaataccccttcttcctccccaagcagcactgtatctcgcagcaaccttccgttcgaggcgattttagaggtccagatttcacaaaatacaatatggaaggttttgatcttgatttcatggaaggaggttgccaaaaaatgttagtttatgtccctattgcctcaatttccacattaatgctcaattagagcaactttttggatctagggtttcaccatgagtgtgggagaagaataactagcttcttgtctttatttcttaagatggttagatgaggttgctcaagatggttggataatgcctcttctctctccattttcatgattgcttctcaattttagctaatttatgcaagatcgaattaatggtgtgttcttgtatatttatgtagagagagaaatgtagatttggtttttttcaattatgtggtactttggttttttacttcaatatctctccttgtttctcaatttatttttttcacatctatatatttctaatgaattgtgtgtttctataattatgttatgtacttagatttttttaattgtgtaacttaggttttttcctttaatccaaagctaaaccataaaccctagctaataacccataaaccctagataataaaccctagatcagcatgagagtaaagtgagaagcgagagatggcatattgaggatggaagaagaagttgaaggccctgggagtgagggtcgacagacgagcgctacgactgagaggtaagaagctcaagatgaaacaagagggtgttggtcagccgacctaagtgatttaagcaacaagctagggatgattgagaaatcaatgataaatcgagaggagtgggaatctaggagtgtggaacaaataaatttatgcgagtgtgagggaggcggtgaaagaaatttgttccttaattaattttattaaagaatataagctaccaagtacttcctccatttcaaaatataaaatattttgtttttctagatatacattagtttatttatatatctagacatagtatatataattaagtacatagtcagagctatgtgtctctaaaaaagtgaaaacatcttataatttataacaaataagaggatgaaatgtagacggatacataagatgtttaaccaattcactcattcatatgtgttcaccgcgtggagtgggttagtcgcaaatgtgacttaactgcaaaccacacacgcacgttccttgaataagaccttggtgttccacacgcacgcaccaacttggttcaatgccggaacaagtacagcagctgtacgatgcaatgttaatgcaacccacggcctcgctggccaccagccttatcccggccaccacactcttttatccctaaccgacgctccgggcccacgtgcagccgcacacattaactgatcgatcaacggccacctattggattggcgccacgatcgagcctataaattcatgggagctggtctcgcttgaaaacacacgctcgaccggccgtatacatcatctccatcatatgtgctcccctccatccacctagagctatcaaatcggcgatacattctcggtgatggttcctgccgcgccccggctgctcgccggcattgtcgccgcggcggcggcgctgctgttgctgctagttgcgccgtcggcggcagagctgacgcgggtggagcacccgcccaagaccgagggctccctcgccatccttgccgttggcgactgggggcgcaaggggcagttcaaccagaccctggtggcccagcaggtaactgatgaaaacagtcaccatgcatatgcacacacgatctaaaatatggaccacttcagcttttgtaactttgactattttttttgaaaaataagcatattatatattaacatctgtacaagagccactaattgcattgacgacacataatattcttggagaatttagtggaacaaatttgatgttgttgtgtagatgttgtggtatatatttttctatataaacttaatttgtagcaagtttgggtcagggaaagtagtaagttgttgagtgttgtgcaagcaaaaccgtacattatgtgcatcgagaattatacacatgttcgccagcatgtggaatagtgattgctgagaaaatattacgaagaatcttgatggtgaaagaacaagttatacaaacggaaatggtgcacatacttaattttcttcttaatcatttactactaaagatatggttgctaggctcccatgcttctcagttccacaacaagaacttctgtatgtgtacttctgtagcgtagaagtcatattttgaaaataaaatatagcagtatctccattctaaattgtaaagtcaatttggcttttctaaatatatatcttttgctacgtatttagatatatactatgtccggatacatagtagaacttatgaacctagaaaagataagaacacctacaatttggaaccgagcgagtgcagcaattaatgtggtatgtaaacacttcagccttatgcaccttcaaaaacataggagtattgtttgcgcctacaaattggtggaccatgtgtgttgctcggaaccaaggtgtattgcattccagcatgtcagtatgtcacataatacttttatactttggcaagaacgagtgtcaacgagacaataatgctcttggaaagttgaaataatatatgtacggtaaacgctaatgatgcacgtgccttgcatggtcctcatctgaagtagtgcacttgctatatatggtgagcatggacctcctttcatttcattattaatagccgaaagtggtggcgccagtagttatgtatctccgttgattgtttgcttatgtacgatcgcactgttctttgttgcaacagttacaagctcagatcgtatacgaaattctaattattttttcctagacggctagacctaggtagacctactggatacgacggaatacaaatatatgagatatgtgtgtgtaaattgctaatccctttcctgatcaaaaaagctgttctcttctgtgtgtgtatgtactgtgtatatagatgggagtggtgggggagaagctggacattgacttcgtcatctccacgggcgacaacatctacgacgacggcattgccaacaccagcgacccgctcttcaaggagtgcttcaccaacatctacaccgcccagagcctccagacgccgtggtacattggtaagcaccatgcaatctgtagttcagactgcacatgaaccgccagtgcaaatgcatcatttacactagtggttctattttacacatgcggtttttgagttgggctggccgatttgtttgcactggcgtgctataactaaaaccacctgtacaaattagacactaccaccgcagttgtgtttttctgtactagtgacagttcagtgatagtgttactgttcatgtacgtgccatgcattccggcagtactcggtaaccatgactacacgggcaatgcgctggcgcagcaagatcccgccatccgcgaagtggacagccggtacctcaaccttgccaagtccttcatcgtcaactcaggttagcatgcaaatcaacctactacgcatcggatcgattgtataattaagtacagtcttgacctcgatcggggactctacatgtacccttaattatgccatagtaactgtcgtaaatgtttatagaacatgatgaatcttcatcacatttttacatatggatatatatatattcgtaacatgttcagcaatgaccgaataggaatcgcggacttcttcctcgttgacacgtcaccgttttacctcaagtactggaacagcagcaagtacgattggagaaacgtttctcctcgcgacacctatatcgaaaacctcctcaaggtgtaaatttggtgtacactatatgtgctagtattatgcaataatcttttgaatataaattcacccaagtatataatataactcgatcttgtctttgttaggatctggatgatgcccttgtccaatccgaggctccatggaagattgtggttggtcaccaccccatcagcagcggctgcgagcatggcaacaccactgagctccaggagttgctccgaccaattcttgaggcatgttgttcgtactctagctgcagaaatatgaaaaactccaaaaactgattttgtttgtttcatcggccatggcaacgcaggcacgcggggttgacatgtacgtgaacggccatgaccactgcttgcagcacatcagcagcagaaacaggtgctctagcagtctagctattcactctagtacatgcatcgttgatctgagtataatactgaattttcattactgttatatatgttctgaactaatgaaaatgagaacaaaaaaatgcagtccagttcagttcatgacaagcggcggtgggtccaaggcatgggctggcaagttcaagaccacatctgacaagatagagttcatctacgacggccagggattcatgtcgatgaagttgagcaacacggaggcgcacctagtcttctacgacgtcgctggcaatgtcctccacacctatgacagcaccaagagcgaagaagaagaagaagaggaagaagaagaagaagatgttgactaattagctgcgctaagctatagatggctggggtatactggacaacaacctgtgcgtgtgggtccattattcagggcagctgaatgtgtgtgtgagctggaagcagtgtagttcgtttgtgtggtttattatgtgtcggtgtaagtttaaaaatttgcgtggggtggagaagagaggattgtgtctcctagttgggtcacatgagggcctcacgactagaaatcactataaaattaaagcacgatcattgcgtactagctgaattgtttttttaggaaactagaggggattgtgcccctacaggttttactattaaagcaacgcacaaaaagttacgtagttattgagtacaacaaagaaggttcaagacacaaaaatgaaaagaaagaagtcgagcgccaactcagagacaaaaatagattgagtccaatgtgccaaggcttctgcaaattttgggctgaccctgtaattcagtaactgatgttctcataagaatgttgctctgcatgctggaatacttggctattgttagagtgcgcagcggaatctgacccgccccactatacctaggagccagcaccccttggtcctaggttcaccggagtctacaacatacccaagtcttagacgtaactcatcctaaaagattagctctacaagtgaggattgtccctgccgtatatattcaattgccgatgtgactaaacctaacaatatttcccatcacacttca

SEQ ID NO: 4621 - DNA, 4552 bp, Sorghum bicolor
tgaacaggcaatggcattctgaagacaaaaaaaatccataaagaaaaacttacttctccttcaaactgatataaagaccctgaggacgactaaaaatggatccatacttttggcaggcttcgcctacagttggtgtgtagacgataggaagtaactcctccacattgtcaataagcagcttgtagaaaagcctctcattcccttcctgtaataagacggcatgagagaaaagtatagcccacgatggcggagacgagaggaccgtcgcgagctgcgtcgcaattttggggaacgattggatacgggtgtacaggatgccttctctctctcgtgggtacaggataaggcccaatcggtgcgtgtgataagagcaagtttaataatacagtccatttgctggctgtaaggtaacttacagcctttagctattcactattaatacatggcccacttatctctctcacaaagtttcttggtttttgtgtctaagctggctgtaagcttacagcctgcttctcctctctctcctcccttctcttctccacatcagcatttagccagcttacagcccaccataatacttgctctaagcccgtgtctctctgtgaccgagtagcaggcctaaatgaaagtcaatctacatgcttgtatggttgtaccaaagactatataagacattttgaaaaacgcctccaatgctcatataattaaaggcatttttgaaatatgcctctaatgctcagataattaaaggcgttttttttattttagcctttaaaaaaatagttttaaaggccatttcataaaaatgcctttagataaaaagaaattaaggcaatttaagaaagatgcctttaacaaaaatgtctttaattaaagtacgtgttgtagtgagaacatgttattatattcgatcttgttttgtcccaattcagaatatcataagttatagtttgcaactagaatcaccatacttaagctaaggtgtacatgcaagttcaagacatatgaagtgctatatagagagaaaaactatagaaatggacagagatttaaaaagtgcagtagatataagttcatcaaaattggataaataattgacatatttaacttttgtaaagtatttgatgcatatctctgatcacaaatagctttttttataacttgtataatgtgctcctaaaatcctcagaattggtgagttttgctattattttccagtacaaatctacacctgaatcttacatgaccatacagatggcacgcctattttgacttttagtttctcttacagttatgttgtcatttctaaaaacaatagcatctcatgggtatttcggatacaaacctatgcaagttttatgtcttatggttgtacataatttgacaaattattggtcaaagtttgaaaatttttacttttccatgcataaaatattcttattactattttggtatggaaggagtattgtcgtaaataaatgacttgtttctgtaaccgtagggagtacatagtacctgtatggatatataacattaaagaaatgacaagcaaacaaagggagtgtgcaataataagtaactttgattatttgtgagtactaaacagacaaacttctaatatactatgtcctcttatattttggctagtagagaaaaccatatgttgatgaattagtactccctccattcaaaattattacacgttctggtttaatagatatatattatgtatctaaaaaagctagaacgtctaataattttgaatggagggactattattctatagcccgaaaatcctatagacatgtgtttcttactgttacaatgccatactgagattttcttactccctccattcaaaatcatgtccttcaagtgtgctttacaaaaacatgttttcttactgttacacaatgccatactgagatatttaataagttgttttcttgcagggtctatactgacattttggactataggatctgtgttttgttggcatggattcaaacattcagttcatgactaggatgagtttcaccgaagatgagattgaagcaattactaacaactatggcacacttatcgggatgggaggatttggagaagtctataaaggggtccttgatgatcactactatgtagttgcagtgaagagatatatccgtgaaaatttgaggaaagagtttatggaagaagtaagcatccatagtcaaatgagccacaagaatgtggtgaagttcataggctgttgtgtgggtaaaagtactctaacattggtaactgagtatgtacctaagggaaacctcgacgacatactgcacagtagcagtgctgcaattcccttggatataagattgggtattgctatagggtgtgcggatgcattgagctatatgcactctatgcatttatcaattgatagccttatttgtcatggtgatattaagccggccaacatacttctagatgacaattttacagccaaagtatctgattttgggttgtcaaggcttcttttgggtggaatcactcaatatgctagcaaggtaataggaagtatagattacatggatcctgtattgatgcatacaggacgacttactccgaggaatgatgtttatagctttggaatagttctcctggaattagtaactcggaaaagagtaaaacaaggtgatatgaatctcattggaatttttgaatgtgcaaagggggaagggttgaggaaactatttgatccatcaatagcaaacaagaatactattaagattcttgaagaaattgtggatctagcaatggcgtgcctgagacttgacattaaaaatcgccctgaaatgaatcatgtggaaaaacgtcttcgggtgcttaaaagagatctgaagtgcagacaagaagcttcttcgcaatccattttgtcaacataccattcatggcacacaaaagacaagcaagagaaaccacagcttaagaagagtggtagctttttcaaaagaaatgctagcaatgctaagattgtatcagaattcagcaatgtaagaaatttcacaaaggcggagttaaaggaaatcacagataattactcacatatgctcagtggaggtatgtcagctaagttttataaaggaacacttgaggacaacacggtggtggcggtccggaaatttcatgacacagactctcaagaggcattcatcaacggagggattgtcctttctcaaattgccaacaagaataatattatcaagcttttgggttgttgcttggaagccgaaactctagcttttatatatgagtatgctgataaaggtagtttactggacattctgggtagccaagaatatctcccactagatctacgtctgaggattgcaattaagactgcagaagcattacaatacctacattcatcagaaactggtataattggacatggtagtgtttcagcatccactgtacttctccataataactttgtaccaaagctcacagaattttcagggtcttctaagcttatcatggacagtggaagtaatgctggtcagagtgtaattaatagcgttcttcttgaaaaggtgctttacagtgacccatctcgttataagactgtattgatgaatctggaaagcgatgtattcaggtttggcggtgttttattggcactcgttagtagggaaaacagtgttagttttgatgagcttattgtcgaatttaccgaggcttaccaaaaggataacagtgggaaggcaatgtttgataaggatataacagctgaacaagatattgctgctcttgaagagatggggaggttggcactgaggtgtactattttgaatgcagacgagatggccaggaggccgacaatgcaggaagtggcggaagaactacgcaggattaggagatgttgcaagccgggcacgagcgcagctccacatgtaactgaaactacggctacagctgcagcgccattggagccaaagctaccaaacctgatgcgtcacttgtttggatatcgacgaatctccagcactgatcctatacgtacaagctaattctaaacaatgcgaatccaactaggatatgtgatgttgtcattttttctttcatacaatgttttctctagacttgtttatgcttccagatgtcagaattgtatatatatatatatatatatatatatatatatatataaatatatctctatctaaaaatatgccagagacgctgccacaattatataccgctctctataacactccgcaaacagtgcccataactgtggcatcctctgagagaatcttatagaaattaatataagaaaacgtttatgtaacccctcttaatatagtgtgtggaccattttacaccccctcctccccaaatataaaaacacatcttctacctcttaaactttcaaaaaccgcacaaatagccccccacacagatggagacagagactgtgttattttcttttacagatattttcgcagactctttaaaaaattatacaaaaaacatattttttattcgtctccaagagaggagatctaca

SEQ ID NO: 4622 - DNA, 3834 bp, Sorghum bicolor
atggtacttgccgggcgtatatgttccggacgactggtcaagcattgtgaccatggcagttgtttgagagtggatgttcgtgggggtggccaacgaaaatgcaacttgtaaaatatgagtgggagaaggtccagcatgcttttctagtgacgcagtatcaagtgcatggtcatgcttcttttgctgtgatgcatgccaacagatcagcatgcacagacaaattgacaggagagctccaactatgcctgtatatatatatatatagagctatcggcatcctatgaattttcgcggcgatttggatcttgcaacaacacgagacaggagctacagcagtaactgaagatgttggaggccactgaaattatatatgtactatattagagggtgtgcatcgcattttgaattgcaagagaaatgaacaaaattgtgtttatatttgtgtgggctccactaaggggtgaataataggggaaacattttgattaatagcaatctacgatagaaaagttgtgcacgaccaggatggataattgtactcaccggcacataagttatttctagacaaacacatgtgaggagtaagttgtaatattcaatattattattccaaaatcatgaactgaaagggtatagatatggagggaacacgtaaagatagattaattccatgagagacagtttgatggctagataatgtatttacgatggacatacagaatgaagtcatttgaagaccttccaacaagcagacaaacacccatattaaggtgcttacttaagtaaggactccaccaaatagctcgctgttgagtatgaaacaagcggttacataaatcctaagattaacgccatgaaataaagtgtgaatacatcctgactcattctcctaatcagtctagggctacacccatcgtgtgtgctcgcgggccattatggaaagcctgatgggccttagacgaccctagaaaggcctcgacacctaggaggtgagaagccgtggaagccaatggaaaaaagaggggaagtcggagaagttcaagagaagcatgagactccgcttccgatgaaaaccgttcaagaaatctggaaggatgtaaagaggctcttggtgctctatgggcatgtataccctaagtcaactaatgattaacaaccaatgtatgttttatgtaatttgggctatgcaaaagtacgctagtgatgacatatcagctgtgggagaattcaaaacaaggcaacttcatgaacacagttcgttgtctctgtccagactctttcctgtatcttgaaacaacgacaaatggtggtgccaaattaaaggtttttagaggctgtagcagtgccaagtagtaggggttgggcacttagaaccaattacattacattagtaatgggcagctgatggtttttccgctcctgatgacaacatctgcgtctgtatgctcaagataaataacgtgatttgtctgattagatttctaaataatttgtgctatcgcattctgacaagttttttcagggtccagtagttcctgttgccatttaatttgtgttatcttgtgattgtcagagtgtctatatgctcatttggtgtatatgctgacgatcgtgatgactctataacaaaatgatgacgatcctgatgaccatataacaaaatgatgacgatcctgatgaccatatatatctatgtctgtatatgctcaagatcgatgctataacagaatgtgtttggtagatctaaatattctgcacatcgctttcgataagaagctgatgacaatctacaactaatactaatactgttgtcatttattctgtgtgttcatgccattgtcagaaggtgcagagtcttccaagtggaagatagcaaaataatttagccgctagatcttcgactataaatagttttgcaagtttgaacatgacttcaacctcatccagcagctcttaattagaaatttactcagtgctccccgctcagatccacgggtgcaatgcagcaagtcctaacattactcttattacttgcctcactgtgctgttcggcggcggcaccaccatcaggctaccgctctatgctcacccatattgactctcatggcggcttcaccaaggcagaactcatgcgccgagccgcacacagaagccgccaccgagcgtccacgatgctgctgcattattccactttgtctactagctcggaccccggccctgccaggcttcgctccggccaagccgagtacctcatggagctcgccattgggacaccgccggtgccgttcattgccctggctgacaccggcagcgacctcacctggacccaatgcaagccgtgcaagctctgcttcggtcaagacacgcccatctacgacaccacaacctcgtcaagcttctcccccttgccgtgctccagcgccacgtgcctgcccatctggagcagccggtgcagcacccctagcgcaacatgcaggtaccgctacgcctacgacgacggcgcctactccgccggcatcctgggcaccgagacgctcacctttggctctagcctgaatgcgccgggatctccgtgggcggcatcgcgttcggctgcggcgtcgacaatggcggcctctcgtacaactccaccggcaccgtcggcctgggccgtgggagcctgtccctcgtggcgcagcttggcgtcggcaagttctcctactgcctcactgacttcttcaataccagtctgagcagcccagtgttcttcggctctctcgccgagctggcggcatcatcagcaagcgccgatgctgccgtcgttcagtcgacgccgcttgtgcagagcccgtacaacccgtcgaggtactatgtctcgctggagggtatatcgctcggtgacgctcggcttccgatcccgaatggcaccttcgacctgaacgacgacgacggctctgggggcatgatcgtggactccggcaccatcttcacgatcctcgtggaaactggtttcagggttgtggtcgaccacgtggccggcgtgctcgggcagccggtggtgaacgcctccagccttgacaggccatgctttccggctccagccgcaggtgtgcaggagctcccggacatgccggacatggtgctgcacttcgctggcggtgcagatatgaggctgcatagggacaactacatgtcttttaacgaagaggagtcgtcgttctgcttgaacattgttgggacggagtcagcttctggttccgttttaggcaatttccagcagcagaatatacagatgctgtttgacatcaccgtagggcagttgtcattcatgcccaccgactgtagtaagctctgaaatctgaagaatatgttgggtatgttaactcaaacaagcatcagtgaatgaaatgaacttgggtatccctttcatgtccgtgaacggtacatgtcaggggtagccctagtcttggttattcctatacaaaggattagaatatccctaacttattgaatatatatagcccctttttactcttaggggcaaaccagtcatatccatatgtggtccttgaagtgaaaaggtttgtatgcatcaagacattattcacactataactcgtgaaggaattatctattttttttgtataaatattatattattcttgaccttaaaaatctaaaagaagctatatgaaccaaaaatgacagagcaaatatacaaattagctatagttgacgtgagccaagtatatatgttgggcaagaaattcagtcaaaattgctagcaaaaaataaaagtatcaaacatcgtgtctctcaagatctacatgagaacaaaaaattagtgaaagaaat

SEQ ID NO: 4623 - DNA, 5852 bp, Sorghum bicolor
ttctacggagaaggtctaccatcgaaggctccaacagatgaggggggagagtgaggcggcagctagggttgtatgaaaaaatagggggagtggagagagagccccttgccgtcatgatcatggcattatataggcaagcagaaatttacaggcgacccccctatgaggatggattttatatgccacttcaatagcttgagttggggctcttctagggaacttggcccatgtgaatatgacatgtcgcaacagtggtggccgactggccgctgtagaccccgcatgccgccctgcactctgcctcctttcgaggagttcgacctcttcggctctagatcgggacgttgaggatgagcaaaacaagcctcggtgtccaactcggaaggaagggctgaccgctggctgcccaaccattttctctcactttctttttctattcttttttcttttcaactttaatattgaaatttaatctattaccatgttgtacaaagggaaagaaataaaagaagtcacggcttgccctcgggtgggtgaaataattttgaaatctttttgaacaaataatttttgaattcttttcggcttgcccaagacgtggtctctctaggaccatactccgtgttcgcttgtccgaaaaatcatgcatgtttattaatttgttcgagaaaacattgttgattgactgacacattcggcagataagttcaaataaacaagattatttcattctttcattccaaagtattactatggttgtacaatacagttaagttttgtataacgccttttgatcccaatttactaattagttactccgtacaagggagagcttaggttaggtggaaccatgatttataacatactccttctgtcatataatacattgtgttctaaaaattttaagataatttaagagaacagtcaaatatggcatatggttatagattatttcaattgtttagtttctcctcaaatcatggcttcgtggttaacaaaccttgccaaatcgaaatacagttattatatagaacacattatattgtaatacaaattttagatgtcataatacactctattctaggacagagggagtatgcatttgaaggtaacttttcatgattgcacaagcatattataacatggttttctaacacaaaaccatatatttataactgtatgatattacatgctaaaagtgttataaaatttctgtagcaacatgcgggcatcatctaaggccttgtttagttcgcaaaaaaaatcagtttttggctaatgtagcacttttgtttttatttgacaaacattgtccaatcatagaataactatagactcaaaagattcatctcacaaattacagataaactgtgcaattagtttttatttttatctatatttaatgctccatgcatgcggccaaaaattcgatgcgacggaaaatcttgaaattttttgggaactaagtagtatatataatgtagggagccaagttgggaacatttttagtactcgaaaaaggagtgcatgcatgcatgtgtgtggtccctgctgcatatagacagacgtaagaaaggaactggatttggtggtggccgtacgtgtggcgtgcgcgtaggttttggaaccgaatcaaacggagcacgctcctcatcacggccctttgcttgctccatacatgcggaatttctagcttcctcgcttcgatctatatatactactcttgcattgcatgtagatatgatgtaggtaggaacgagagcatgcagagctttgatgctgtgcgacgtgttcatcaatcaccatccaaattaaactctagctaaaggcggaatataatagcagaaatcgtccatcaaccggccatcactgatcaagtaagtgggaaattcatataattacattaaaacccttgatcgacattctgccacctgatattggatcattatttaacaattcattcaactgctcagctcgcagggtgcgcatgcatggacgacatggcgcctggagcttccgagggggagcagcagcaggcgagagatgtcacggcgcatcaaggttattccgacgacggggcggcggcggtggcggccatgatcgaggaggcattaagcaagctgcaggcgcttcgtgagaggatctccctgttggggcctgctggccctcatcgcgtcgtcgtctcctctagtgaccctggacggcgctgcgtggccttcatggagacagagctgagcatcgtcatggcgttcttgaagacgctgagtccgcagcatttggacgatgccgagaccaagcaatggctgggagcctatttgtcccatttgttccctgttctcctccattgggtcgacctcgtcctcgtcctcagtgaagtcgacccctcacgtcacacactgctcccaagagcttcacagtgcttcctccattgtcgtaggaactcatactcacattggcttcctcttgacaccataatgctttactatttcatcgaacatcgatccaggcattggcatcttctccacactacgagctctggccttgggcttattacatcccaactggacgaggcaggtgccctccttcctcttgtcggcatcaatcgcccggcgaagaagatcttcaggtggctcgccgcacatcaggggaagatggacatgaacacgagagtcatgtctatcgttggacctgtggggattggcaagacaactcttgctgttgagctcctcaatcgactcatcaggcacgaaactagcagtggaggacgctaccatttccaatgcaatgttatggctcaagcgtcacgggggactagtgatagaaacattcgtcttcttcgagatatcctctcgcaagtttcaccagcagcagcaacagcactgtcatcttacccgtcagatgccaagacaatggaggtcctagtctgtcttgtttcagaatgcttgcgagataagaggtatggataataacaacttaattactagctttaatttggcgtgattacagtattctttaatctgaaaatatgtatatatatgtttaatttgctcatctcttttctcataatgctcctggctgcgcaggtactttgtcattatcgatgatatatggaaagcatcagactgggaagaaatcaagggcgcatttcctaataataatcgtggtagccgaatattgattacaacacgcagtacacgcacagcatgggcatgttgctccgattcttattatggcctcgtgcatgagatgaaacctctaagtgaaacggattcagaaaggctgcttctagcaaaagccgtgggttcagtggatggttgcgtgccaaataatatcaagctacattgtgatgaaatattgaggagatgtgatggtataccattgtttataattggtatggcagactggctgaaggaacaaggactgcagcagctgcaccaaccaaaagatgagcatcaaggatttgcaacgcattacgaggaacaagtcccgcggctgcctgaacggttagaacaagcactgtcctctgcttttagtgacttccctaatgatgatgactcgagattaccattattgtacatgagcatgtttccttatgggtacaaatttgaaaaggatcgtctcatcttgacatggggctttactgaatgtgttcctctttccctgggttttagtaatgctatgttaaaagcagagctgttcttctcccggctagtggataggaatgtcatcacctgtgtagcgtcaaactgcaagcacaagcaagatgaagccgaggcctgccagtggcaaatcaatcattttatgcaccaattcctggcctccaaatctgcagagatgggtttcgttttcaccactactacgctcaacttactggccgcatcagcatcagcagcagcagcaacaacaacagagtgtggcaaccaaactagcagcaggatgccacggaggttagccctgcaccatccagatcccctgctcccatccctgcttgaaactatggatttgtcccagactcgttcactagctgtttctgggacagtctgcagaatcccagtggacaagtttgtcaatttggtggttctggatcttgaaggctgggaaaatctcaaggatgaggacctactgcaggtatgcacaagcaaaatgttctttttgtgctatttgagcgtcaggaatactcaagtccacaagctcccatacgagatcaaggagctgcggagtctggaggcattggatgtaagttacacacagataacagagctcccacttgaagtgttcgagctaatttttttgaggcacctagacctaagaggcacacggataagacagctgccaaagcaaattgtgggccgatggaatatatctcatcttctcgttggtggcgaaggagtgattcattccatcgaaaaggcagcaagggtgccaaacaatgtgcggcgtctcagcatgctagagacactagctactgttgatctgaccagccaccctgcaagcttcgtcatggctctcggtgatctacgaaggttgaccgtgcttgcagttacatggtcctttcaccagtccactgacagagactactgtgaagcgttactgtcatgcatcaaaaagttggaacggctcgagtccctgaccattcactgtggactcggctgctccatggagttcctgggctcccttgaaaagtctcgtgcacctcgggagcttaagatgttcaaggtgacagccggaagattcgcaagtgttccaccatggatccaagggctctggttatctttcgtgcaaatcaccgtctctaacaagcaaacaacgacggatgacctgaagatacttggagaattgtccgtattgcaatgcctaatactaggcttggacttcatccctggacaagccatagtgattgaaagtggaggattcagtgagcttcagagattcttggtgtactgcccaataccatggctcagttttagcaaaggagctatgtggaagctgacatacctccaactgaagttctgttcgaccccagcgagccagatctgtgttccttcaggtatcagcaacctcagaaggctgacagaggtcgccctctgctacaacgaaaaatacatcaacagccccagcatcaagatgacagtggaggcagtgactaaacaagttgccgagcatcgcaacccgatcgaccttttcatcaatggcattgaacaagatgatgttcaagaagctgacgatgaagtcacagagattacaattgggacttcaagcagtaccaatgctggagctgaagatgatgctcaaccagttggtgaggaggctacggcagtggttcaatgtgagattactgaagctgaaagttgatccagttagtccaggcttagctctacaagacatggtaatcactactactctgttgcttgaaattctgcttgtggtcgacaccattttcttgacagtttccatatactacactctgacagttttcatatacactcgttccaccaggaatgattagtcgtctcgtctctagaggcaactcaattgccggagggagatgagacaacaagagttacagcttggcaatccataccacaggatcctgtgtacggcttggtaatccgtaccacagcatgtaatctgtatatctcaggtcagaatgtctgatgatgtgctccccctgtcgttgccacattacttctaataagactgtcgtcatgtagtagcccattggttcctgtgtaggagtatgtactctgtgaaattttcggtgttgtttgtagctttatttacagtcagtgaggcctgtgtggaaatcagtttctgcctattcctacggaagttgaactattccacgcggatct

SEQ ID NO: 4624 - DNA, 7985 bp, Sorghum bicolor
tcagcacgtgcatgaagcattaaatatatacgcaaataaaaactaattgcacagtttaactgtaaatcgtgagacgaatcttttgatcctagttagttcatgattggacaatattttccacaaacaaacgaaagtgctacagtagcgaaatccaaaatcttttcgcatctaaataaggccaagttgtaaaagtatatcatataatgtatccagtaatattaatacaatgtcataaatattttattattctttgcttttacaaagtttattaatattagagcaatttaacttaggacaactcgaagattgtagggttttgaggcgaagattgtatagcctctcatatgcccgctgccatatctataggttagaattaatgttgttttggacatgtacacatgtccatataaaataactcccaccagtggtttgcaaataataataaatttatgacatttaaacaatattaaatataggatttttaaatgtaaatttaattgccattttcaatatccaagcccaacatgttaaaaaattgtaataattctttcttaaaaacagcatgcttcattttgttttttttgaatgaaacaagaggggttgccccctactggaaatttattgaaaattataacaacaaggtcatagtttggcgacctcatcgggcacaaatggacatactatattcaaaggcatattagctgattgagttttcctaagaagaaatctgatccctgtcccacaaaaagtgtcattctaacatttaaattttgtctacaaagagtgtgttactaaaagaaaacatatgggtttcacgtagatactttctactctactcacttataagctaattttttgtagggctatttgatcatttaataattacattgttttcctaacttctagaatgattctttttacgggatgaaggtagtctcctataaactatcacaaagtctaatgtgagatactaattccaaaaactatttgcttttcaaataaggagacagcttctaattaaaaattaattttgtttaatttttacttttttaattaacatatgcgcaaaaaaccgcagaacctcaaacaaattggaccttacaatgcgagcaagtctctctctctctctctctctctctctctctctcaatttggacttgtacatgagcaaataaaaactctgacctgggaccaccaccggttcgccatcactgaacgcgtgcacatcatcccgtttaaacaatggtctcatctcatgaccaaaagcaattgttttgggatagtataatcctaatcctttggacacctaagccgaaggcaatagattaaaaaacagagttgcttgtatgattgatgggctgtgatccgttccatggaataataaaaaattgggatgtgacaaaaggtggcaatgctatcttttcttttgtcatcaaaagtgtcagctggcctgcctttccttgaagccagaaaaaaagagattaaaaaaaggtgagcttcaaaaacatgaacgcgaaagtctgacgggaaggaaaagatttgaatgtaattaaaggatttgtgtaacatttatataaatataacaaaaattgtactatattgttgataaatttctttacaagatgataagagtcaaacatttctttgtctcatgatttacttttttttgtgtcatcaacctaccacagagttgggttttatgtttgaaaatgagagggagaaaaaggcaatgaaatgaggagggggaagaaaaagatcttggactagagaaatgtgtgtggtcatggtctcaaggatgtgacttcccgtggcccaaagcgaagcacccaactgtcagtctgtcacaatttgggccacactttaaaaatcactatcggatacgtactcacatcattcagattacacaaaaatcattcttgctggctgctaatcagatgccaccacatatatcatgggctccatctacaagaactgagagccatctgccccatctggtcccaaaagtggaaaaaaggcagagtggagcacaccttccgttttaggaaggtgagaagtgggggagccggggagttgggagagagagtgagagagagagagaggcagggatcagcggcggctggcggaggagatggaggagcgggagaagctcgtgtgcctggccaagctcgccgagcaggcggagcgatacgacggtgagggatctcattcttgcgcctctgcttaatactaatgcctgtatgcactgcagtctgtagtgttgttcttggcgccttgcattttgggggaaatccgtggtctcttcttaggaggaatggaatcgggggcctttggccttcgattcggtgcgtttgcatcggtctctgctttacttgcttgaactcgtgaacagtaacatgccgtccgccgcagcagcaactgtttttgttttgggatgggatttttctttctgcgctggagtgagcaatcctcagaaactgcagctgttcgatcactgcgtcccttctgcgtagcgattcctggctaatttcaatgttttttttttggtttattttggggactgtttggagcaacactgggggcaagcgtgttctcctctgatataaagatatcattttgacagcgatttgggaccaatctcgcgattgatgagtatttctgacaggtttctgttacttctagttgtgtcgatttgtgtctgctcaagggaccaacgaaattatttgtgtccaatggttcgtgggggccaattctttgagtgcccttgggttgcttttctacttgatgttgccatgagaagaaaagaatgatgtaggtatcgtggatgatgcaaatgagaaaaggaaaaaaacatagtcaatatacctctatccattctatttataggcttggtacccatgatctctattagactctacaggtgtggaataagtgaagctgtggaacccaatatctatgttcgcattcagattttagtttaatgtgaaaagaagtttagcaatatataaagtcatatcctttcttctgtctagactctagagtggtttcatctagtggcctagtacccaactggaatggcataatctagactccttcgaattgttatgcccaacttctggaacccattttttagcaatttggccacaactggatgcttgtctcttatttctttatactgcaaattgtttcgttatgttggctaggattctttaacctggggcttgtcagtcaatatattgacctgagcactaataggtacaatttggcataaaaacatatgactacttcccataaaggtccctgttgcgttattctttgaggtgtactatgaggttttgtatccatctagccttaatattccctctgaaaagtgcagacaccattttgggtctgaagttctccattcttcttcctcttgctcttctttttataggaacctcctgcctcctaaggatcagttatatcagtttagctcttattcctctttctttggcaaatctaagaactcttggaagtaaatggaaacatgacaaaaagtttactgaagtaattttcaatttttaactcaatcgatgattgttatggcagatatggtggaattcatgaagaatcttgctaggatggatgtggacatgagtgctgaagaaaggcatttgttctcagttggtttcaagaacactatcggggcaaagagagcatcgtggagaatcatttgttcacatgagcaaaaggtcacaactgatcgtcagactggtgtgatgatagatgcctataagaagatagtagaagatgaactaaggaaggtttgcaatgaagtattgtcagtcatcgctattcactgccttcccttggccaatacgagtgaaaatgtcgtattcttttataagatgtatgtacaggttccttgattcagcaatctgtttctcatttgcctttcattttctgatgatgccctattttctaatgattatgttcagagtttattttctatcaatatctcattaactttccaggtaaattgatattgctttttccaagacagtacaattttgagctcaaaatctcttttgaagagctcatttccaccaaaagtttttctggtaaatcatttgcaaagctttcatgattgatcatcattatggtagcaggagctccagaaaatggtgtatatctgtcccagaattcgtttgaattcctatttttgtttaaaaaaagtggcattacatatgaaaataaaataaaaatatatatgccaaactgcccaagcaaaggagatgaaatacacaatcacaatatttcttatatgtgtttttggattctgtgcacttttttagagaagcacaaaggtacttatgatggtactagatttagatgatttgctatatatttttttgataaagaaaacaataagctgcatctttcctaatggaattactactgagtactggatttaactgaagctacttcagtttatctatacatgtgaagctttcttgtagtagcgtattatcgggtaagatgttcacaaaggaagaaaaagaaataagtttaaatagctgatcaatctcctggtctccaaatgttgagcaagtcaagcggctttaatttaatgatatgacattttgttacattggccttcatttttagtttctttactatgaaattcactatatatgagggtagtctgtttttcagtcttacaaaatggtttccattatatggtaagtataatgaagttttttaaacgccctactttatttctgagaaacaattaccatgattatcttggtatctcattatcctgtccatgattgttttgggtgtacatcaacattagacaattgaatggtgtttcagtagttctgaagtgcttgatcagtcaattgtgtatctgacgctgtaggatgatactaggaattttacatggtctatgtgttaccctggtaatctattgacattaggtctgattctcttatcatttcagtgataatgtctcctgtgtagcacctgcatgttaacatcatactcctgtcctacaatattttccttacctgctttagatttgagtcctatactgttgcaggaaaggtgactactaccgatacttggctgaatttagcagtggaactgaaaagaaagctgcctctgaccagtcacttatggcctatcaggtgctaaatcttccaaatattatacatgggctcaaatgaacctttcggtaaagcctatcccttcctgttaaaataacaaacatttgctgcagcatgccatggttgtcgcctccagtgagctctcacctgcccaccagatccggcttggtcttgctctcaatttgtcggtcttcttttatgagataatgaactctcatgagaggtcactcatcttcaatggcttgtttctcccttttcattgatgtttcaaattcatagatattcctatccactcatgtttcatgttttgaaacatgggcttacttgcaaagaggtgactattttcaaataaaccattcacctgctgcagatgctttattactaagttaaattattttgttttccccaaaaggcattttgagacatttagccatttgcataatttaaacctcatgtacacaatatttagttaaaaatgtgttttacagtctgaatccactggatgctagttgggcacatgatagattcattggttctgcctttttttagaaaggctcaaaggcatttgagattatgtttgtttttccccctcctggaagctgtatttggccacgtgatagatttggtgtcatcccagtatgctgcttgacaggccactagtttttaatagcatcaagttcagtctctgagtttcatggttacctctctttttcagagcttgccaagtggcaaaacaagcattcaatgaggctcttactgagataaattctggtgaaggggtttacaaggatagcacacttatgatgcagcttctgaaggacaacttagcattgtggacatcagaactaaccggaggtaatccatctttgcaaaaatactttcttaccgttaactaatggtcacataaacctttctatcagagacaaaaagtgaagttgtaacttagcaagtagtagaaatttgtttgtatgtcccatttcatctagattattttatagtataacttataagctgtcaaattcctggtacaatactgactagtgggtacttatatcccccatatggaggagcaatgacttaacttcaagtgaaaagatatgcatgcattttgcagaccacgctgagtcactacagaagatttgagagggagttgctaggcataacaattcttagtaatcagcctataatgacataaattggatatcaagttgaactgtgccttgattatttgctatagtggcctgcagagtactgacaatgctttacttgaaattcggttaagccaaaactttccttcatattcatttatatgataaaacttacagaatattacttatcctaaatacccattcagtttcagtggctgactactcacaagtcacaatgtacctagaaaatgtgttcatccttatatgggacttataatttaggaattgaagattagggattatgacctacaacttgttaatattaataaattgttgacataagtacaacaacacaaagattcaactgacatgtgtttcttcattttcacaggtgaagcatccaaggataatgatgtcgacatggaggtatggtccctctacctatgacttgaatttggtttcgatagtgtgctgactccgcaatgtctgtgaaagaatgaagtggtccaatgcacaaaatactactatttgtttatcttatataaatgctttccaatgtaaaagcctggacctatatcacgacctcagcttgcattaacagagtgaaatgaaatacaaagtttgttccaattaatacgttttaaataatttcccaatattcttttgttagcaagctacaatagtttgtatgatcttataatacttttgctgacatgttctgagcatgcgctgatacatcttcaatgtttgggtagggttgattgatatgagctcaaggaacacagaacacacgcaaagtatccaatctgcgctgctagcgaacccgggtcctcaagtttttctgcatcggaattcggaagatccccacttatttttctgaagttttctgttcctctgtttcggccatcgtttggccctagagtcagtgtccctactaagtgtttctcagaggtctggactggtgaccatccaacaagctttggtcatattttgtgagcttgtgctggtgaccacccagctctgatgttatgttgcttctttttttttcggtgcttcagaggcatctttgtacaccgatgacaaaatgtatctcttatcaatacattaaaagactgtcgctgtcgttattaatctagctatcctgttccaggtgatgctatatcggcaatttacattgatgagagtgagttttgaactaaatacactggaaacccatctatgctcttgacagttttgctgatgaacatgtgggcgctgtgcgcatgcacgggggttgcaggaccctgatgggctgtaggaccgggccaatggtcaagagaagtgggctgggccatcctggcgagggtgcagtgggccgcatccaggctcgccgccgccaccaggtcggccttcggcaagccggccggcgaccaccccggcattctccgttattgagcttcctcgacctcgatgttgccaccggaagcagccatcgccgaccctacggcaacaagagtgagctttctaggtaccttccacgccattagcaagtcgatcgatgggccgggttcggtggtcagctttcacaagggccagggacgacgacaccgcgcgccatagtagcacgtgatcatcgatctttcaaacatgcggcgccgctgttgctatcatctgatagattgtgatctttgtctcgtgagaggtgagaaag

SEQ ID NO: 4625 - DNA, 2614 bp, Sorghum bicolor
ttatttttttgttaaccgtggcgggcctagtcttgtgaccgcctccattaaagacctattaatagaggcggttgccttatagcgccagcctctattaatgttttaatagaggggggcaggggcaaccgcctccattaagtcataattaaccgtgacctatcgttggagacgattgccccagcccgcctccattaacgaaaaacaaccgcctccaataaaaaaaatctctagtagtggtgtatacttctgttggatatatttgatctagtgtgctaataatatatttgttagtgacttctatgtatacctattacaagttattttgcatgttatatgtatcaaaagttccaaacaatagttcataggcacatgtcattttcatttatctagcagtttaagaattaaatacaaaaccctatcactttcattctaattcattttcattatttgcaaaggtgtaattctcttaagggacaacaacatgtgtattaggtgctcaattagatctaacaaaatctcgatgctgtttttgggtgtgacatgtggttgcagggacaagatggttcaagctttgtcagtttccccgagtaaatatttatgtcattctaaaaatggcgagttagtttacatcaaaggttttagaacacgtatgatgatatgcggcattggagagcaataagtgcaccttattgttgcccaaacatagttcatctacttgcatgaatgttgttctcacatgtacaataatataattgcacattaagtggccaaagatcaatttaggtgttggtctttgtgtgtgcataattccgataattctatctacatgaacaattgtcatacaaagtcaggttaatttatctaatgacaatgaatttaaattttttttatatttccatgatagaaatagtgtttttaaactgttatatataattcaaagtgaacattacaactaagattaccatcaatcccactatgcatagtcgcatggctggtcccacctaacacaacacacaattttggatattataccaacatgatgatgtttgtgtgtgtggtaatgctcaattaatcaagcatcacactataaggacgatttatatcttcttactctcaatcttagggcaaaataattatcgggcacatttggagactagtaacacattagaatctagaaatatataatttattatttctgagaagcctcagacatcagcctaaaaacttcattattgaattacaactagtaagcaatctaaaagagggcaccaccaatgaagggttgttggcaggacgttgctgggttcgccagagcaagctggatgaatggcaacaactgttgttgttgaaagagggtggcggcattagccacaccctgcgggtagaacggcagcagctgttgttgtggccagaaggtggcaggactcacagcacctagctggctgaattgtagtagtagttgtagctgcaaataggcagcagggttcactgcagctagttggttgaatgggagcaactgttgtagttgtaagagggtggcggcgttagccacaccctgcgggtagaacggcagcagctgttgttgtggccagaaggcggcagggctcgcagcagctagctggctgaattgttgtagttgttgcagctgcaaataggcagcggggttcactgcagccagttggctgaatggaataaactgctgttgctgggagtacgcagcaaggtttgccaacgttacttggttgatcgaaggtagcaccagttgctgcagttgttgtgccctgatgctttgtgccaacaaattcaccaaggacaactgctgcaatagggccgatggttgttggatgaacaagggtgatgactgtaagatgcttgctgcgattgcctgttggagcccatagggttgtagcattgggtttgcgcacactggtgggaggtatgcgggatgaggggcagctatagaaatttgtgagcagtgcggttgcgggatataggtcgcggtagcagcacttgcaaaaagagcaaggagcataatgagggaaaatatcttggccgccattgttgctatgttgctagtgtattccactttctatgttgctagttggtctcaataatatgggtgatggattacctactgatctggggggtatttatactcatgttaagccttgtggttgtgcaagatttattttggcttttaccaaaaaacataatagtaagataagctagagatgacgtggtatctagttggttttgacatttagttgccactttgttgggttatactttatacatctgcaatacaatctccacaaaatacactaaataagtggttttgtcctcttggtattttccaaatacttgggtgacaatggctcgatccattcacctttacacatgtgtagccttagccacatatgtgcggcttggttaggctattttgcaccagaaaaaaaattcatggtggtattcaccaatgttaatttgcatttggttattttgtgctataatcggttcaaggagtcactcgttccatgtcgtacaatgcggttaccacccataacctaccacaaatggatcatgtcaacggcagtgttacctcacaagaaccaaa

SEQ ID NO: 4626 - DNA, 10064 bp, Sorghum bicolor
gttccccgcttggagaagcatgataaaaatggatcggatacgaatgaatatcactgatatcatatttattttcatatttctggtcggatttgaatttgaatatggataatgtcaattatatcggataagatacgattggattttttttttgacaggaacggtaggggaatcctctacctatacttttttgtatttcaattgaataaatgaatgtaatgtacaagaagaaaaaggcaaagcaggaaaaaagttacaaggcctgtaggcccaaaagtgaaaaaagactcaaaggaaactgtctctccagactgttagtagaactcttctcttttcgttggcattgatgcacaccaggtccaactcatccttgagtcacaccataaatatacgatttaagtatttggatatgaatacggtattcgatgttgaatattcagactcggacggacaaatctgaatccctctaaacgaatttggtctcgaatacgatcgaaaaatattcataccattttcatccctaatacagaggcatagagctactaatattaagccacgacaagcaagtaatgttttaggttattaattaatctaacaattctaaactttggtccgtatctccgtttcagtttacaaggtgtttgataaaagagctgaaacaattttctctaattttcactaaaaagtttctataaaacattttatagggcttctttagaaaaactagagtcatagccgaagagcagccctactaaacatatccttacaaatttactaacagacccttacaccatcttttaccgtagaaaaaataatgacttgtttattctctcccaaaagtttacaaatctagaagcattcatgttattagatttatcatgaattacactataatttattggctttttcaagtatttgtatacttgtaaacctttttaagggaaaaaaatgcacgatcaaagttgctataagttaagtacttaagtagcaaattatttatatatttagcatagaaatttgaaaatattacgaggacattttgaaaatgtagtttcataagaaaaatcatttttctatgcttacgtatgtttttagggtttagtaccagtgtctctattatacgtaatctaaaaaaatgacaccaaagaaagataatgcattacgtgagcgtaactagaatgcaattcgcatcaacattttgttgttgagcatctctaatcatttagcaaaatttgttttccaaatcttattaatatagagaggaaaaaaatcttatctccaacaattttacaaattacgttactaaaaacaaaaaaacccgtcaacaaaacgaagagctctgctaagtatgaggagaaagaccggtgctctgcgcgtatatttgcgcgttagacagggagatacataccaagttagaaaagatgaaaaattgaggtaccaaactgttgttggaaagtttttttttttttgctaaaaaaatatagatggaaagtcatttgccaaacatgctctaatagaaacaaaattcctttcttttctatctagtagaaacaaaattcctttcttttctaaaacatagtaggagaacgatactgacatgactttgtttatatgaaatacatatcgcacgatacaaatgttaatccataaaatgaaatatactccatgtatcaagataaattgtcgtgcatccaaatggcacatggtacgagacgttttcatcgtcttatatttaataatgataatgatttaaatataagtgtttgtaaagatgagtgagtatctacgacgcactatatgacttattaattattaaattaatgttttttactcgcttttccttttttttccagaaaaagggacgagccaagaaaataaaaatggctattcgagggaagtaaaataagtgcagtggcatcgttcgtcatcacgatatcaattccggtgagggggtggaattatcccttccggcaatcttcgatcccggaatatgccccgtctccctcctcgcgtcggtacgctcctcctgccgccgctgccgcctggctcgcaccgccgatttgcctcagtccagatcgtgcctccctcttcctagatcgggtccgaattgggctaccgcgtggccgccgccctgcgccaggtgccaaggcgttcgccgatctcttcgccggcgaagagcgaccaccaggtattgcccaccacctccttctcttctcttcttccctgtccgatgtgcgaaaccgagttcccaaactaacctcaagctactccggctctttgacgccgacgaacttctaacatttgtcaaagatcatcgggtgtacggtttattattagatccgcccccctgattggaagcactaaaggttgcaatttctgttgcgaattcagaattctggtggttcccgtagctcgtggatgaggaggaggaggagctgggctgtggtgaaaaggaaaagctttgatttcttagccgccctggacaccgccgccgccgcagctgctaatgcccttgctggagggtgaaggatcccatggtggtttgatggtctgtgctatcgggtcgttggtgggcgcgcaagatgtatgccgtggggaaggtgagcagcctcatctcccgcagcgtgtactcggtctctggcccgttccacccgttcggcggcgcggtcgacgtcgtcgtcgtgcagcagcaggacggcagcttcaagagctcgccgtggtacgtgcgctttggaaagttccagggggttctcaagtcgagggagaaggtggtcgacatctccgtcaatggcgtcgaggcggggttccacatgtacctcgacagcaacggtgaggcctacttcctcaggaacggggaccccaatggtgaggaaggggagttcatcgtctcccccgcctcgtcaggagatgagcgggaggtgccgatccaggaagcacaggctcagctgaggaagtcgaagagcacttcgtgtgatagctcgacgatggaggctgacgtcggtgagggcaagattcttgcgaggacaacctcgaggcggaccaccatacttgaaaggatgtttggtcggaaatcggttaagaacaatgcccatgctgtggatagggtgagctcattggagcgagcagagattgctgcggaactccttgattccaagtggtcaacaaatctcccgcggagttcaaaaactaatggttcaaatgatgagccttccaagagcaatttggcagaagttagcaacaatgatcagatggaaacctcaaaacctattggttcaaatgatgaaccttccaagagtaatttggcagaagttagcaacagtgatcagatggaaacctcaaatggttcaaatgatgatccttccaagagcaacttggcagaagttagcaataatgatcagatggaaacctcaaaacctgtgttttcagaacatagcttggatcatgggaaagagatggactctaactgcgacaatgctccctgcaattcatgtagccctcgtggaggaagaatcagttcagcagatgaaaccgatcagtgtttacaagccactattgtgaagaaagaggtggttgagatacacacgcgtgagagtagcgacttcactgatcatatcacttcaaccacacatcaacatgggtcagaacctttgtcaaatgatctgggaacagataaacttacgcatcagtctgtcgatactcaagataagttgctgcatgatgttgaagatgttgctggaagggagacacatacagaggaggttgagatacacacgcgtgagagtagcgacttcactgacaatatcacttcaatcacacatcaacatgtgtcagaatctttgtcaaatgatctgggaacagataaacttccactcgatactcaagatgagttgctgcatgatgttgaagatgtttctggaagggagacccatacagaggaggttgagatacacacgtgtgagagtagcgacttcacttcagtcacaaatcaacatgggtcagaatctttgtcaaatgatctgggaacagatcagcttactcatcagtctggcgatactcaagatgagttgctgcatgatgttgaagatgtcgctggaagggggacacatacagaggaggttatttccaatggcatttttgaaatccatgttgttgagacagacattacaagtggtaagagtgaggtggtttctgagattgttactgttgattctgatggagctaaccaaaattttacagatacaaattaccaaaattatggcaccacagatatatcagctgaaaggcatgaggtttcattgattccttctgcacaggatacagttcaagagaaaatagttatcctcagtagttctgagactgtggagggttcactagatgcagttcaagagaagctagtcattctcagcagttctgagactgtggagagctcatatgctgtgtcgtgtattgtggatgacacagttcatgatgcttatgatatttcacaggctgacagtgtacaacatgaggagcactctggtatctctgatgggagcacagaaaagctagtttctgaggaaagttctttagtatactgtggtgctcccagcaacaaaaaggacttggttaatgtatctgttcaagaatgtgaagcttttatcttagaaaatcctgctccccaaatcttggaagagaatggtccagatatggatgtatctaccgacagtgtttccctttcccatgcagatgcagctcatgatttagcttgtcagcatgtttcttctagtgttgtagagacaccaagttatgagcctgacattggtcctgaagatgtaacaaagaactcaattgtggaaaatgaagcatgcagcagggagcttgttgtttctgttattcagacctcaatgggagatggactgacagaatgcattgctcagccagctgttttttctaataaaatagaagtagagggctcaccaactgctgttggattttccagtttggtcagtgttgaaatgcaaaacacaaaactagaagatgacacaaacaaatctagttctgtgattggagatgaagttggttttgcagctgaggctacagctgagcttgatgaagaagcagaaccagttgtatcattctctgaatatacagaagaaattcagtttcaatttagtgatactgaaaattttgtagatagaaaggccacggatgacatggtggctaacaaaacaactggtgaagtagaacatgacgaatctgattgtgacatagagaaacgggaaggaggtgatgtaggtcttgcaaatgacttggagaactgttctgattcattaaagcctgtgactagccctgtttctattcctgcaattgacttccagtcaggagatagtaacatagaggctaaatctctaccaaatctccgttctcatatacatgatcttgaaaggtctgatagttttcagctaagccgctcactacaattacatgctgaaaataatggggttgacccagtcaagagcacatcaaatgctgaaaatgatggggttgacccagtcaagagcatgaattctgcttttcttgagcagaaatcagaagttattggtgattcagaagaaaatatcagcccacctgaggttaccagcaatgtagcacctgatgtcaagcatgctgataacctgaaagttgatgcattcatcccttttgcaggtgatttattttctttttgcctggaacttacatttatagttgttttaacagtagtaggttataatggtctttatcttgcggagcttgatactgttcaaaagtttccccaataatttagttgtattaagtgaatagtgaaactttgataaagacaaatttggtggattgttttgctagttttgttgcagtttttgtgattcctgcaatgtctgaatagtgtgatactgaacttctgaagtaacttgacaacaatgataatctctatctgtgccatttttgcagaattatcactatgcaggcacctgttatctgaaggcatgggggaggatgctgcttgcagtgcatttgattctgagaagataaccttagagaagttccgtgacatgaagcaatcgctgatgcgaaacaacaaactagttgttaggattgctggccgctattttccctgggatgctgctgcgcctatagtgcttggtatgatttctttcagtgaggaacaagtttttgaacccaaaggaatgataaaggtggagcgagttgagcaaagtgaagctccaggtggcagctggagaatctggccatttagttttagacgaacaaggactattagtgctatccagccagtttgtgaaagtactgttgagacttctgtatccactcctaaagaatccacacctgttaaagaactagatagagaaaggaataaatccagggtaaagaggattgagaggaaggtgcgatcactcactccaacatctgaggagcttgcatctcttgatctcagagagggaaggaacgtggtaacatttactttctcaactgcaattgttgggaaacagcaggttagtttcactcaatctttttcaagtttcactaagttgcatttctcatcttcccatcttttctttaacaggttgattgccacatatatttatggaaatggaatacacgcattgtaatatctgatgttgatggaactatcaccaagtaagttgcaaaactggagcaatcaaacatatgttttaatgtttaattattattgtttggagacttgatcgtcaggagtgttggttattccacctttcaaatgatgcacatattctttggttgtgccgtgtatgtaattataagtttaacacaatttcttctttgtaatgcaaatgataagcagctctcgtgtgtattcaagaaaaaaaaatgatacacagttataattatattgttctgttaacccattattcttaatttctctttgttgaaaaatctttatttgtaaagggagcagaaaagaggaagataatgaattaaatacaactaagttttatcattaaacaatataggaaatctgattcataccaccgactaatgctgtatattaaaatcttacaaatgatgttttgtcatatatttgtaggtctgatgttcttgggcagttcatgccactagttggagttgattggtcccaaaatggagttgctcatttgttttctgcaataaaggtattcatgcttaacaaagtaaaacaattttcaatttcactaccagatctagtcgtgccatagaaaggtactcatgcttttaacaaaataaatggattttcaattcacttccagatctagttgtaccatagcagttgattgagtcttgttctttttttttctgactttggaacatcattcaagtctcaagaatgcgatcagtgaatgtttgttgacatgggtttgttcttgttatcttgttgcatccacaggaaaatggatatcagcttctatttctgagtgcacgcgctatttcacaagcccacattacaagacagtttcttttcaacctaaagcaggtacttctaaattcagtcctaagtcctagttaatcttctaccttcagaaactgtttgtggcttggtacacaagcagccatgaatctgttatgcctaatcacgtagcaataacacaggcctggtcatgtcacacattcacaaagacccagctacagagaaactaataaatagaacctggtacccatctatcttattccctcatgtatattttgatttcaggacggcaaagcacttcctgatggccctgttgttatatctccagatggtctcttcccgtcactttacagagaaggtgagcacatcgtgatatattttcgctattttctattcagttatttgtcagtgagcaaaaagagtagaagacccaaaattacttatctccactgtgaaaaatgttgcattcattacctctaatattaacttgggttgacatgagtaaactgggtgttgctaccttctaataaacttggtgtttggtaagattcatttctgaataacaaaatcaccactctttttggttttggatcccctcaaccattgttgataagaggtccactcctttttagcaggtctatgataagtgctcataatactatcatgttgacataaaaagtaatccctccttttcaaaatgtaaggcatattagaattaaaaaaagcaaaaaaatccatcaattagtcaaaacatttgtgcatttagtgtacagaagatgtattgacatatttgtacattcacatgcctttattaagatgttgctttgtagtagttgttagtacaagaaattaatggtttgccagttccttaaattctaacatgcctaataagaagaaacagagggagtacatgtttgagtgatgctaatgttttctgacattggtttgtagtcatcagaagagctccacatgaattcaagatttcatgtttagaggtgagtactccctagcagcctagtgcacacataaataaggcttctttgcttctttgatgttctattaatgatttctctgtcctttacaggctatcaaaaatttatttccacatgactcaaatccattttatgctggatttggaaatagagatacagatgagattagctacctcaaggttggtattcctatgggcaagatcttcataataaaccccaaggtaaatttaagacagaaatcactagcatactcgccctggagatggcatctagagaattcgtgttaaaattttctgttgatgcagggtgaagttgcagtgaatcgacgggttgatacaaagtcatacacatccttgcatgctcttgtccatgggatgttcccgccaatatcgtcatcgtctgagcaggtcagcattcccttaatatttgccagcagtttaagtctacttactctttctcaaatgtaaattgcttcttattctgatgacaagttcttggtcaattcaggaggactacaatgcttggaattactggaagatgccactgcctgatgtcgatttgtgaggtacaagtcaagtctgcacaacaaacagcactgcagtaattttttgatgcgctgtagtgatcatgagaaggcagccatggtgaaggtagcgcaccctgaggtatttcatttcaactatttttggtctacttagtttcttccttcaggagcttgtgtctaacatgttcggtgcattggccaccgctttctgcaggccaattgttggttggctacatgtggatgctcctgatacaagctcctgcaagattgaaattgtatatataggatcataatagatgactcacggtctgtatgctgatgaggcggcaggagcaatgtagctatttcttgtgactcctgttgtcgttgtcgttgttgtcctaggactggaaatcatacctccatgtcctgtaagtgaaggtatataaattactgaatggagggatctgatagtggagtacatgttgcaaacccccctggcccttttcgattcatccttgatgtaattgtggtactgatgtaatttgtacaagagcaatttcaataatgcaatagaaagtcagctgttcatatgcagatatgctagtggttagcttttacaccattctggcaataacaatgttgcattgaccgtaggtgcgtccggtaacagaaatttggtactggatttaccagctatgtgtgtcatttttggtatgcctgcgagttttcaatagtatacgctgcacagaggctaaatctaccgaatctgtcagctatttagcaatttagcagtgttttttctcataataaattagttatgacttttcagtcaagcaaataggttttagctatacgcatatactcctatgtgtaaaaagaatcactattttctgctaattaaataaagctttcttatttctttgttctagtatcacacattattatatttatttatacttcttccggtcagtatttatttgtgtacggtctttgatgcatgtttgaccactactaatatatttgtggaatagattttttcgatgactttaacatgtttaactaagtaatttaaaagtaattaatgttttaattt

SEQ ID NO: 4627 - DNA, 9610 bp, Sorghum bicolor
tcaatatggagcaaaccaatcattttgagcgagaaagggaatttgatttgtcttattagctttgttaaacgaagggcaatatttcaccaccatatgctgagcgttttgtagtaaataaaattatgtgtgtggccactgaataagaagaaagacttagcataacagtcataatgcaaattgacccaaaatcgtgtgtttgtcttgaactttacctggtgagcggcaccgagggcacactgtagtcgcagagtagatgttcgtcgtttcacccatccggtcggtgctgccaatgagatcagtgcagttggcagatgccgtcgtggcgtcatgaggagggatgtgtacgggtgcgcgtgtgccgtgtctgcatcggggcgcgccatctcaacgagctggtcgcatagcgccattgagggcaccgagagggaggcatcctcatcatcgtcctcctcctcctctgcgtagccgtcgcctatgcctatgtggttggcgtagcgcctctatggccgcctccgcatgccgcagtattggatctccgccgatagcaaggactgtggcggcaagggcttcgcatgcccatctcggcgttgctcgtggcgccgtcggaggcggcgatggtggccacaggtgactcaaggatcgggtgagagacgattgagagcctgccgcccgagcggggagcacctggtgtgggggcgagcggcgacgttgaggagcgttcaccgttttttcctttcacggggcagggtcagttgctgggaaggggagaacacatgattgatggtgattttcttttttgggtttttttacgccgtgcgtgaaaccgccttgcgggcctggcagcgggagcgacttcgcatagcgtgtggacgaaatagttttatttatatttatatgttttatttagttgtagagatagtacttttgtttttatttgacaaacattgtctaatcaagaagtaattatgcttaaaagatttgtgtcgtgatttataggtaaattgtgtaattagttttattttcatctctatttaatgcttcatataggtgccgcaaaattcgatgtaacggataatcttgaaaagtttttggttttttgataaactaaacaagaccttaatcagagctttaggccttgtttagatgcaaaaagattttggatttcgctactgtagcactttcgtttgtttgtgccaaatattgtccaattgtgaactaactagaatcaaaagatttgtctcgtgatttataaataaactgtgcttcatgtatgtgccgaaagattcgatgttgcgagaaatcttgaaaactttttggttttcgaggcgaactaaacaagaacttattattaaatcccaaaaatcagcacatgtatttcattctgccacgtgctgctcctgcaccgtcgcagtctcgcagcacccagcacgacacacaatccacatcctgactgcaccacccggggggccacacggatcccgtcacacaccggatcccccgcctgcctcactgacctccctcctgctccatccatccctatccactcctccaccccgctgcgtgctccccgtccacgagcgccgcgccgccgcggcccccgcgatctctctccctgtacagtggggccacccaccaatcagtggctcagtgccacctcactccgccgcgcaccaaacaccgcgcggcctcacgctccccgtgctccgcccacagtaacgcacacttttcactccacccctcgagctcctccacaaccgcaaccagcatccactccagaaacctctcacccactgacactctggggtcagagggtacggttagagatatcgacaatctcagggactgaaacgaaaactcctcacgcccatggaaatatcccgccgcggccccggctccaccccctgcgctgcgctctgcttcttcttctcttctcttctccctcggcttcgagggggagggttatttttatttatttctttctttccttttttttcttttctattttctttcttttttttttctttttgggtttttttccttcgtcctcccgttggggttttgcgccccgacgaaccctaataatcgccggggaccgaccggcggccgatcgccgcgcctcgcccgcccgccagcccgccggcatgcacccgcagcggatgaagcaggccgcggcgcagcagcagctgatgcagcaggccctgctcctgcagcagcagcaggcgcagcagccgcccttgttcccggggcaccaccacccgcaccccggcctcctcgccgcgccacaggtgagggcaactctctgtgatttctctttctcgtctctcaggttcgatccacgtgacgggcgtggctagcgtgggaatcggggggttctgatttggggatttccgcgcgtaagggagccggtgggatttgggaggttcggatcggatttgtggatttccgggcgcaagggctattttggggtatcggggatgcggtgttccgctcggattttgggatttggtagtgttctgcggtcggttatgtcaatcgcatcgccatctgtcgcgattctgggatcctctttgcggatgcggccatttgtcgcgattctgggatgcgggtcgttgcgtgtcaaacaatttagatttctttaagtttctgctagggtttgggtgattaaatgttttcgtccagttgagtttgtttttggtaatcgttaattttaagatcatcttatcttataccattgtgcatggggcgactattgtgatgtccgaattttttttggttcatttttagtgaaggagcaactttgaacctttgcaaacttcaaagggaacatatctagtgcaaaccacaacctccgtgaaaacttgtgcaaaccatggcaaaaaagtcatctaaattcataaaaaaaacacacatgtagatgatatgatgatacacaaccttgtaaaatattttatccaaactcaaatttatttgtgagatataaaaataacaaatttctagcaacttctgtggacacctttctggcttgaaatttgttatttttatatctcacaaacaaagttgagtttagacaagatattttacaatgttgtgtattatcaaatcatctacatgtgtgatttttttgatgaatttagacaacttttttaccatggtttgcacaggtttcatggatgttgtggtttgcactagatatgttcccaacttcaaaatcctccgactaatgtgtggttttagtagagctgtgaactaagttatgaaatgaaatcagagatgttaactctgtttgcttacttgtatgtctttgcagatggagccaatagttagtggaaacctgcctcctgggtttgattcgagtacatgccgcagcgtgtaagtgttggtagttgttcttttcccttagtcatgttcgaaatgaaacaaggccattatgcagaatgttctgtgtttaatgttatagaagatcagattgccctctgcatgctgtaaatctgcaaaataatgttgactaccttttctacattttttatcctttttgtgctcatcgatcacgttctcaataggtatgttggcaatatcagtcttcaagtgacggacacagtactgcaggaagtcttccaaagtattggtccagtagaagggtgcaaactcatcaggaaagaaaaggtggatctttttttttcttcttttaattaaaaaataaaaaatggctaaagataatttgtaacagttaaatccatacccccaactatccccaacacccaatcgcctgaaaaattgtggctgccgtttcagattgctctctgcatctgatttttggctttgctttacctgcatgtctcaagtctagttaccatgggaatacacatgtgtaacatgctttgcatattttcattttcatggtcttaggctcttgttttgatgaattaaatgcctgcattaattctttcaatactttctgctaagtttgagttatcttgtgcttaattgtatattagctgtattaaaagcactgtgatacataaaaatttttttagtcacttgaaaatattaagagaaatttagttatcggggagaaggggaggggattgggttgggttttgattctccctttttaattgtagatattatgctaagtcttttttaggaacaaaagttcaatttcagctggctgactacaatcagcggtgtgctaatcttcttttactggaatgaaagcacacatgcagttcagcctaacctatttatctaggtgggcataagagtttcattgctattcatgttagtttttaaaagtgtgatgagtgcaatatggtgaattgagatagcatcggggagctgagccatgtatgttactgtggtttgacttgtggtgtgctgtagactaatttattgacatgtgcttccatacccatctctaaattattatgctgtactatcagttcaaacacatatgagaattaaacgtttgtggttaaaactgatccatccattctgtagttgttgtctaccgccttttagaatttagagtgacacctttcgactagcatatatatcagggagttgggagaatgccatagttagaacttagaagctattagatgcaagggacattttgaatgtgagacatttattttattggctaaactttgaatgaatgaaaataattatgattttaagtatggttgttctagtgctgccaaggattaggataccttaatttgggatactaggtttgcttatcctctataaattacattgtttattagcaatgtggccttaacactttccattctgatgttgcagtcatcctttggtttcattgactactatgaccgcagatatgctgcactagcaattttatctctcaatggcagaccactgtaagctttttggttttgtattccctccatttgtaattgtaagtcgttttggcttttctagattcataggtgtatagcaaaactatgtacctagaaaagccaaaataacttgcaattggaatggaaggagtatgtgctaatttctatgatcactgccctgttttttggcactaattttctaattatcaccaaaaatccaggtatggtcagccaataaaagttaattgggcatatacaagtactcagagggaggatacatcaggtttggaactcaagatgaattaataatatattgtatatttgtactttacttatttcaaatcatgcaggtatgtcaatgtatggtttctgaattctaagctttgtatgcaggtcattttaatatttttgttggggatctttgcccagaagtcactgatgctactttgtttgcatttttctctggatactctacctgctcgtaagcattgcctggctctcatctcccctccatcatttacttgtcattgtgacattttagcagagtatagttttttaattgtccagtcatggcatgtctgctctatttacaattttagcttggtaacttttgcagagatgctagggttatgtgggaccagaaaacaggacgatccagagggtttggttttgtttctttcaggaaccagcaggtagtgtcaccatttttaaacccttgtgcatcgttgccatagacttttggagctgttgtttcatctcactgtgtcattatttccttaacaggatgctcaaagtgcgataaatgacttgaatggtatgttctctagttccatgtttctaacttatggttcattttggagtcctaatcttcacaaggtgattacacctggttacttttctactggcagggaagtggcttggcaaccgtcaaattcgttgcaattgggcaacgaaaggtgccaatgctggtgaagagaaacagattgtggactccaaggttgacctgacaaatggcacatcaggtaaatacatgtgctttgacttgagcttctctttttctgggtgtttcaaaaagcgctagcctctagatgtgcctagtagcaaacagcctaggtggtgcttgacatttgtactttccgtggatggtatgccatgcttaataaagtattttttttggcatactccctccattccaaattatagttcagtttagttttgtcctaagtcaaagttctctaacttgatgttatatcaagactacaagttcaaataaatgtactatcaagaagtttcatgcagaatttaatgaaaccgatttgatgttgtagtacttgtagatgcttgtgcattttccaacaaacatggtcgcagttacagaagtctgacttaggacatagataaagtggttggaaaggatagagtacctaaaaccttagtttttactccctccgtccccaaaaagttgacatcctagtattcaaaatttatccctaaaaacttcattctagcccactagacataatgagtctatccactgtaatttagggcgctaattagacccaagcatgctaactaatctgcatgcctgcaataggttacttaattttgtgagcgctgtggaaggttgcccatgtgacagccctgtttcaagggaaaacacttcctaataaatagggtagcacgatcattttccctcgatactaatatgtctgaaaaatcctaggatgtcaagttttttgggatggagggagtacgattttaattcataggtaagatgggaattcggtggcttgaaactgacctgcgacaccttttaatattcttttgtaatgttgtgcagaatctggaaaagagaatccaaatgaagatggtcctgaaagtaaccctcagtttactactgtctatgttggcaatcttcctcacgaggtaatactcttccaatagatgagctgctgtctatatgttaactatgcatcttgcgtttggctttctatttgctattactatttttttgttaacttcttttattgtcttatcaatgttcttccatgttttcttgatttccaggctaccaacaatgatgtgcacctgtttttccattcacttggggctggctcaattgaggaagtccgtgtaactcgtgataaaggctttggttttgtaaggtacagcacccatgaggaggctgcgcaggcaattcagatggctaatggccaacttattggcgggaggcagataaaggtatatttagttctgttcacatttccttgataacaggatttagtaaaatcctgaaagttcctaggtcaaattttacaatagaataatattgttggtggataactagtagtattactaggcctgcttattggtcaaaacccacccttttccaacccacccccaccccaccccacagcaacaggctcaaccttcccagcccattccaagccatgccaaactcccactgaaagaattcacccaacctatgtaggtccaacccaaaccccccacctacatgacagaaatttgctagtgagagcggcaacggggagcagtgtggtgccacggagagggacagaggaggatctggggcgggtagatgtgcagttgtagttccgcatgaatcagcagcggtaggggaggacagggcgccgccgtgagcccaactccggtgcttctgcttccaccggtccagcaagaacaggctgcagatcctgcccaccgcgagtgccaccttcagatcctgcacctgtacatcaagccaaccagaccactatctacaatggtgtctacaagctcagggcagtcgaggagtccgacttctgtgaggtcctactgtactggtctaggctggtgactctggtggcgtccttagtggtcgtggcctctgctgtattcctgctggagggcaacgatgccgtcaggcagggcatcgacctcctgtacgctgccagcaccgcaggtatggtgctgtcaacatgtcactgctcctcatccacatctacgtcatgccaaccccaatcaagcgtttcctttaggcttcgctgtgggctgttggggacttggggtgcttggcttcctcgtgacctaccttgtcgctgcccagtcgccggacgagggcttattgacgaggatgaagggcgctgcatgcactgcatgcgaggtgattgtccgccggagcaaactgtgtggtggcagcgtaaaagagtgcgccgagaagggcgaggccgtggtggctcgggtgcgtttagctgccgattgcaggattgaggttcgccatgtccatgttgaacccaccggttccatgggttcctaacctgacccaccctgccccacatctcttatactcctcgcccaacccagcctgctgatgaacccattcgaacccttctaaacgaaatcaaatgagaacccagcccatttaacccaaacaaacccaacccattagcaggcctaaactgtattatgtgaatggtttgtaggtaatataaattggtttatctacattatcccctgaaaatatagccagatagtaaaacttttgtttgtatggatttatttattaaggtatgtacagaaaatcttggtatggtatgcatgatattatctagctgtttagttgtatgatgaaatacattgatcacagcaaattactgaatactctttgccttaatttgttgcagtgttcctggggaagcaaaccgactccaccagggacagcatcctcgcctctgcctcctccagcaccggcactgttctccactggagtgtcgccgacagacttcctggcataccagcgcatggccctgaacaagatggccacgaacccatccctaatgggtcagcacgccttgaatcaggtcgcactggggatgggtggccgagccagccagtccatctatgatggcggcttccagggcatcagtactgccgccgccacaacctccgcccagcaacaacagcagcagcagcagcagctcatgtactactagagtactactactccatgaggcaccagctacctatctcttaaagaggaaggcgaggatgaatggatgatgccccttgctacacccttatacatatagtagatgatgtactaccaggaccttttttataatcttttaagacccatctaagtaacatgtcctctctatgctagctatatatatctatatacaccctataacgtatgtatttctggatacatgaacaccccaaggttcttagtataatcttctgtgtttgaccatcttttattgtgccgtatggatttttattgccgattactgtatatatacgttactagacttgatggcaagcgtcatgttctcgtaactactcactctgttcaaactataaggctctcattttctagaaagttccactaattttaattttgtgattaaaaaaaatctagaaaacaagtaataatgtttttaaatcacaaaagtatctctaagttgtctaggtgccccttaactccaaaatcgaataactgtctcgttcaactctcattgtttttttttaaaattatctctgccttggttagaaatgatttcaagatggtttcattatttttactttttggaataaaaaatctacaaagcagatgacagttcttaaaccacacgcttgtgagatctctgataaaaaaaacctagacataaactgtggcattttttggaataaaaaaatctataaagcagatgatagagtttttaaaccacatgtttgtgagaactttgaga

SEQ ID NO: 4628 - DNA, 3371 bp, Sorghum bicolor
ttgtatatattatattaaatacttaacaacattactttttgtagacgatgtatatatcatcaacacataccccccatacatcatcaataaaatcacagaaacacaaaaaaaaatcgtcaattaaacgggaaaccaaagacagccgacaccaaaatatggctttgctttgaacgaacgagatttgaaatccaaaaaccctcgtgcgtttcgtacgattttatgacaaattcgttcacaaaattgaattcgcggaggaaactttcctctctgttgaatcttgtgatctcacggcaacgaaccgggggtcggtcaggtcaggtcaaacggtcagtgactcactcactcactcgtagggtggggcccacccaagcacccgctccatcatttgggaatcatggcgacgcgccgccaaccggatcggaaatttccgaaccgccgcccgcgcgggcccctacccaccctcgcaccgacgccgacgcggttcctcgccgtccgatccgcggacgtcccgataccgacggccgcgatgcgtcgcggcgccggggcggccgccgggcgcgccgctattaataccgtcggcctccggcgacccaagctggagaaggattcagtaactttactcagcaaagttacgtcgtaactttccttccatcgtgtacgtccattcaagatccaacagactccgtgattttaagtaaaaacacctctcacacttaggccttgtttagatacgaaaagattttggttttcgctactgtagcactttcgtttgtttgtgacaaatattgtctaattatagactaactagcatcaaaagatttgtgtcacgatttacaggtaaattttgcaattagtttttatttttgtctatatttaatgcttcatgcatgtgtcgaaagattcgatgtgacagggaatcttgagaactttttggttttcgggatgaactaaacaaggccttagccattttcagcctgggctgctgggcacgctatgcaggttttgtttagttcccaaaaaaattcaagatcctttgtcacattaaattttttggacgtatgcataaagtattaaatatagataaaataaatactctcttcatcttaaattataagttatttctaaaattttcaagagtcaaaccatctcaagtctgaccaaatttatatagtaaaataataatatttatgatgtgaatttaatatcattacattcttcattagttatattttcataatatacctatttgatgttataaatctttgtaatttttctctataattttggtcaaagttaaaatgcttttactctccaatattcttagaatgacttataatttgggatggagagagtaactaattagacagtttgcatataatttgcgagacgaatcttttgagcctagttaatccatgattgaacaagaattgtcaaatacaaataaaagtgctacagtagataacatcaaaaattttcgccaactaaacaaggccgcagtcatgcaggtagcatgtaccgagcgcgcacaggcagagggaggcaaaaacaaagtagaactggtacgagtcttttgacacatgcatggagtactttactgtctgtcacatcgaatatttggacacatatatggagtactaaatatagattatttataaaatttaaatacagttagagagtaatttgcaagataaatcttttaaacctaattagttcataaatgaacactaattgtcaaataaaataaaaatactacagtatcagttaaactttaataacggacgtgcggtatggagggctcaaagggccaacgtaccggccaaggcagcgaccatgtgatgcactctcgtgtgaagaaaagagtcacaacttgatctccaccgttcgaccttgattggagggtggatgacagaggtaaagttacgacgtgacttgaaggagtaaagtcaccgaatctgtgtccacccaagctggcactggtgcaagcaaagcagcttcctttcgtttcctagcggagcactagtcgagcggcgagcgaggaggcggaggatgggccgcggcaggggcgtcagctacggcggcgggcagagctcgctgagctacctcttcggcggcggtggcgacgagcccgccgcggcgcccgccaagccgacccccgcggcggtggagcagagggcgcagcaacctgcggctgctgcggcggcgccgacgccggcggcaaccgtagacggcgagaagcagaaggggatcccggccggcgtccgcggcagccagaccaacaactacttccgggcgcaggggcagaactgcggcaacttcctcacggtcagtcagccagccgccggcgacctagtattcctcctcttccctcttgcctctccggtcctgacatcgttgtctgcctctgccacggcgtgactcacaggaccgtccgtcgaccaaggtgcacgcggcgcccggcggcggctcgtcgctcggctacctgttcggcggcgggcctcccggcagcaagtgatgtgatggccacctaatccgagtccgagcagagcttcatcgagagcgcctcctgctgggcaagcttgattttaactagttcaccgtaacctgctggatgtgccgtgccgttaatttccatggagaaatgtatgttcatgtgtatttctgtgatttagaaatgttcatgtgtatctctatctctgcaatttcgttggaatcggtctcatcagtacctgtatgtgtgtgtgtgtgtgaaaaactgactttgtcatgcttgttgtttgcatctgctcatcagaaagttcagagcatgtgttcatcagaagttcagaacatgtgtaaagtgttcttgcaatactaatggtctagattctgtttacgcttgaaatttggcacatgtgtccatctaccatttcatttcaggttcaggcttgaatactacaggtgcagaacatcttgtctgcatttgttcatcacgcttgaatagcacaggttcagaacctgcataaaggggtggaccatctcaggttccaaaactttttataacctgcctactctcttgtaaaataagcagaattctatgtggcctacagcacctcactactgccgagtccaaagttcagcacaacacttttgcttcataaaaaacatctcacgttgcagttcaaaaaggttggagcaactgaagacctgcatttgcttacatataacgcacaccagccccagaattttggacttcaacaacacctggctaggatagaaggaaccgtgtgtggccatgaagcacaattagcgacaccacagaagcaaacgatgatccgtggaacaccactacaatgccaacatttcagtctctgatgccaaatagctattattgc

SEQ ID NO: 4629 - DNA, 3825 bp, Sorghum bicolor
aacattagcagggaatcttaacttgtaagtgacatattgctgttttattagagtctatgttttattagagtctatcactttcagtgagataataatacaccttttgtttgcttactagcctatgtgttagtgaaacatcaaaccatatcaaatctttgacacagtacttcatgatgtcacgttggttaggaaataggattaatcgaagagattgcacagtatcaacttgtggctatgaaagaacctatggatatatgcatccaaacatcaaaaccaaatctttccttaatctaatctaaataagaacagcctttctgccaaacatctgcgaacgatatgaatggaaaaatcagctcattaatcaatgagattcacagacagacatcatgcagcatggtttcgagctaatcatgcatatttgtgcgtatttcatatctctggcttgtccaaatcaatgggatagtttaacttaatatgcttagctcataaacttgagaaaagccaggaggatcagaacatgtcaccaactactctgctgcatcaatcagataatgactgaagacaacccaatcacattcgcggatctctctttgtatatacatcaatcatggcatagtttatactttggatccaatctggttaactttcaactgttggatcctgtatttagagaccaaaaagaactggctaggtggcctgctcagatgtatgactgatataagaaaattagcaccatagagataccaaattgccatggaaaaataattctctacacatagcacacaatgctactacaaaaaagtaggtgattttttcttggcggtgtacattaatgcttcaggtttaaacttagagttcacaaaggtctatagttacatcattgcaattatgaatttttgaaatgccaataagctaaattacattttccttactttttttgcattgacttcaatttaattatcatcagtgcatctgatcccttatatctaaaaaaagtaatgtttttttaggcatggttgttttacttttctaggatcgtcaactcaaagaaaacttgccatgattacttgattaccttctaaaaaaatcttatcctggcagaagcacgattgctgctaaactaatgtttatagtagctgtcccaatcgttcggtagcattgtttttcatatgaagcagatatgtttgacttacgcagatactatataatgacagtacgtagatactatatacaacatacaagtcctcttcccatgtgaatacgagagatctaaccacagggcctgtctagttgtctttttttttgagagaacgcctgtctagttgtctcctcaataattcctctggagtagtgatcgattcacaaaacattaaggagttgaaaactaggctccattacgcgtctccgggctagtacaccgaagcagcaaacaatctaacaataatggacaaaccagcattgcacagaaagtacaaaatatatacatcagttcccaagaaaaaaaatggtagacctatctcaaaacttcaaaaaaaattgagatgcttgctaaaacatatttttattttcatttggtgccaaaaacccaaccgaaaggtcaagaatcaatgtgacaattacaaggtcaagctatgaaagaaaaaactggcaagcatgactgaaacagaaatgtcaggggacgcataagattttgaggttggacggagatgagatgagaataatacggcagctggggctgctccctcattatgctaggcctatccttttcttggcactacatggaagcatctttggcacattaagatacacgaggtgattggccggaggagctttgatttgtttggcatgcctacacacgccacaggagaggaggggaccccacacatgggcttagaaggaagctgcgctagctcatgacaacaggacaggttggggcagaatcttatatctctagatataacaggccatgttggacggcttgtctcccagcagagacaagagcttcttcttggcctgctcctgttcttgaaaccagaactagattagagtgggagagattgcgctgtctgacccaccgggagtgccagccggagatccttaatagaggtgagcatagaactgtttctctgtttttgtcctctgttttgtttcagagtccctagtgtttcatgggtattttccttgttcttgttttctcggaatagttctctgaaaattgtgaaattgcaacggccggatcacagttcccatttgcagtgtaactgatgctgaaattctcgtgaaacagtcaagagattggcatgaaccttcaccaagacatggacagggagcagatgaggatggccatcctgaaccaagaacagatcttcagacaacaggtactaactgatggcacattttgtatatcccaaaaaaatatgctgaattaactctacatctcaactcgacaagcaaccacaatttctcactgttttctgtgtttctactgaatcaatcaatcaggtacacgagctgcaccggctgtaccatgtccagaagcagctgatgcagcagtcacagagagttgctctggtgagccatggcccggtggtcgtcgacgtcaagccgcagctggacatctggtgcggcgagaaggtgacaacaaagcctcagcagcagatcatcagcttcaccagctgcaacaaggccacaaagcctgcacctgcgtctgcaatggccgaggaatgcaaccttgtgctgacactagcaacgggaccgagtagcagcagcagcaacagcagttatgacgccgagaggcaacagggagaacggttcaaggcgtcgtccaactgcgactccggtgcgaccaaggttgcatccacatcgacggactccgagatggctcgatttagggaggtggatgtggcgaagccggcgaggttgcatggcgaggtttgcaggaggatggatgagatggggctaggtccattgatgtaccaatgcctgagcctcaagatggtgtgatggtggggttcacttggtcaaagagattagattagtattgtggacttgtacatattcttacacaatatgttttcctttgagaggttcatggaagtcctaaagaaataggtttacaacaatgctcttcctgaaggaagcatctccaagggctatggaacagaggaggtcattgcgttttatgttgttcttgaccttaaactcattggtgttcttgaatcgttgcatgagggaagactaagtggaaaggaatcactagggaagaaaatatgtattggtatgatatggacgacaattccttccgtaaagcacaatacacggttctataaaactcctccttggtggatccgtatattgtggaacacaaggacattgtatgatccaactcacttggaagcctgaggcctggattatgcgtcggcacatagaaactttcgacgattggttgtaaaaacatatcatgggtgacgagactcttgatgagaaattgtacttgttgtctagggaaccatcttgacataacttgacattcaaagggtacaagataaatggaaaaacattttacatgatagcccaagataaaaggagcaccaaccaaaacggtgtcgttcacatagatgccacagactcgaatgagaataaagaaacatattattgccacataaagaacatatgggaacttaactgtggaccttcttttaaggccccacaacaactgagctcaataatcttgagagaccaaccattcgtcctagccaaggatggggctcagatgttctatgtgaaggacatgtctaccaaaccaaagaaaagaaaaaaaacgac

SEQ ID NO: 4630 - DNA, 6639 bp, Sorghum bicolor
tcatgataaaagacctgtgattgcaggggaagctgagtttgtggtcaccttatccttggacttctaaggtttgctcccttttttcttttgtcttttttcagataaagacatttcacatttagtgtcttctgatattttcttgaaaaaggagaagtttgaggaccaaggttctcttctcttgacttccgtgccatcccctttgtcaattgtcatgcaaaatgcgtttcatatgacgcactgcattcattattagttgccaagtaacataggatgctgttggtgtcgtgttcctagttatttgggtgcattcattattagagtaatttggatggatctaacagtaatatattgtgcttgttcgtttgttcgttgatttatttatatgcattggcatgcacagcccaattggaaaaatggaagattttcaggagaactttagatggtttgcaaccatgcatgtgagattcttctaaaaggcgtgcacatcccaaaatccaaatgaaacatctatggttcagttctgtcagagggccaaggatgcatttatgggagagctagagggattcggaagagttgtgcaacatgcaatgagattttacaaagatcatatatgagttaggaaaaataaagctttttttactgcctaatactaataagataagatctactcctagcattcaattggctagttcttgtaaagtttgctgaagttgggatctctttgtagccttgcagttccggagtcaaattcatggaccatctactcatatcactcattcatcactggagtacacaaaggtagatactttattatttatcaatggaagcttgtccggattttctgtgtcaacttcactacgctactgtatgtggagcaatgtgttcagttctgttgatgaccgttagtttcaacagattatgttttggtagttagtaccttgctaaaactatcagaccaacaaaagccaaggatgattatttactgaaactgagcgcaagaagatatttttacactttaattaatcaggcaaacatgtcctatcatgaaccaaaaatatgatatgaaagtcataccttttttgttaaaaagaaactaaaattataccttgaacattgccatgaaaaaacaataactgtcatgcctcagttccagaatcaaatactactaaaattaattttattatgtggagcaacaatactaatttcagttcatgataattactttggagcaaaatcctgtgtgactcgactaaaaattcaaggatgttatactaactgaaacagaaaggaagcatccaattcatatcacactctaaagaactaaacatttaaggattgataatacaacataagattcataccttgaaagaccaagataccggctaaaagccctaaaggtggtaatgtgcagcatcatcatgaataaaagaactgagccccctcaatttcgaagttaagtactgccagtgccagtaaagtgcaaagggagcttattttgttcagaattccaagtggcttcgacagggcacaaaatctgaatactcaatgatgactgtctgaatctcaatactgtattatatatactctttgattcaatagatctgaatacccaatgatgacgttgatgagcatctatttttccagaaaaataaaactatccagactccagatcaagggatcaacaggttcccagtcccagcactgcaacagttacagaaatccattttcagctaaacctgctgcaaatccgttacaccgacgacgctgatgtcaacaaccaaagcacaaaccaagcagacagcacagcaaatgcagctcaagagaatttcacaaaagctgcagggagacacactgtccaccacagatgatccggccccccaccatctgcgctcccccttggttttctacgagtggtgggggctgccggcccacgccccccgcgccctggatcttctaaatccaggcaacctccacctccacgccacccaactgtttcgctaatccagttcttgccttgctgcagtgggagtagagtgtgggacagccatggccatgcacaccgctcacctattctgacgccatagggacggacggtcggtcacatgctgtgatcccaattccttccctttgctggttttacttgtgcgatactgcgaagatccctttcgaggctttccagtgtggtgtgcgtcgcctttctgctacatagctctgctctgcgccattgctgctggcttgagagagagaggattcttcttcatcttctccgtttacagctgtgagctccaagctctggacttagtgattgctgccactcgcacggccccagctttcggcatcgagatccaagaatatcaggagcgaaaaaaagagtcttgggacgcaatcattaggagctgtctgcattgcagagattctctgcttggctgttggctcgctccttcaattctcctcctcttgcgtgttgtctcactccttcagcactcctcctcagctcctccacagctgttcctgctccggcatctgctcaagcctaagaacaaattcaggaagcaggagatcgtttccacgaggtaccaattgaaattctcttgttcatgcttcttctgtttctgatggaatcctcgatcctcagcttaactcttaacattttctgaaatccttgttcttttgctgtatgcaaaggttgtattgaaaagggagattaagggattcgaaggcttctggatgcaataatcacaaggtattggagaagttcgttactgttctttccagccgtgcagaagtgcaggctaatcatggaaagtgcaggaatagattccttctgctctgtccattcttttcttgtcctgatgagttgtttcagattccgtccgtcacacggttcacgctgatagcagttgcgtctttttccagttccgttgggagggaaaaccaaccaacccaacagatgaaactgtgcagcaggtaggctgagaggcttcttctctgaccagcgatcagcttgttcggagaaggactctttgcttccaccccatggagaaggaagccatggaggggcatgtgatggtaccattgcagagcttgagcctagagctcccggatggggaaatcatagtgggctacaacaaggacacctcggctctgcaaggttgaaagagcagatttcacctattgttaatcccctgtttaagtgatggtgactttgcattggcacctgatgaaactatctcaatctcatgtttgtttcagaggagatttcaactatgcgatcaaggcagcgacatcttgacaggagaaggcgggaggcgctcgacaagctcattgacctgaaaggtacagtcttcaattctagatagcaattgttagcgcttgagttcccaacgatctaagcttcagaggttgggcaacgttcaggaagtattagggtcttctgccgggtacggccgctggtccagacgaacaacttgaacaccaaatcaccagttactgttggacaagaaaagattgcagtcaagtcagttgggatcaagaaagagttcagtgttgatagggtttttggacaggagtccacacaaggtaattttttgcttactcacttggtttgtctttttggtagtgtgattcatttcagtgtggtccatgcagaggatgttttccaagaagtaaaaccgatcctcagatctgcacttgacgggcacaatgtctgcattctcgcttatggccagactgggacagggaaaacatacacaatggttggttggtgctgaacagatttgagctaaattgatgacaagtctgtattccgctcaacattctggggtagttctgataaaagaaggtataactgattgcaggaaggaactgatgggaagcttggtattgtgcctcgagctatccaagaactgttttctcacgcttcagaagacagttcatccacatactctttcaccataagcatgcttgaggtctacttggggagtctcaaggacttgttggcaccaaggcagcctctcttcaggtcaacagaatgtaacacagcatggtaagattattagttcacctgcaaattttttaacggaaagttcacaagtaagtcatgaagaaagatcaccaattctcaatgtggaaatttatatgtccattttcattgtatacttcagtaatctcagcatactagcaacaaaaagtggtgctgtggaagttgaggggctgacggatgtctcaatacctgacctgaagaaagccaaccagtggtactgtagaggacggcgagcccgatcaacatcttggacaaatgtcaatgatgtctcgagccggtcgcattggtgggttgacaatctgttcccattaccaactttcatttgccctattttgctaatttgaacagtgcccaattttatgtgccttagctctgtctatgtgtagcttgacaaggattaccataaggaggcatggagccactgaagaagtcagcaagctctggctcatcgatcttggtggcagcgagcggttgctgaagactggtgcatctgggttgaccatggatgagggaaaggccataaacctctccctatcagcacttggagatgtcattgctgcacttaggagaaagaggagtcatgttccttacaggtaacagctgattctacagttaatcttaccgtatgaatttctaatgatttgaaaaaaaaaaatcagcatttcaatcatataggagttactcatcagtgctttcgtctatatttatatccttttcttttaacttttgcagaaacagcaagcttacccagattctcagtgactcgcttggtatggaacatcttttagatcaaattgaagaattgtcattttcattttacaaaaaaaaaagattgtgaagaaacagcaagcttaccctggcagcaacataatctgacattattatatttaatatctaaataacaggtaatggttcaaaagttctaatggtggtgcacatcagcctttctgaggacgatgttggtgagacggtctgttccctgaacttcgcgaaacgagccagatcaatcgaatcaaatagagaaattccagaagtaagtatacaaatggaatttgtacagtgttgtccttttatttttttattaataaagcaaacaatgggggcctcccctgctgtattttttttctcaaaaaaagtatacaaatggaacgagcaattcttaccaccatggcaaaagttttattatattttgttctgtcaaaaaaagttttattatatttaaagatgctcctttctgatgtaggatctgaaaatgttgaagcagaagcggctcgcagagcttgacaaggaaatctgcactgtggaggaagagttgaagtatctgaatgaagaaataaggagatcagagatctcacttgaagagaagaacaagctcacttcatctgtttgtcgggctcttagtgatgggaagggatcaccaagaagcactctagtggtaggccacattgatgtcacagagagcccacacgcaacagagaaggcaaagagcaggctatctcacggttcagctccccacttcatgtcttcgacggtgtgcagtcggcaaagacatactgcaggaagccattttgttagtaagccgaggctgacaaagtcagtaaacagatattcaactgagctgagtgggagccagtcattcagctactcaagctgcaagaatgcagccaaggctaggtcagtggcattctcatccagtgtgcccaagataaagtgcttgccagtcaagtctgatcagatcaacataagtaacaacagcatcgactcgacagctgcatcagcaccacggcggagggaaagctttggctccaaaccggttcaaagagcacccctacaccagcacaggaggcggatgtctagcctaacatagccttacataaataccaattggacagttctgattttaacttgttttagtggtgaaaggattgtgaaagttgtttgtggtttttgtcggtgcttgttggtatgtttgttaactgcatagtttttgactgctgtaactattggaggccctttgtcttttgtttttgatttgacatggaagggcaaactgatgtgaggaatatggtaaatggaaatggaattgtaattggacttactaatgcttctggttgcaatgaatttggaatttttgaagaataaattcctaatgtataataaatatagcattctgaaatgacttctgtgattcttcatctacagaaagtacctaacattttggacaccacagttcagacttcagaggttctagtggataaaattagaagtaacaaaggacttgtactgtgggttgaaaaaacacatgtctcattattgtaaaataggcaatgcaactacattctagaaatctagctacatatgcttttttgacatgtttgttgctacaaagatccgaaacttcttccccagacatactctgctaaatggaaaaggcaaactaacaaaatactaagattatagccattcagaacaaatgaataaccatgatgcatgatccaaacctaggtgctcatttcacaagtaattgccatccacacaaacaatcaaccactatgcttgttcaggaaaaaaaaggcatttaatgcacctacgacgtg

SEQ ID NO: 4631 - DNA, 7118 bp, Sorghum bicolor
tcttccttttaatcgataatttcactctagcatatgtacgtattcgtaattactatgctcacgatatgcagacacatgatgagagaacttagattgaaacaagatgatcgaattggttttattgatccctacgtcgtgtacaaggacaccaagactaacgatccatttaatctgaggcctaaggaaatggagaagaacctccggaggttcttttataaccaaaggcacaaggacttaatactcttcccttataatatgggtaaattgttgtgttatatcatgtcttagtgaatccagcattaagatatatatatatagattgactctactggatactcattgagattaagatcaaggaccaatgtatatgtgtttggaactcaatgagaaaagagctggcaatgtaccaagacatgatagacatgatctagaggtacgttatatcattctttaaatatcggacatgctattttactttactatgctatacctaatcaacgaccgacttattgggcagggcttgggcttggttcatacaaagatatctcgtacgaatctgaaagcgccacttcccgttcctattctacataggtgggtgcccaggcagccgtatggtaccaatttatgtggatactacgtttgcgagtacatgcggtgtaccaaatttacaccttctaaacagatgctcaaagtaagtaacatgtgtatacattaaattcatatcttatttatttgttgaaacaagataaatcttatgtatattaatattttttttctttaattaatgcaaatggaaggagtgagaattgaaagaacaagtgttcgaccacacaatactcgtcgcaatccaggagacgatcacaagtttcatcaacgattatgtcatctcaaaagacgtcaagttccactacaaccctaggttgggattgaatagtgcaaacaaggagaaacacttgtatgagctttgagtggagggcaaacatttgtacaacctttaaccggcggccgaacacacttgattacttgtatattattgtaaatgtaatgtgtatgtacgtatatgtatagctctataatatatatttagtttcatactttacttgtgtgcaataataacgctctcgtataggtgcaacgtatacagataatagcagcgaagaataatttggaaaacaatataattgaaaaccaaaataaaaaatgaattgaaaagaaaaaggaaaaaaaacctttagtcccggcttgtaataccaacgtcagttggtggcgagcacttttgtcccggttggtattaccaagaggactaaaggtcccctttagtcctaggtctgcacatcaggactaaatttaaaggcggggcatttagtctcgaaacctttatctcggctcacaatctgggactagaggtcggtcttgtaacagtgaaagtaaggaatatcaatctgcgtgtgcagatcgatagaggctagatgcatgtgagggtcgtactcgatctagacaaaagatttagcatacgcgtgaattagcctaaatgcatttaaaaatagtttaggttccaagtgcaatcgtttactttttattatgttctgaaaacgatcaaatcctgcatatatagtagatgtggataaaaaagttatgaccaccgcgcaacgcacggatacatatatctactattgctaaaaaatagtaattgcctacccacagccctccctgtcttttttttcaatgcaaggaacagacgctcaagtcttgtccagatattatcgaccaaatgaacggctggaaacaaaagcgtgtaaaatacactcttctggcgtcgccaatttccacgacgtgtagcgactggcgtcggatcggataggcgacacacagctcgctaccagattttcgtgtggtgtctactgtttgctctcaaagcaccgagttactgaagcagctacctagctacctagcaatacttgcgtagacgactggtacggatcggagggagagagagggccatggcggccggcggcagcgagattgacaagggcaagcggtggagcctggcgggcgcgacggcgctggtcaccggcggcagcaaggggatcgggcacgccatcgtcgaggagctcgctgcgttcggcgtgcgggtgcacacgtgctcgcgcagcgcggctgaccttgaggcgtgccgccggcggtggtccgacaagggcctgcaagtcacagtctccgcctgtgacctcgccgtgcgtgccgaccgggagaggctcatggagactgtcaaggccaccttcgacggcaagctcgacattctggtaaggtgtttgaaacctgctgtcgtactcccgtgcatcctatccatgtccattcaacgacgacggcagatcacacgtcaatacgtcatactgagcggtacacgtccatgcacgtcctctcatttgtaaaacttggtcctgttctttttaaagcatcctttcctatagggcatttattagctccctcaattccctaaaaaaaaagaagatgttgctatattctaggcacgtgagatttatggcatgtttggcagagctcttctccggtttcagttctggctctatagaggagttctgccaaacattttattggagaaactgttttttaataaaaagcagaggagcttctcgtgaggagccctgccaaataggcctttagatttaagacgacgcatctcagtcctagcatcggaaacaaacggttcagattagccccctattcatcttcttccactaggctccagcagctcacaccccgcaactgcagaagtcacccccgcagccacccactgccccaccgcgtcagggtcttatcatagctccgctgctgtagccacagccatggagctctggtaaaaccctatgcacttgtggtagattccctcttatcttcccctcctcctaacgccgctttcttcttcaactccgacgaatggcccaaactccccattccccacctatagctggccaccttcaccgtcactagggccccgaactactagggtaccgtcctcaccgcctggcctgtctatctccccaaggccctcattttactaaggtcaccgaagttggaagagagagagagatgataagagtgccggagttaggggagtgagaggagaaccttactggaaccctaatttgcaaatctaagaggagaaaaaggaggagggtctacctcaccagcgtcactgccacagcgtatggagagaaggacatgtgtgtgcatgcctgtggggaaggggcgcgggcgctgtcggttgaacaaccatcacatctcaatcgactaagagggtgttcggtactgtagcattttcgttttatttgacaattagtgtccaatcatggacttaattattaggctcaaaagactcgtctcgcaaattactcatctctagctgtgtttttactttcgtaaatacttcatacatgtgtctaaacatttgatataatgagcggtatatactttacggcactcaatagtaggaaaagtgaaaaaaaaaactagcgcagaaaaagaggttttagtgatgggtgttgagaatttttagaggcctgctaccgagcccaactgcagtccgcatgccgaccagtgccacacgctgccgcagatctcactggagtcatcgacgatggcatcaagcttgatgacagaaaagccgaaccagagccgccgacacatgtccctctgctataactgtcattagcttcaaagtaagctgatgaccgcgcctctgataatcattaactatctgctattgaaaaaaaaaatcattaactatctttagagactacctaagtaattgcttttttttacctctgttcatcaaacattaattttgtctttcaaaatcttttttgcgtgtacacaggtgaacaatgcggcgcagttgttggcgaaaccggtagcgcagtgcacagcggaagacttctggcggcgttgcatggcgacgaacctagagtcgtgcttccacctctgccagctcgctcgcgcatcctctcctccttaacgcctcgtccctcgccggcatcgtcaatgtctcctccattggaagtttgctggcctaccacggcatcacgctctatggcaccgccaaaggtacgtatataagcatttataattttccaaattcacaagacttttcagatattctgatttcagaatacaattctctaagcataacttccaatgttttaaagtaaataattattcatttttttttgttgtttttataaggtttggtgaagtattgtattagaagaaaaaaatttaagtaattaaggttgtttgtgcaagatgatgggagaaaaattgtccaactatttgcgaagacacaaatacaagtgggaattgtatttgtaatttctagaaaaattgtaatgcatgctgtttcagctgctcgacatgccaccgcctatgcgcccctgcatcgatgttgtatcctccgctaggcacataacggactgcccgccatttgtttatttaggaaaataaatccaacaatacagtagaaacaaatctgttgagttatagcttaaccaaaaatagctgctgctggtgacctatgtttttggtggcatcataattcataaaccaatttttaacaacattttataaagtagtttaatataattatttaacaatttttttaattcaataaaacttggtttttgtgctcacagaataataaaaataaactctacatgttagtaacatttatattaccttttcaaaatgtgttgttgtatttttttcttattttattgctattaagcatggaattgatcttttcgatttcacaccggagaccttttgcaatttatcgtctccatcttgatatcaattagatgaacaacataaacaagataaccatataacatcgaataaaaataaagttagctccaaatattaatatgtcaacgcaaaacaccacaaaatttcaatttaccttcacccactcgacataaggaggtatagctcttgactcaaaaatcactagggtcctctaaatagcattaacgaatagacgtctcaattcagcgggaaatagaaaaatataagattgtatcttttgaagtttttttattgaaacagacatattagataaggttcatccctacatgtattaatattataatattattcttgctaaggccttgtttagttcctcctaaaaaataatttttttttaagatttcttattacatcgaatcttatgatacatgcatggagtattaaatatatattaaaaaaaataactaagtacacaatttgtgtgtaatttacgagatgaatcttttgagcttattagtccataattagataataattactatatacaaacaaaaatgctatagtagccctaaaaagttttcgcaagcgaactaaacaaggcctaaagccacatacttaatattgtcaaattctactgaatatataatactaaaaaaacaaatgttagcggaatatcggagacaagcgcggcaaggccgcgctacagtttctagtacataccgcaagtgcatgtgtaaaaatttacttgtttgagatactccttccctcctgaataaggaatgcagagttggaagttcgtacaaattaaattataataacaagcaacacccaaaagaccgatgtaaagacatatgtaaaaattactacggttgatcttgggatccaaaacctgttgtaatttttctcatttttttgtttcctttttttttgtttcatgagctttgaccttctttggtttgtaagaattttaatttttacttcttaaataaattcctgtgaaggccgctgatggcctctccagtttcatcatagaaaattaaaagaccgatgtatatatacgtcattagtgtctattaccaacctaaatatggtaaccgccagcgagggtatatacatcatttgtcttaccatatgttatatccttgatggtaaatttgttttatttttcacgcatgccagccggaatgaaccaactaacaaggagcctcgccgccgagtgggccagcgataagatccgtgtgaactgcgtggcacctggactcatcatgaccgacatggcgaaagaggtatatttatactccaatgaagacataactagtatactatggccttgtttaccccaaaaaacaaaaacttttcaaaattctctgtcacatcgaatcttccggcatatgcatgaagaattaaatatagacagaaacaaaaactaattgcacagtttgcttgtaaatcacgagatgaatcttttaagcctagttagtccatgattagacaatgtttgtcaaataaaaacaaaagtgctacagtaccaaaatccaaaaaaaaatcggaactaaataaggcctatatatatatagtatactatataattgcctacataaaattagttgacatgtgtaaattaaatactcctgacaggcaccacccgagatcatagagcaatcgttatccagtgtccctatgcggcgggccggcgagccggtggaggtggcgtccatggtgtccttcctctgcatgccggcggcatcctacgtcactggtcaggtcatctgcgtggatggaggccggaccattagtgcctgatctagccggccgacagataataacgccttgtcgggttcatgtttcttcctcagatccgttgtcatttccattctcgactctattttcttttgtggcaccatgctattgtctctatataccaaaaaaatattgtcctaaatgtaataaaggagttttaaataatgtggaaaggcctcacaaaaaaatagggtaaaataaaaaaatttctcggagtgtcttccccagcactcgaggaagaggcattttcctgagtgccaggcccacggcactcggggaagccagcctttttccaaagagccatgtcctggcactcgtgaaagggccttttccctgagtgttaggaaaggcacttagattttttttgttttttagttttaacagcgccggtgggttgaccattaagtaacgcttttcttccccgaatgcggctcatccccaagtgttgcactcgggaaagagtgcctttgccgagtgccagatactttgcggcactcgggaaa

SEQ ID NO: 4632 - DNA, 6422 bp, Sorghum bicolor
ctgtaatttgcaagacaaatcttttgagcctagtcagtccatgattggataatagttatcaaatacaaacgaaagtgttatagtagccattttgcaaaaatttttgcaactaaacaaggcctagatctataatctttttaaacatggttattattaaaatattaaataaaaaggacaaaaaattacaaaaaactacagaggagaggagggcccaggctggatctgaccgatctagcctagatctaagctgcctcggctttgacacggcggcagaccaggatgagagaaccgtgtgagtgcggtagatgagaagacaatggtgtgtcgttattggagaagcagaggggcaaggacaacatgaacagtgctagccgagggaaagaagaggagccgccggtagatgatgccatgtgtaggcctactccgcctccgcgtcagagaggacgacggaggccaccagggtcactgggtcgagtaccaccgacatatttgtcccgtccttgtctttgacggacgctctagtggtgcggcggacattgtgaccttgcccgagtggcgcctttgtgtcgacgccagatctgcctcgcttggggaccagtcacatctgggagggaagcgcggaggcgaggtggaaggggcggaggatgttggtgtggagaggttgagatgggagggagcatgcagatcgatagtcggggagggaaaatggtctaatagatattctgcacatgttagaatgactttttctttggaactaacgtagaacaactcttttttcgcaacagagggagtagtttcgaaatgtttctacgtataccatctgtcaccgttgatttacctctgtccaaaaggatgacatgtggggctgatctggtacttttttttttcatgttgtatacatgcactaccgattaccatcattttgtacatatgcactaccgattacatacatatatgttgaacatttgccaagtcatatatgttcacggttcaccagacaaaaccactatcatgtgtcatcaggtaaaaccataacagatcgacgatggtagttaaaccacacgcgtacggttttgcaagttgttgagtggcccaaaatactcggtctttacagttgcaaaaacaagtaatgattggcgaagtcgatcgagcgatacttgagttttgagagggaagaccaaaatgacgtcttctttccgagtatgtagcagtattatacttgtgtacggcacgccgtaaaaacaagcagtacgtaggagtaggtatttccatcgtcgggtttgtgagtgatcgagcgagtgagtgagcgcgcgagggagggaagctgaaccacctcccgcgcgtttccctctctgccctcctcgatctccctccacgcacaaccgctccttcctcctcctcctcctcccgcgccggcccggtcgactgccgatttcgccggctggttaattcttggagcccgcgatccctcctcctcctcctcctcctcctccccctctgcattcacaagccgtgccgtgccgtgccgccgtgcgtcggatcatcaaccagcagcagcagcaggagctcctcctcctcctcctcgatcgtcgcaatcaattaaatcccgacggacgacgatcctcctcctccccgccgccaccaccaccgtcgtcgtcgtcgtctgccggccggcggtccgccgcattgtctcgtccgccgcccgtccgatttcacgtcgtcgcagaacgccggtccaagagacaaagcatatgcacatatgctaggcttccacggatcaattgttcagctcgcgcaatccaattgctgcctgctgctgccactgcatccattcaggaacaactcgatccgttgggattcggattgccacacacggacggcggcggctgtgacgatccgtgtcgtggtcttgaggttgaggaggggcggcatcggcatcggcatcggcaccggcaccggcaccggcaccggcggctactgctgtcgtcgtcgtctccgcgatggggagggtgaagctcaagatcaagaggctggagaacagcagcgggaggcaggtgacctactccaagcggcggtcggggatcctcaagaaggccaaggagctctccatcctgtgtgacatcgatctcatcctcctcatgttctcgcccaccggcaaacccaccatttgcatcggcgaaagaaggtatgtgcgtgcatgcatcatccattcctgattctgctgtttgctccatcacattgacgatattaatttcatgcacaagttttgtggacatgcatggattgactttttccttactggattttggaattggtgaattttgtggtcaaatcgggaggataaccattgcaaattatatgtatttttcccctttttgaaatgtctttctgttttaggattttttttttcattattctattcaaatgatccttactacctatgtagctcgatcaatgttttgtcaacaaattgagatggtaatttgaattattaatttgcactatacctttcctttacacattgttgttgttgtctttgcagcaacattgaggaagtcatagcaaaatatgcgcagttaacccctcaagagagagctaaaaggtaattctgcaggtcctatatattgatcttgtagattaaacatacgtgttcatgaaaatatactaattagtattctttttccaccggctggacaggaaattagagagcttagaagtaagttatctcaaccaacagatttatcgacacggttactctcttaccttaccacttttcagaatgcatgacctcaatgatctcctttgttgtactcaaaaggccctaaagaagactttcaagaagctagaccacgatgtaaatattcaagacttcttaggctctgggtaattctgccgttttttttagaaaaagaaaaatagaatgctcattgcaacagaaatgcctaattgcaaagaaagaaatcactgacatactatttctgaatcaatttcaggggtcagacagtcgaggtagagtatgatgaatcgacaactagaacaagcaagtcatgtgatttcgtttttacttcttcatgtttctaatgctgttggatttcaataatttgacaggagttatcaggccatctcggttcattgcaatgtcaaatggcagaggttcaaaagcgtctcaggtgaataacatcgactcacttgcgcatgcagcatcagaaatttctgtgtgatattcgataaatgctttaagcatgtgcatatctttttgaaatctttccattcagtgctgctgtgattttcctttcatgactcatgatcctgttaaaggtggccccgttatgcatctatgacattgatgataaaattcataatagcatatcatagaaataatgggcaacaaaatgagagaagtgtaacagcaaggcgatttgtttttcagttattggagcgatcctgagaaagttgagaatatcgaccatataagagcaatggagcaatctctcaaagaatctctaaaccgcatccaaatccataaggtacacatccataaccttcttgtttacttcagatgatatatcttaacactttataatatcaatatctagcaacaattcattgcatctgaattttcaatatccagtcagatagtgtcgttctataagtaaaaaaaataaatgagtaactcaaattggttctgacttctgcatcgatttggatctctctaggagaactttgcaaagcaacatctgatcggcctacagtgtgctgctgcccaggtaactaactaactaacctcagcttcaggtgcatgtcagatgtttttcaggcttgcatatatctgatcaagatgttgcctcctgccatgtatgtttcagttccagaccgacatgcagttgcctctaggactgaccggtgagccgggcccttcgtcctggttccaaaacggcggtgccgatgggcaacaagccatgatgctaccggacgactccagcctgctccatcagaggtgagctcaagctccaaaatgcccattgctctgatgaaaataaacccatcttctgttaaagtgttaactgacgaacaaactgatatggtcttggtgcagagacattgctggttgctcgacgagcacgtcactgccgggctacccaggctacttcagcatgaccaagcaggagacggacaccggcggcggcagcgagcacgccgggcaggcggcggtgcaccagcagccgccgccgccgccgcctgacttcagccaggccgagtgcctgacgtcgctgcacctgggcgcgcagttcccgtacgcaccctgcttcgaccaccccagccttttcaacgaccggatgttcaggcctgatgctgttgagctgcacgacggcagcgccggcatggactttggcggcggccacttcgacctgcccaggcctggcgacgaggccagcttccagaactgggcgtcggcggcggcatgtggcgcggccatgtttgaccaccaccatcagcagcagcagcatcaccagcaatcacagtcgtcatctgcacaagtgagtaccaaactgccatgccccaggcttggccatgcataagaacaaaccactcttttatagtgatgattactttcataactgtctgttttgccacatatgaacttgtttatctattttccatcacaaatttatagctcctgtcaaaatatttcaatatgtttttttaagaaaaagttcattttgcatcagtcaacccgagaggcgcggactaataagtctgcttcacaatccctcaactacaaaaaaaaaaaaaaaaaaaaaacattcaatcctcaactactacatcgtcctggttaaccagcatctcatttgaattgtaaaaactcaaaaaaaatatctcacctgaggaatatttgttacttcaataaaaaaattattatggaaaccatgcaacaattagtatatggctcagtgcgttaatttgaaattttagtttaaggccttgtttagttccaaaatattttgcaaaatggacactgtagctttttcgtttgtatttgacaaatattgtccaatcatggactaattaggctcaaaagatttgtctcgtcaatttcgaccaaactgtgcaattagtttttatttttgtctatattcagtacttcatgcatgtgtctaaagattcaatgtgacggggaatctgaaaaattttgcaaaattttttggaactaaacaaggcctaaattttagatttcaagaaaaatatacttactgtaagtgaacaaaatattttggttatagaatcatgtataagtgcagataaaatcgaaaattctaaatgtttcctaattttctaagatacaaaactattttagcattactcatgtctccacatcaacaccaaaaagagaaccaattatttttaatccagggaatgtcatctcctcatggtcgagattatgaaaaatgggcagttatgatttctttttactttgacattattatgtgtttaactgatttcggtctctcatgtggaccaagactgaatctctgaccatcagcttcctgcagcaacaactctagcaactgcctcattcgaccacgccgttgtttatcacggtccatctcagcaccagcaagtcatgatcggatgatcctccactggtaaaactcggagataatatttgctcccaaaaggcgctaccatatccgtatcactaaactaatcagcaatgcaagatgtgtaggaaatattggtgtacgtataggcaacaatgccaatgtaaaatatacattattgaattgtagccaattctttcttgtaactgtcaattcgtctcctgtaaactatggtatagctttcataaaaggattgggcacttaactagtagtttataggcattcatctttgcacgaatgaaaaattaacagggttaaaatgacagtgtgattttttagtccattctatatagatgcatggaaagtaatggttgagcattatacatgtgtattcatttgtcatgagacaatgcaccataaaaagaaatctattgttcttcagtcaaaccctaaacatggttacttcttgtttatcagaacaggcagttgcattttgggaaaacaaggctttatgaagctctgcatcatagaccaactagaatgactattgtagcatatactatgaagttctacagcatgaccaactcgaatcaagtatcaccaagagcgtgcagtcaagaacttctaacatatgaagtttgttcagatatgttccttaatggaacgggaagggggaaatccctattcatcgttttgctcacaggctgctatttcatagtgaatagatttgtttagttaaacaatgttttttcgcgcggatgttgcttaattgatctgtcatggaggtcatgtaattttaaccaaattatttgatttaggcct

SEQ ID NO: 4633 - DNA, 4768 bp, Sorghum bicolor
ggtccctaaatttgttcggatgtgtcatcccggtccttaaactcgcaaaatgaccgtttagatacctaaacttgttcggttgtgtcatcctggtccctaaacttaaaaatcttccatataggtcctcaaacttgttcaattgtgtcatcccggtccctaaacttgtttttaagtcttatctgggtcaaaacaggacgaatctaaaaactctatattgaaaaataattcataactttttcatatgaactcaaatgaagataaactttatatcaaaattgtaggcagcaacatgatctacaactttgcagttgaaaagtttttaaattaaaatcgtttaggttcccaaaatattttttataagtttatagattttaaaatttaaaatttaaaatcaaattttataacactaaacgactttaaataaaaaacttttcaactacaaagttgtagattgtgctgaggactataactttggtataaaatttgtcttcatttgagttcatatgaaaatgttatgaattattttttgatatagagttgttagatcgctttgttttgacccaaatgagattcaaaaccaagcttagggaccgagatgacacaactgaacaactttgaggatctaaacggatgatttctaagtttagggaccgggatgacataattgaacaagtttaggggccgagatgacacagatgaacaagtttgaggacctaaacaatcgatttgtgagtttagagaccgggatgacacgacagcacaagtttaggaaccagtagtggactttactcaaaaaataattttgggtctaaatatgggattaaaaaaactttgccgagggcctaacggccgtccctcggcaaagactgacgagcctcggccgtcgtgacccaacgggccaaatttgccgagggccatggccctcggcaaagattgtctttgtcgagggtctttctttgcctagggcctggccctcggcaaaggcctctttgctgagggccagtctttgccgagggctcttggggctggccctcggcaaagagtgtcctttgccgagtgcccgagatgtggccctcggcaaagcctcaggctctcggcaaagcctcaggctctcggcaaaggacgcgtttccagtagtgcacacctggtatctaattttagtttcacattttatgtttcctgaaccttctcctcctccgaattcttgcttcttgctttcccaacttctgtaattctgtactttgcccttgttttgttttaataaatttgcattaggaggcactggctcctcttgattcctaaaaaaaaagttgcacatgtgaagtcatggataagagcttcttaagcacaaatagagaaattggtgtaacgtatatctatacgtacgactgtaccaacatatggatgtagagcaaacattttcaggtcagccacacatgatatccatcttgtaaagaaaactttattatgtctattaccttgtccaaaacgattttctttacgggtacagagtagtactgtcacgcagggtatgtaaagaacccttattatttcgtaatgcaatactatgtaaggaagctttattaattttaagatcaagttgataaataaaaggacactcactatctttaaaaccactaataacaataaaatataccctcttcttttctttacagttagagtagtgtgtggtgtttttcattcatgtgtccataatggactctcagtagctcgatgcctcgatagaatgtgggctggttggcggttggtagccgtagatctcgtcgtgagtgagagcaaatatatatagcagcaccaaccatacaataatgtgcttgcgtgcatacatcgcgaccgaactatatatacataaacgtttttcattatcgaccaactaggcaatgacagatgtgacgacattcggccttaagaatttgacgaagctctgtatctatataagaagagctagcgtccatccgtccactgtaccgtccacaagatataattaaaggctgtgcttcttccgcctggttgtaacagactaacagtaagtagtctgtttttctctcttcgtttgatgtgttattgagcataattagtatatatatactagtgcgccaagccatgcttagtacctataagaaaatgacaagagaaagcacgaagttcagatacataaaactcacgaaaatttcttatatatgtgtccgggctctctctcagttcattttctaatgccatctctacatgttgtgatgaacttacctatatgatttttgtatccttatgtatatgttttcttcccctacatgctatgacacttaatgtgtctatagatagataggtagtcctcctgatgtgttatttgtagttctgttttttcacacttcactatttccaattgttttggtgcagggcttattgctgcatcaaattcagtgagcttaacatacggtgtgatcatatggtaatggaacctgctgcagcatggggaccttcttgcgagtttcagctagcaaactggaccgttgaagaaccagctgctgaagtttgggctccagctgttggcctccctctggagtatgcatccagcgacatatttggtacctgtccccaggcatatgtgcctgaatcgatcggagaaaagcaactggttgagtttgagtacaactactcttcagcctcacggcataacttgtcgcctgaggctatcgtcgttgatgggcagaatcggcatgaggttgtggatccgcagaaattggaaacaaggattgtcgtctccaacgacagctatgctacaaatgtgttcaatcaagtagagcacgcgttcaaggttgatataaacctgatggcagagaagatgcatagataccctgccggacttggagatactatcggtgaaagttataccgtgccaaggattgtggccatcggcccttacaccaccaccgagaccatctcaagcaggcagagaaggtgaagcacatggctgccatatgctgcgtcaaggaatctggacacctattggaggagatgtatgctgcagtcgcctccatagcggacaatgttcgctgcctctacgacaaggatgtgatggcaggtatcagctgtgtagacttccgagatatgatgttcgttgacgcttgctttttggtgcagtacatgagtatgcggagtcgccaaaaaatagataacagcttgcatggtttcctgagctttaaccgcagcaacatccatcatgacatcaagctgctcgagaaccagcttccatggaaggtggttgaggtggtgatgaggttcaggcccgtgcccttgcatcgcttcatggctattttgaaagaatatctgcaggaccgtaagcctcccaaagaagaagatcctgtgttcattttggataatagctacagaccaccacatctccttggcctcctccactactacactgtaggaaggagcaggtacacttccgatcggacagtgagacccaagggccaatcggattccgtcagtgcacttgagcttgccaagattggcatcacgatcacggccaacgagtcaatggagctcatagacatgggcctcagccagaaagggaccctcttcgcggagctctccatggcgcccctgacactggaccgtgaccgtgcaagctacctcctcaacatggcagctctggagctatgcatggtgaaaagcttttcaaaagcggcagtcgaagactctgctgtctgctcctacctcttgctcctggccaacttggcacataggcaggaggacgtgcacgagctacgggtgagtggtctcctgcagggaggaggaggcctcaccgacgaggaggcactccggttcttcactaatcttcggaatatgcgccatggaagatcctacgaccgtgtcatggcacagatcgaggtttacaaggagagcaagtggaaggaggccaaggtctatgcgttctattacaaaaacaagaaaaccattgctgcgtttgtcaccggcatcggtgcacttgttgggatcatagggacactcttgtcaatcaagaaatctttatgatatatattagcaaatttgtccgtgcgtagtcaacatgtgcagcgaaatggaactgaaatgctatagtacaaacatccggcgtagtcaaggtgtggctgtggccacaactttaatttgattgtggctctgccctgagaccaagtgtgtatatgttgtcataacctatgtgtgcaatgtatgatgtcgcccatctgccacaactttaatttgatcatagtttgcccttcttcctgaatttccatgctaacattcccacatggattttatcatagtttatccttgtgcctgaattatatattgccctattcaaatacacgcatatccttgcttttagccaaattaataccgaattcgaactcttgatgaagaccaccagcattctacaggcctgatgaaccacaaactagtcatacaatcaagtcatatgtgcatatgagtgcagtgaatgaaatgagtgataagaacgatggtgataaactgataataaagggtgatgactgatggtgaagatctagttctacatttgctccttggggataacatacctccctaatctgaaaataaggatttggatactttttctttcttttgggacttttgtcctatttgttttcttttcttagaataaccaatccttttaatgcacaactgaaataactggagctttattggataagtagaaaaagacataatagcactgaatatttttggg

SEQ ID NO: 4634 - DNA, 3340 bp, Sorghum bicolor
taacacattatcctaattatgtgtttactttattgtaataagcacaaacctgtggactaaaagtgaagtgttttttctttttattttgaacctaactatcaatcaattatctagctggcaaatgggaagtaatatggacttgaaagtgcacatgatgagtacgtctttgtacaggaaacctaattgatgtttgtccatatatctagacacaacactggtctaaacttcagccattgaaacttgagttcaactaaaccttagttcttgatgatccaaacaaaccttgttctaggcgatccaaagaaacccttaaaatttggaacggaaggagtaataactgatataaccactgttattctttgaaagcatttaatttgtgaaatgcatgcatggaccaaaaatattgcaataatagctatctagacagtatttagtgtcctcaatgagtatgcatacactttatgcactgtattttctatgcttttcttgatttcagtaccctttacctatcccctcgatatctttgagcggttatgggtagttgatcggttggagcgcctaggcatttcaaggtactttacaggtgaaatccaggagtgcttagattatgtccataggtatgtatgaccaaatcagcctccacgtagcagcaatttatacaagcaaaatagcccatatatatacactttaaacgtacaggcaatggactcgagagggcttaggttcgacccgggacttcgtgctcagtgacatcgatgacacagccatgggtcttcgtctcctccggttgcatggctaccatgtcaatccatgtacgtaaaagctaagtgcatttgtttatccttagcttggaaagtataatttcagttttcgaggcaaatgaaatgaatttttttttatcaatggaaaaaaagtgagtagtatatacgacatttgttttcttcaatttgccatagaaattttccgttgacaaaagtaaacaaaaagaaaatccttgatatataccatgtataggtgtattggagcatttcaagaaggacggcgagttcgtgtgctatccaatgcagtcgaagcagtctgtgacggcaatgtacaacctgtaccgtgcctctcaggtagcctttcccggggaaaaaatcctcgagcaggccagcgcctactgccgatccttcttggatgagaggcgagcctctggcaggctcgaccaagacaaatgggtgattgccaaggacctgcctggcgaggtcggctacagcctcgacttcccctggacagcaagcctgccacgcgtcgaaacaaggacgtatctagagcaatacggtggcagtcacgacgtgtggattgggaaggttctctacaggatgccactgttcagcaacgacgtcttcctcgaggcagcaaaacaagatttccggaattttcagaggctatgcaaactggagtggcatgcccttgccaagtgatgatcctacctaataatatatactattttgatttcctccctctcactctcattttcgtgtatatatatatatatatatatatatatatatatatatatatatatatatatatatatatatatatatatatatatatatatatatatatatatatatatatatatatatatatatatatatatatatatatatatatatatatatatatatatatatatatatatatatatatatatatatatatctataagtatctatctctatatctcaatatatatgttagagcccatatatatagataagtgtctcttgtgcacgcacacagagacgcttgcagatgctgtctcagggtacctcctgcaatgcgacgcttgtactgctactgaaagcaggagggaagggctcatcagtagactggagcgcaatgggtatttccttcttatttatctcgtttctcttgtcagttttttcagttaccaccgtcagtgtgtttacatgtgctgggcatgtgggcgcagggaccaagtggagggtccgatgacagagacagacaaggtcctcttgcgtgcgattcgtgagctcatcgatctcgatgcttctcatggtcttcgtgaagttgtatgatccatgttccatgcaacacagatagatatatatatatatatatactgcctcactgttgttgattgttgttggtatactagattgatctattccgcaaccggatgatcgatgtatgatatcgacattggctttgccattgcagtgggtgcagtggctcaggtcatggagccatgacccggtggcagtcggaggaaacactgcgttgctgttagttcgtgccatggagtgttgttcaggaaggtacatcagtgtggccgacaggaacgtgaaccatctggatgagtactcccagctcgagcagctcacccattccatctgctgcaaactgacgtctagggttcttgctcaggtatgtacatgcatgcatgcgacgtcattccaaaattacacaacacacaatgtcctcattcaactgcatgcgtacgtcattttggaaaactacacaatcctctttcaaatgtatgccgctagctattcaccaagccaaaacgattctgatcgatatgacatataaaaaatcagaatggagaagacaataacaaggaagctgctgatagtagcttggatcagcaggccgtggagctggagatgcaggagctggctcggtgtgttcttcagagctgcaaatccatcgacagagccgccaggcaggcatttctccatgtggccaagacctactactacgtcgctcattgctcaaatgaaacaattgacactcacatctccaaggttatatttgaggatgtcgtctagcaaaagccaccctgtcgtcgtcgtttctgctaatcaggaggccttacttatcatgaatcacccctgcaaatttcttattcatctcagctgatgaagacaacagagtatattcctgttatccttcggttacttgtactgatgatacagtcattgctggatatgaaatgtaagcaaagggtgggtgtgtacgtacttgcgaaataatggaataattctgttgcaagaagaatcaatatatgtgtcccctaacaatgatctgccatctttttctcataatgaaataattcttaatgtgggtgttaagataaacatatatgcgtggtttgtgttctgttgtaccgatccaatcttgtagctcaagtgtaggatatgataaaaatcttcttcagcgtatctgttctagtccttgctttgtgtacaagccacgtgggggcatttcctgtgctatattaactttcaggcgagtcctaaggggttcaacccatcttcacatggtatct

SEQ ID NO: 4635 - DNA, 4195 bp, Sorghum bicolor
gttctgcccagttttcattaaaaggagtagcagtaaccaaatgttacaaagttcaacacaagatgcagcagcgagaacgaagccaatgctgggcacagagcacctatctaaaatttagctctagcaattagatggggtggttgcaaacagtggccttatattagttaccggtaatctcacagacttccaagattcatgcaggatctggctaacggctagtcattggccatgaagaatagaccacagggtagaaaatggaaatttgatgaggacagttttcggtgagacacacaccaatacgccttgtttattgtgagagcctacactcatccattatcaaacaaaagtgatgcctagtgttgggggcacaacactgccttccccatccctggttgctctagaggatcgcctccgccttgaatctccgccccgagatccttcgagcgttatgatgcgaaggatcagggtgaggctaacggtaacgcgttttgtatggtgctgtgtagttgcaggaaccgagccagtggcggaggccgcgaggaatggaggagaggacctttggattcccgcgtgccgaaggataggcgaaggcatgtctgaggacgcggtgacgttgagaaaccttcatggcccctgagccgaggaaccttcggcgtcttcagtccaaaggttcggtgtacgaccgaaggatcaagacctgacaggttggagtcccgagcggagagcgcgtgtgtggagctcgtagtgtgaaattacttaaatggtttatggtcaatagtctgtaacgagaggatatgctggaatattctcccgccgtcacggggtattcttgtaaaaggcttgaaccggcttccatgccctatataaagggagtgtaattgcatttggaggagagagatcatttactattcctaccctctgttgccaaccaccgttctagggcattgagccagttgtctacattgtcctagaccacttaggccagtttcaatggagtttcatgagagtttcatgcacattaaatatactgatgtggcgttatagtaatgaagagagagatgataagagttttatgggagtagagagagtttcatccccataaaactccaatgcactgtttccaaaatatagatgtgttgaaaactgggctatgaaactccgatgaccttactgcaacccgtgagcgagctgcttgtgcatcgtgctgctgggagtgcaggtgcacatttcccaacacctagcaagcaagggtcctatagtagcattaaatcatgttcatgcttcattagaggttgatgaatcaataaaatggatttaatgttgcgttaaaatatgattatgttgcgttaaaattgatcttgagaagatcaaacaaaaataaagacaggcaaatgcaattttctaggtcatctagacgtgattgaaggtggtcacagggtttgttgacttcacttgtatttttctataattttattatcataaatgtttttacttatcttgtgaccagagatattatgttactacctgtaatatggactttgccatatcttgattttttttttcgtcctccgccactgcctaccatgcccctaaatcaaatgttaggccttgtttagttcctaaaatattttgtgaaatttttcacattttctatcacatcgaatcttgcggcacatacatagagcactaaatataaataaaaaaaattaactaattatacagtttaactgtaatttgcgagacgaaccttttgagcttagttagtctatgattggataatatttgtcaaatacaaacgaaagtggtactatttctattttgcaaaaaaaaaaattggtagtaaacaaggactatgcaagaggggattgatccatcgcaggcaagccacatggtaaggcacagctccaaacacatgtgaaaccacgtgttgtggatgtgcaactgcctcactccttcttcttatctataaatacagcacaccccctcctcatttctcagacacaagtaaagagcaaaacatagctgaccgttcaaagcagcacacacacactccctcccttactagccatggcctattgcgaaatggctccttgtgcgctagctcaacattctgagcttacgatgactctatacacaaacaaggaggtgtattctggaccagaccaaaatgcagcaacaaacacagaagggtcaacaataatgggcagaacccaggtctactcgtggcctgtagccgatggggcaactcctgatgcaaacatcgtcggccatctccagggcactagtgttcaagtagccaaatctcccgccgcggtgtatcactactccctgggtttagtgttctcggatgaaaggtatgagaatatatatgcgtcgttatttagtagtacttaattacacacaacttcgtatatatagtacttccacaacctctctcaagtagaacatcatgcagttatttttttcgtagatgctacacatgtgctcataggaccaccagagtttattcatttgttcaattctcatttttcaagataaaagcctactcacggcattttttcgctttctgtcaacatacctcatgatgtatatatatattggtgagaaaagtttagactggttaacggaaattaacacaagtaattatttttctcatcgcgtgatatatattgatgagaaaagttactacaataaaacatcacgtaatcattttgcgcacaattcaacacaggttcaaagggtctacactccaaatacaagggacttcccaaataaatggtgagtgggccattgttggagggacaggagaacttactatggcaacgggtactgtcaaacgcacaacagttgtagagaaagactataccaggatctcagaactcaaaatacatgcctatttatttcgctccagtgaagcctagctactacgcctaatgtaagtaaaatactcgattattcatacgagcaactcaaagagtatctttgtagtctttctaatgcatatgaatagagattttggtaaaaaaaaaactctccaaccacttctctaattaggtgtccaactatagtcatcctctattctagatatcttgctagctaaagatggagagcgagggtgcctcaccagagtgagcacaatatatatatttattgaagctattcgatggtggaaagatatacagcacgaattttattctaatgactcgaaatgataatttagagagttagtctaagagagttttggagattctgttatatatgaatacatttaatattcccttgattttatagttgaaactccagatatatagggcatattattcccttgagtttaagagaaagttttggagtaggcatctgtctttactgttgaaactttagatttcctaacttgtacatattcccttgattaatcatgtatatccttgtgtaggtttttgagacttctgaatccgattaataacctccagaaggccggagctttatgcagttgtttagactagtcttcgtgcatcccagacaataaatgccagtatctgcacttcgtcagtgttggcttgtttcctaataaataacttggactttgtatccggttcgtgtcaacttgtagtactttgctagctgtaagggctgtcggtgttgttgtcaccttgtactgagctcttttgtatttcaataaaactccgtgtcatatcatgtgtgtattcataaatcataagatgtattttaaggcctttgcttctgaaaaaatctctctttgtccctctcacatgccgatgtttgggctgcatcttgtgggcgcgaactggacctagtggctgcatcagcaggatccggcggctggaaatgctcgtgcatcagtaggaatagagagagtttccagccgccggaaatatatactgatgtgtatttacactacaacatgaccttttatacaaggcatttaaaaatgcctttaaaagtgttcagaatgtcttcaaagacctttttaggcattttcaagaatgccggctataaactggactcaaaaggtcttttgaggcattttttaaaacgcctttcaatatcaatatataaaggcattttctagctgcctacaatactttttaaaggcattttctataagccttcaaacatttgtgaaggcgttattaaaaatacctccaatccaactcatacatgcagaaatttgcta

SEQ ID NO: 4636 - DNA, 2956 bp, Sorghum bicolor
ctccaaaaataaatttttggaggcaagcacactataaggcccgcctcctaaaagataggagctcatcgtggcccgatatcacgctcatagtatatatacctagggccagggtttcattcacttgtctctctcacatccctcggtcccacccgactggcggcacccccaacaccctgcacccgatgcccatcactcgctgctctctgtccatcacctctccctctctcccatggcagctctacccgaggctcctccctcctctccgccgtggagctcgagcttagcacggggtggctggcggcgcatctctctccatctcctgtggtgcatctctctccttccagttcagtcggcacatgcatggggaagtcattggtgcacatcgctctccccctcccctgcagcgcatccctctccctcaagcacgatggtggatctggcccccatgcaaacggatcgagccctgcaattttggcggcagtgccccgatctccactggatctgctggtcgtggaggaggccagccttgatccgctctttgacacaggtaagatccactcttccctccctcactcaccataattcattgctcctctccctcactctcttcctcccagcagggctgaggacccagcagcatggaggtgcacatgctctaaatccgacatggaggaggctgcccgcacccggatctggcgagaaggaggtcggatgtgccttgatccggcgacaccggtagtcttgatccacagcgaaagtcggtatggaggtgcatgcacctgcgtgtggcatggcgaccgacggcggcgctagatccagcttgtgagctgggaatgggctcgggaacgggcttgctgttgggttcatggatttgtttttgttttttcatcgattaaccgaggcgggtattctaaagagcccgccttcattaattagttaacgatgcgggcatggcaaccgcctccattaattctcgattaaccgagaccattgattggaggcggttgcaatgcccaactccattaattcttttcatccgcctccgatccaataagatttatatactagtggaaatttatgtttttaggttcacttgaaaaacactttcatagtgtataagtccttgtataaggattttgcgaaatggatgctcaacgatagtaatgtttgatttaagacaaacctaacatgacatgtaaaaaagaacagtgtgagtaataaattggaatatacccaatttgtcttggcctagccaatatttggctttcgaccaaatgatagtctaagttagctgactaggccaacattaagtttggcgggctgagagcttaaaaccaaaaatgcccaaaagcactgagaactttgagaataacagctaaagcatccaatggaggtaatcagttttttcttaattatttttcataattgtggcgcgttcgtcctggaggcattgcatgcacactttagtgcattgtggcttgtttgtcatcacaattaaacacggcaggttggctcctatatctctgacacaattaactaagacagccaatatatccatagccgccataaaaaaaatattgaaacgatggtacgtgacgcggtggacacatgcacatagccccatatatataggatccagtgatccagtctcccgatatgtacggttatcacacatgcatgaatcacaattcaaaacgcaaagtgccagtcaccgtacgtcccattcaccaacatggcagactctgaaggatgatggttgacttccggtgtatgatgcatgatggttgactttcgataagtacagatcaaattttggttcaaccttttccatggaagacaggaacagcttgttcttatttggatcctagccgccactacatgcatacacagcggtgcagcatgtgtggtgcatgtggacggcggagtgcagttattattaattacccatgcacatatatatacatcacaattcaccacaacagggcagactctcggatcccatggcaattcttatcgtatttgccatttgcatctcggccctcttgccaggtgccgcctccacttctctactcaccaaagcagcaaacgctaatggcagccacagtgacctcgaggcgctgctggccttcaaaggcgagctcactgatcctaccggcgtccttgccaggagctggacaaccaatgtgtccttctgtcgatggcttggagtctcgtgcagccgccgccaccggcagcgcgtcacggctctgtcgctgtcggatgttccgctacaaggggagctcagcccacacctcggtaatctttcgttcctatccacactcaatctcacaaacaccagcctcgctggctccatccctgccgaacttggcatgctacgtcggcttaaggttttatctcttgttcgaaatggcctatctggtgccattcccactttcccagtaccattggaaacctaacaatgcttgaagatcttcgtctaagttacaatagactgtcaggagaaatcccacaaggactactgcaaaatttgcacagcctcaagtggttttcacttacccagaatcagctaactggccacataccaccaagcctattcaataatacacaatctctaaggtggctcagcttgaggaacaacagcttatcaggtccaataccatataatctaggttccttgcccatgttagaactcttgttcttggatggcaataacctgtccggtacagtacccccagccatctacaacatatcaaggatgcagtggctctgtctgaataacaataactttgctggttctattccaaacaatgaaagttttagccttcctctattgaaggagctttttctgggagggaacaattttgtgggtccaattccatctggacttgcagcgtgcaaatacctagaagctctcaatttggtaggcaatcattttgtggacgtcgttccaacttgg

SEQ ID NO: 4637 - DNA, 5013 bp, Sorghum bicolor
atctagtatcacctagaaatttccttcaatgcctttttactcgatctttttcgaattataagttattctgattttttttatagaataaattatggacctaggtataagtgaatttctagctagaagcaaagtaaaaattatatatatatgtaaaaaagctcagactactaataattcagcacggatggagtatatacatccattatgttccattacatcttatggtttctctctaacggctaacgctattgattctatttttcctttcttcatgtgtgccattgaggactcacaagagttagtcaatgctgaaaaagacaattgtaccatgttgttttttgtgcagtaaatcattccaacgaggatgtaggttatgtaaagaataatttaaggaatgagaagaagaatggctaggaaggggtaaaatcagcataccagtgtctatcagactatgcaccagattaaaggcagtggcacataagaaaagcgaagttctcaattgatgacaatgaatatatcttatatatatatattttgatttatatatagtagtgcaaataggctaatgaacggatcctatttttagaatggcacataattaatatactgctatacaatacataggttgccaaccactagtgatcataggttggcaacctcttcaccaccacatgtggtaccatgcgcctctgagtagataacatgtgaccctggagatagaggtgacaagtgcataagctctggacgtcatgacataaaaactagattgaatgaaaatttcaggtctagctttattttcactgtcggttcataactctgaccggcaatggtgtactatcattgacattctttgagaacaaagagcagttgtgatgaactattattgccagttctaacataactgacagtgacgtagctggcattttataataatgacacatttagatagctaggccacctaaaccaaatttgtttttagattccccgtcacatcgaatcttgcggcacatgcatgaagcattaaatataaataaaaccaaaaactaattgcacagtttacccgtaaatcgtgagatgaatcttttgagtctagttagttcatgattggacaataattaccaaataaaaacaaaagtactacaataactaaaaccaaaaaaatttcagaactaaacgaggccctaatgtgtgttaggatacgctaacttcaattcaattcatcctgatgagggatgggttcttcgtcaacatgccagaggataagagtctcttctagcccaactacgtccgtgcacttgtaatattatcactggccagaagttaacataattttgttaattaaatccactagacagaaaaggatttggaaatatcatcagatgattcaagatattgatttcagaggatcagagcatcttttatgacaagatggcaaaatgcagaaaattaaattgtggacatgtttgatagcaacttttttgattgcttgatatatacaacattataaaagacaacaactaatttcattttcacttgtagcttttcatgcgctaatcatccaccgaatatatctgtaacatcatccatttcacttggtgtgaatttgcctttcttcccaacaatttatagcaccatcagtaacatcactgattttaccatgcatggacgtgctagatagtaaaccagtgctactacacttgaatgcatggcaactccatgtgccgtattaattttgctctttactgagcaagatagagataaggatttgaattcctgcaaataaaaaaaaagttcaatactggcacttgccttcctcgagttccatagtatactgattttctgcgatacactcaaccacaaacccaaaactgcttctcacgcgttgcttaaattaatggcgtcttcgcttctgtgatatacctacacctatctagaccaaacctatcagaagcttgttagctgaatttctatttaaaccctggtatagagcaaaccatggagcattgcaaaccaacacacacacacacagacggcaacaagccgacacggatagatcaatggccgcgtcttctcatgccatagcccccacggatgctgagctgctgcaagctcaagctgatctatggcgccacagcctctactacctcacgtccatggcgctgaaatgcgcggtcgagctccacatccccaccgccatacacaacctaggaggagctaccacactgccagacctggtaaccgcgctatccctcccgaagaccaagcttccattcctaggccggatcatgcggttgctggtcacgtcaggtatctttgcttctgacggcgccaatggcgatggagcggcggcggaggccgtgtaccgcctcaacccactctcctggctcctggtagaaggtgtggaatccgaggaccacacctaccagaagtacttcgtgctcgccaccgtctcccagcactacgttgacgccggcctgtctctggccgactggttcaggaaggatctgcctgagccgctgccatcgcctttcgagtgtttacatggcgtccccctcgcccatgagagcacaaagctcctggacgaggagcttgacaggattgtggaagaaggtgtcgccgcgcacgacaatctggcaatcggaaccataatacgggagtgcagtgatattttcagtggtcttcactcactgacttattgctgtggtagacagggaaacatcagtgccacggcgatcatcaaggctttccctgacatcaaatgcactgtgctaaaccttccgagggttattgagacagcaccagctgatgatgctgttagctctgtcacgggtgatttgttccacaccataccacctgctcaagctgtgatgctcaaggtatgagtggagtgacaaaatttggggcgaattctctctcacacacacatgcatgcttcattaccaaaaaaaatatattagaagtggaatttaattttgtttgtgtggcatacggcgtcttttgtatacatattgaccattgttataaatagcccactatagcatcattacttcattagtgctctattatatagccttttcaaggttatacctctacaatatcgtcaattgttctccaattgctgttagtgatgttttagctttgttaagaacagctaattgggttagccacaaaatagtttagcaccgctaatcccggccaaggaaaatattcatttttactctagaggagtataattaatgcctatctatctttacatattaactctctaataattattaaaccattaaacattgagtgttgaattaatatagacattggtatagtttccttgagtatgttcgttgatttaatgcatgttaagtaattcacatgcatggagacatgttctcctagagcacgtacatgtttttaagtatttttgttgttgaaaatttcgttagctaaatgctttatgtgtagttagttaaaaattttcatgtttcctattaaaaacgctagttattaaatagtgtctattgtggcatgctatagccttctacaacttatagtggagaagatcactaaatgtcatggcctgctacttgcagcaatgaacttaacagggtaaattagtacaaactgttattaaacttgtatacggcattatgttctgcagcttgtactccacttctggagcgatgaggattgtgtgaagatcctggagcaatgcaggaaggcaattccttctagagaagagggagggaaggtgatcatcatagaaatacttcttgggccttatatggggcccataatgtatgaagcacagctgctgatggacatgctcatgatggtgaataccagaggcaggcagcgtactgaaaatgactggcgccagatctttactaaagctggtttctctgactataagattgttaagaaaataggagctcgtggtgtcatcgaagtctacccataaggctgcacacctctaaataaatatcgaccattatgctaataaatatgtgcttcagtatttgctggacgatgtgatgtcacgataatgtaaaataaatggagtgcgcctcgttttcgtatgcatagtctcatggatatgcagagaaggtgagctgtatgttcaactttattacttcgagatccatgttttttttgttttgaaatgtactggagcactctttgtgcttccatggtggtatttttgatttggatgtctttgtggtacatctaataattaagaacatacttgatgtgtgttgcttgctgatgtttaagagatacacaaacacaacatgtatgcaacgtatttatcatgctatagcattgtatagcaccactataccattgatactacatctttattctgagggggaaaaaaggacacgaagagcttggccaccgtgttataagaacaatgtgaaattaccctaccccctctatttatagtgactactcttttgtacaaggcaagaaagcaggaaatgcaatcaaaattgatgaacttgtgacattttatttcatatatacgatcttctagtagtattactagtccggatggttacttttttctgtatttctaattaatgtaagctatcattaattagtgtataaattgtggcaccagctggccactcaacatcttgcatttgttgggccgatcaaagtgatttatgggctactgaagtggaattggtcggatagaaacttgatacatatctaaataaaaagagatgggccaaaaatcgtatataataatagaatgggcttccaaaaagcaatgccctctaactggtttgggccatgaacaggccttgtactatatggacttttttttatctaccatgtcagcacctagtctagctacacacatgttttctcaaaagaaaaaaaaaactagtctacacttaagatgcgtggcacgggtatcttaagagactacttttagatcaatccatttttatgacacgggtatcttaagatgcgtggctctcacaatcaattattaggcaccaacattta

SEQ ID NO: 4638 - DNA, 3283 bp, Sorghum bicolor
ctaatattgaaaggccatatcacagaccagagcaaactctaggttgaaccatcaaacatttagaaataaatatatattcagctaaaaggaaattaagattgtagatacaatcagagccaccaggccatttattctttaatcatgtaggcatcatgaagctctaaaaggaagtcgacaattgttctattatatttgatcacctttagtgcccaacaaacttgagaaataccattctagatagaacaaacactcgaatctatccaaataagcaggaacaagtagaattagttgctgctctctttgattcaggtcttaaagatcgaggaattagttcactttctaattggcaccagctcttatagggtgtttggttttagaaattaaaatattctcaatgagatgatgcgtcaactcattttagtccacaaatcaaacaaaaatatgagcaatgacaagaccatgaactaacacgttcctaaaactaaacaccctgtctgttcctcctccaaatttctcttgggctaggggatgccattagttgtactttagtatcataagagcaataagttactacacattgcttatattgaaatagaacaagagcaagatttaatattttggaatttaaatctgaacacgtaattattctcaacaaattcactttatattatttagcactaattcatgagggtgtccctaatatatataaacaaatgtgtatggaaattgaaggcacctttaaatatctagatttttctacggtaccaacaaagaataatctttaaatatctagatttttctacggtaccaacaaagcaaccttctgcgctgttttcaaaatatggatgtgttaggaactggttcataaaagtccaaatgaggatgaccttagtggaggttctgcaatctgtatcggtgaattggtgtcatcaaattctgtcgttagccaggttgttaggggcaggcgaacattgatgctgcctataagggttggagctaaagtatgtcctcatcctcatggtgactgtggccattaataagcccaagttgccgcggccacaacaaatcgcccatatcagacgctgatttgcagcgctctctccgttgctacgagatacagatcctattgaaccttgatcctctgtgtgttgtttttatattttgtgttcgatttgttgtctggttaagtttggtttttaatcaatttagtgccgatttatttagttacctatatactcttgaccctcggtctagtctacgacgagggaactcttatggtttggaaaattgcatgattcgtcatgtcgaaagccgggtggactcaccctgccccgatgtggactccgtttcggcataggagccattgccaaaaaagtttgacagacgaggtgttgtaccttgaattagatcgatctttgtctctatcggaagcacataagattagctagaaggaggccagacgaaaatttaatttgaaaatttgccattttagtattaaggtaaagattaggagtatatagattattggcagacaaaattacccgatggactgaaattttaacaattatatattagggaaagataatatacacaagttttgtgtgttgtagatgtacaactaaaatatgcatctagatcttcagattattcacctttatgatttctggtctctagaaatttctagaaggttcaatttttgaagaggttaggatactattgctactcactcaaataaaccctaatgatgtgacaatgccattgtgtccccgagaccatgacgagtgggcctggtgtcatgtcgttggcacaagcaactcttgccaatgcaaagtgaagtgcatgcatgagtgatgaaagttgcatggcggcgccatgcgtgccgatgagaagcaaatgcatgcgtttactgcgacttaaccaccaccattcccgatccacctcctccctcttttatacctgccgtcactctccaacagttccatcgatctcccccagcagccatggccatcatgccatcgtcgtcgtcctggacgacgctacgagctctgacgatgaccttggctctcgccaccgtcgccgctgctgctgcttcccgtcagccgtcgccgggagcatccaccaccaccaacctgaccctccacaacctgtgcccgtacccagtctggccgctggtgaccgccaactcaggagtgccctcgatcccgaccgacgccgacggcgagccggcgggacgtctggacggcaacggcgacggcctggcgacactggcgttcccgccgggggcgtggtcaggccgcgtggtggcgcgaacggggtgcaccggggacgacgaggaagacgcgtacggcgacgacggcccgctggtcccgttccggtgcgcgacgggcgacgcgccgccggtgacggtggcgcaggtgagcgtgggcgggccgggcggcgccgcggcgtacagcgtgagcctggtggacggcttcaacgtggccgtcgtagtgacgccgcacgggctgccgccgccgccgccggagggtgcccggcgcgggcggcggtgccccacgctgggatgcgccgtggacctcgccgccgagtgcccaccgcgcgcccgcgcgcctggaggagggtgcggcgccggcgcgtccgaggcggcgctgttcaagcacctgtgccccgatacgaggaccaacgccacggacgtcgaggtctcgccgcaggactgcgtcgaccccggcgagatcaaggtcgtcttctgccccaagcctgacagcgtcgtcgccggccacctctagcgcgcgtccgtggccatgcatggccggctctcgggtcgtctccacatgcaccatgcatgcatgcatgcatgctccgttactacgtgagacgtgcacttatgtctcactgaataaaagtgattagtgctgcaattagtcgtcgtgacagttgttactgggttactgtagcagtagtattagctagcttggtactaattatgtagtcgtacgtgtgattagtcgatggatcttttaagtatcttggccacaaatgagaaactgtgacaggagaagatgatggaagcatcgaagattttgcaggagaccgagctgttgagttccaagcacaaggagacaggaaggcacaagaacgttcccatcaatggcatccgacggcaagacaacaagagctgagagatctcctcgtaaccatcgccgccgaggcttggccgcttgcgatcccggcctctcaaatctaccgaccataacgccatgccgccgcggggcctctacctctagta

SEQ ID NO: 4639 - DNA, 8637 bp, Sorghum bicolor
  misc_feature (1)..(1389): n is a, c, g, or t
  misc_feature (2793)..(5151): n is a, c, g, or t
nnnnnnnnnnnnnnnnnnnnnnnnnnnnnnnnnnnnnnnnnnnnnnnnnnnnnnnnnnnnnnnnnnnnnnnnnnnnnnnnnnnnnnnnnnnnnnnnnnnnnnnnnnnnnnnnnnnnnnnnnnnnnnnnnnnnnnnnnnnnnnnnnnnnnnnnnnnnnnnnnnnnnnnnnnnnnnnnnnnnnnnnnnnnnnnnnnnnnnnnnnnnnnnnnnnnnnnnnnnnnnnnnnnnnnnnnnnnnnnnnnnnnnnnnnnnnnnnnnnnnnnnnnnnnnnnnnnnnnnnnnnnnnnnnnnnnnnnnnnnnnnnnnnnnnnnnnnnnnnnnnnnnnnnnnnnnnnnnnnnnnnnnnnnnnnnnnnnnnnnnnnnnnnnnnnnnnnnnnnnnnnnnnnnnnnnnnnnnnnnnnnnnnnnnnnnnnnnnnnnnnnnnnnnnnnnnnnnnnnnnnnnnnnnnnnnnnnnnnnnnnnnnnnnnnnnnnnnnnnnnnnnnnnnnnnnnnnnnnnnnnnnnnnnnnnnnnnnnnnnnnnnnnnnnnnnnnnnnnnnnnnnnnnnnnnnnnnnnnnnnnnnnnnnnnnnnnnnnnnnnnnnnnnnnnnnnnnnnnnnnnnnnnnnnnnnnnnnnnnnnnnnnnnnnnnnnnnnnnnnnnnnnnnnnnnnnnnnnnnnnnnnnnnnnnnnnnnnnnnnnnnnnnnnnnnnnnnnnnnnnnnnnnnnnnnnnnnnnnnnnnnnnnnnnnnnnnnnnnnnnnnnnnnnnnnnnnnnnnnnnnnnnnnnnnnnnnnnnnnnnnnnnnnnnnnnnnnnnnnnnnnnnnnnnnnnnnnnnnnnnnnnnnnnnnnnnnnnnnnnnnnnnnnnnnnnnnnnnnnnnnnnnnnnnnnnnnnnnnnnnnnnnnnnnnnnnnnnnnnnnnnnnnnnnnnnnnnnnnnnnnnnnnnnnnnnnnnnnnnnnnnnnnnnnnnnnnnnnnnnnnnnnnnnnnnnnnnnnnnnnnnnnnnnnnnnnnnnnnnnnnnnnnnnnnnnnnnnnnnnnnnnnnnnnnnnnnnnnnnnnnnnnnnnnnnnnnnnnnnnnnnnnnnnnnnnnnnnnnnnnnnnnnnnnnnnnnnnnnnnnnnnnnnnnnnnnnnnnnnnnnnnnnnnnnnnnnnnnnnnnnnnnnnnnnnnnnnnnnnnnnnnnnnnnnnnnnnnnnnnnnnnnnnnnnnnnnnnnnnnnnnnnnnnnnnnnnnnnnnnnnnnnnnnnnnnnnnnnnnnnnnnnnnnnnnnnnnnnnnnnnnnnnnnnnnnnnnnnnnnnnnnnnnnnnnnnnnnnnnnnnnnnnnnnnnnnnnnnnnnnnnnnnnnnnnnnnnnnnnnnnnnnnnnnnnnnnnnnnnnnnnnnnnnnnnnnnnnnnnnnnnnnnnnngtaaaagatcccatcctgacaagatggtacatccatccgatggtgaagcttggcgctacttcgatgagaaacatcctgacaaagccggagagtctcgtaacgtacgtgttgcgatagcaaccgatgggttcaatccttacgggatgtcatctgccccacacacatgttggcccgtgtttgtcatcccccttaatctccctcctggtatcgcctttcaacgacaaaatgtattctgttcgttgatcattccgggtcatccggggaaaaatatgggcgtgtacatggatcttatttgggatgaattgataactgcttggaatgatggcgtatggacatacgaccgggctacaaagaaaagcttcaaaatgtatgtgtggtaccagtactccatccatgacttcgtggcatacggtttatttagcggttggtgtgtacacgggaggttcccatgcccaatatgcaagacagatgcaaggttcaactggttgctgaaggggggcaagtattcgtcgttcgacttacatcgtcaattcctcccccttaaccacgcatttcgacaagacatcaagaactttacaaaaggtgtcaaagtactagatcctcccccgcacatgtcgacacctgctgaggttcatgctcagatagaagctcttgtggccaatcctggaggtggttttcagggatatggtgtggagcatttgattgtccacctcccgtatgaggctcgtatgggggggccacagcagtaccgttggatgtatccagtcgagagagttctgaagaccgtacgcaaaaaatgtagaaataaagcaagacctgaggcttctattgcacatgcatatgttgtggaggaggtgtcaaacttcacacagaaatactataccgagaagctacccagcgtgcacaatccactacctcgatacaatgccggcgaaaatgaatcgaccctcagccttttccgaggccaactcggtaccgcaagtggttggaacactaagcaactgaacatagaagagtggcggaagatcatgctatacattttgaccaaccttgacgagaccgaatcgtacagaaagtaagccctcaaataactagtttcaataagccgtcacttttcatttgtaccaaccctctcctctcattggtacagggaattcattcgacaatcctggcatgaatcgagggatcctaccccgcaagaagaagatacccttttttcacagggtgcggcaggaagccctgattttattacgtggttcaaaagaaaggtagtgtccattccaactcatcttgatatttgtagttcatcgtacgtttttcataatatgacgatctatcctggttgaccttacagggccaaaccgatccctctatgtgtgccgagttgagacaagtgcaatcggnnnnnnnnnnnnnnnnnnnnnnnnnnnnnnnnnnnnnnnnnnnnnnnnnnnnnnnnnnnnnnnnnnnnnnnnnnnnnnnnnnnnnnnnnnnnnnnnnnnnnnnnnnnnnnnnnnnnnnnnnnnnnnnnnnnnnnnnnnnnnnnnnnnnnnnnnnnnnnnnnnnnnnnnnnnnnnnnnnnnnnnnnnnnnnnnnnnnnnnnnnnnnnnnnnnnnnnnnnnnnnnnnnnnnnnnnnnnnnnnnnnnnnnnnnnnnnnnnnnnnnnnnnnnnnnnnnnnnnnnnnnnnnnnnnnnnnnnnnnnnnnnnnnnnnnnnnnnnnnnnnnnnnnnnnnnnnnnnnnnnnnnnnnnnnnnnnnnnnnnnnnnnnnnnnnnnnnnnnnnnnnnnnnnnnnnnnnnnnnnnnnnnnnnnnnnnnnnnnnnnnnnnnnnnnnnnnnnnnnnnnnnnnnnnnnnnnnnnnnnnnnnnnnnnnnnnnnnnnnnnnnnnnnnnnnnnnnnnnnnnnnnnnnnnnnnnnnnnnnnnnnnnnnnnnnnnnnnnnnnnnnnnnnnnnnnnnnnnnnnnnnnnnnnnnnnnnnnnnnnnnnnnnnnnnnnnnnnnnnnnnnnnnnnnnnnnnnnnnnnnnnnnnnnnnnnnnnnnnnnnnnnnnnnnnnnnnnnnnnnnnnnnnnnnnnnnnnnnnnnnnnnnnnnnnnnnnnnnnnnnnnnnnnnnnnnnnnnnnnnnnnnnnnnnnnnnnnnnnnnnnnnnnnnnnnnnnnnnnnnnnnnnnnnnnnnnnnnnnnnnnnnnnnnnnnnnnnnnnnnnnnnnnnnnnnnnnnnnnnnnnnnnnnnnnnnnnnnnnnnnnnnnnnnnnnnnnnnnnnnnnnnnnnnnnnnnnnnnnnnnnnnnnnnnnnnnnnnnnnnnnnnnnnnnnnnnnnnnnnnnnnnnnnnnnnnnnnnnnnnnnnnnnnnnnnnnnnnnnnnnnnnnnnnnnnnnnnnnnnnnnnnnnnnnnnnnnnnnnnnnnnnnnnnnnnnnnnnnnnnnnnnnnnnnnnnnnnnnnnnnnnnnnnnnnnnnnnnnnnnnnnnnnnnnnnnnnnnnnnnnnnnnnnnnnnnnnnnnnnnnnnnnnnnnnnnnnnnnnnnnnnnnnnnnnnnnnnnnnnnnnnnnnnnnnnnnnnnnnnnnnnnnnnnnnnnnnnnnnnnnnnnnnnnnnnnnnnnnnnnnnnnnnnnnnnnnnnnnnnnnnnnnnnnnnnnnnnnnnnnnnnnnnnnnnnnnnnnnnnnnnnnnnnnnnnnnnnnnnnnnnnnnnnnnnnnnnnnnnnnnnnnnnnnnnnnnnnnnnnnnnnnnnnnnnnnnnnnnnnnnnnnnnnnnnnnnnnnnnnnnnnnnnnnnnnnnnnnnnnnnnnnnnnnnnnnnnnnnnnnnnnnnnnnnnnnnnnnnnnnnnnnnnnnnnnnnnnnnnnnnnnnnnnnnnnnnnnnnnnnnnnnnnnnnnnnnnnnnnnnnnnnnnnnnnnnnnnnnnnnnnnnnnnnnnnnnnnnnnnnnnnnnnnnnnnnnnnnnnnnnnnnnnnnnnnnnnnnnnnnnnnnnnnnnnnnnnnnnnnnnnnnnnnnnnnnnnnnnnnnnnnnnnnnnnnnnnnnnnnnnnnnnnnnnnnnnnnnnnnnnnnnnnnnnnnnnnnnnnnnnnnnnnnnnnnnnnnnnnnnnnnnnnnnnnnnnnnnnnnnnnnnnnnnnnnnnnnnnnnnnnnnnnnnnnnnnnnnnnnnnnnnnnnnnnnnnnnnnnnnnnnnnnnnnnnnnnnnnnnnnnnnnnnnnnnnnnnnnnnnnnnnnnnnnnnnnnnnnnnnnnnnnnnnnnnnnnnnnnnnnnnnnnnnnnnnnnnnnnnnnnnnnnnnnnnnnnnnnnnnnnnnnnnnnnnnnnnnnnnnnnnnnnnnnnnnnnnnnnnnnnnnnnnnnnnnnnnnnnnnnnnnnnnnnnnnnnnnnnnnnnnnnnnnnnnnnnnnnnnnnnnnnnnnnnnnnnnnnnnnnnnnnnnnnnnnnnnnnnnnnnnnnnnnnnnnnnnnnnnnnnnnnnnnnnnnnnnnnnnnnnnnnnnnnnnnnnnnnnnnnnnnnnnnnnnnnnnnnnnnnnnnnnnnnnnnnnnnnnnnnnnnnnnnnnnnnnnnnnnnnnnnnnnnnnnnnnnnnnnnnnnnnnnnnnnnnnnnnnnnnnnnnnnnnnnnnnnnnnnnnnnnnnnnnnnnnnnnnnnnnnnnnnnnnnnnnnnnnnnnnnnnnnnnnnnnnnnnnnnnnnnnnnnnnnnnnnnnnnnnnnnnnnnnnnnnnnnnnnnnnnnnnnnnnnnnnnnnnnnnnnnnnnnnnnnnnnnnnnnnnnnnnnnnnnnnnnnnnnngcattctgtgatgttgtgatgctttggaccatatatgtgctgttttggatcatatatgtgatatatgtgtattggatcatgtattagaatgaagaaacagaaattaaaaaaaaagaaatggtcagtataccgagagccacgctcggtgtatctggggaatggtcatttcaccgagcaccaccctcggtatacctgggaacattttacctcgttccccagatacaccgaggggcaaaaggctctcggtgcaacgaccataggtctaccgagggctgagtaccaaaaccctcggtacaatatatgtaccgagggttccatctcgctctcggtgtcttttaatttaatagttttcaggccagcgtgctaatatctaccgggggggaacaaagccctcggtacaatgttgtaccgagggttctctctctctctcggtgaaatttatttaaataggtttcagattttaaaaaccccgacagctgggacccatttataaacatctaccggggggcaactacgccctcggtagaacattagcaccgagggtttacttctctgctctcggtgtaagtggagtcgacggcaacgctaacgaagggaaagaaggtaacgccgtcatctgctagttttgtaccgaggggcagatttgccctcggtggactattgtaccgaggggctggtatccagctctcggtggacttagttcatcgactaaatttttaccgagcaaaactcaccgagcgatacgctcggtagacggtgtaccgagcggctttgttaatccaccgagcgtttgtggcgctcggtggatgtcggctgtgcagtagtgctagttcacttgattaaaattcaaaaaggatcataaattatccctccctctctctccctctccttcctgttgactcattcagtgctcaacattggattcatcgagcgcctgtatgtcatgccaacatacctacctctaataacacgtcaggtcaccacatcgatgtttgttgcctctgtcttacagtagtatttaccatcaattcctcagttccagtgctaatataatacaccggatcggaggtgagcgtcatgcatggaagccacgcccacgccaccctcccccactactgtgtttcttgagctgcagcctccgacggcctgcggcatgctcatggagaaggactcatcatcagctcaccaggacaatgaccttgtgctcccctacatctcgcgcttgctcatggaggacgacatcgccgacaagttgttcttccagcagtacgacctggacgaacctgcactcctcgaggcccagcagcccttcattgagatcatctccaatgccgtcgtcgtcccgtcacgcccctgcaataataattattccggccagccgctggtggcaccggcaccttacactggcaccgccgagagcatggcagagactaacagcttattgctgccacccgagaccgagaccgagagcagctgcggcatggacgcggtgagcatggcattcttcagaggcatggaggaggcgaacaaattcgtaccgtccatcgtcgtccctagagatagggaccgcgagacggtcgtcgacgtcgatgacagcagccggagccggaagaagaggcacgagtcagaggcagcggcagaggccagcaagcagatggcggcacctgaatcggaggaggaagccaccgcacgcgagatgctggaccggttgatgcttgacggctacaacccaagccttgcatcggacatgaacgaggcggaggaggaggaggagacgatgacgatgtcacggtcgtcggggaggcggcggcgcagcggcaccggcaccggcacaaagcacgcggtggacatgcataccttgctcatccgctgcgccgaggccatgtccaacaacgactggtgcgctgcggctggcctgcttgagcggatcaagtatcactcgtcgccgacgggggacagcacgcagcggctggcgcactgcttcgccaagggccttgaggcgcggctggccggcatgggtagccagacgtacctgtctctcgtggccaaacgtgcctccatggtcgtcgtcctcaagacctaccagctcttcatggactcgtgctgcttcctccctgtgcaactgctcttctccaacaagaccatctacaaggccgtcgccgggaggaagaagctgcacatcgtcgattatggcctaggccacgggatccagtggccggacttgctccggtggctctcgcgcagggagggtggaccgccggaggtgaggttcaccggaattgacaagccacagcccgggttccgtccagcttggcccgtcgaggagacagggcgccgcctcaatgcctgcgcctgccagtttggcgtgccgtttcagttccgtggcgtcaccaagaagaagccgggggctatcgccgtcgaggacctggacattgatcccgacgaggtgctggtcgtcaactccatgttccacctggagacgttgatggatgagagcatcgtggtggagaggcccaaccccagggacgtggtgctcggcaccatcagcaagatgaggccatccgtgtttgtccacgccatagccaatggatcacacagcagtgctttcttcatggcacggttccgcgacgcgctgcagcgctactcggcgctcttcgacatgatggacaacatcgccccaagagacgacgacaagagggtgctcgtggagcaggacatatttgcgcggtccgccaccagcatcatcgcgtgcgagggcgtggaacgggtggtgcgccctcagaactacaagcaatggcaggcgcggaaccagcgagcagggctcaggcagctgccattggaccccgagattgttgaagcactcaaagacaaggtgaagaaggaataccacaagtgtttcgtcatcagcgaggatcaacgctggcttctccagggatggaaaggacgtgtgctcttcgccatctctacctggacggcagacagctgatccatgatctaacttgatgacatgaaacatttcaaaataataacacgcaccaagtcctaattttagcgtaatgatgatagggatcgtgcaccgtcagtgttttgtacttttaatttgttctagaccatatatatacaccgtcagtgtttaaatcctcccattttgtttatagcatctcttagcatgacatacatagccttataacaattcataaggtgaaagttccttggggtcgatacttaggcacccaacgatcgaccaggacaaatggggcaagcaacaaaattggacggggtcatcaaattcgattctatcaatatggtatgtactaccaaaaacactgaaagggacacaaatcacagataacccaaacaggacaaagccaataaagaagcatccatcatataccaagtcgtcatgcatatgtgtgcctggtgttggaaccaccgagcacctgaccataataattccaaacatgagtgtgtcacttcttcccctta

SEQ ID NO: 4640 - DNA, 3650 bp, Sorghum bicolor
agtaaattaacccacagaaactgtctccaggggctaaaccgatcgacatgaaactaacaaatatatcctgttggtttattcgacatgtatattttatacacttacaaaattttcactaaactattagtgcatatatccgtaaaagtaaactgctaatcatgcatggctgccttgatcgatctcatttgcgattataatgttatcaatattggttcccttcgtctaagaaatttaggccaggcagtgtaattttattgcatcgtgctcccttttgtctaaaatttaaaacattttcctaagattatgtacactgaaactagctagtttaatttgtgttagtaggaatcaagacacaacaaagcatgtaatgattagtaattgacacaatcatgtcctcacattacattcgtgatgtgcatcttggttagatccacaagtgataattcttatacgttatgattactgaccgattagtaaatgatagcgaatatctgtgatatactacataaagtagcctgtgacactatgtgttctgtcttatttcagaagtcgaaactttattattttaaataaaacttccttatcacctaaaaaagcactagcaagaaaattagccagagaattcaactcctaataattagtcaaacacagatcaaatgcatatactggaatccccgttgaattctgcaagcgctatggagcccatagctctgtactacctctctctctccaaagtattggttggtccacacttaatatccctggcaaaccaggtaatgattatcaataatatgtatgttttaaaacttgattacttgacgtcctttttatagttgcgtcagagaacattggatactctgctgaatcacaaagtttcatttgttagaccaactggggtgacccacaccaaagcttaataaaatggactgaaatgacacaccatatgattaatttattgagagattggaactaattaaggacattctcagtgcagattttcatagcgttgactgcaataaaacatggataaaagcatcactctcaatgcaatatttcattcttttgtttcatagatcgacatttaattctatgattcatcttgagttggtaatcaagagaagagagttatttatttcatcctcatgaaactcacttattctctcttttattaaaaacgttgccaaatcataaaaaactcttatatacatgtggtaacatattaaatgcaaatgaaactctagtaaaatatatcttcgcctaataataaacttctcataacgagcaggaacgaacagcgcttcgacatcatcacaagctggagctttcaactactgaatccggtctacatgcatgtatgctgaaagtcctcacacccctaatgtcactactcttttcagcactgaacatatatacagaggactagccagatgataaaatatgtggaaacaccagtgaacatatataggaggacgactagccagtcagacgtacaggataggtaagcagcgcatgcagcatctaatcaactcaaattgaattattcaattatcgatcaggaccaacttgtagctagtacgcatacatacattccaaaggctttgtttacaaggaaggaagaaagaccatgccatgctgcatgcatataaaaaaaatctactacttcagtgccagtaaaccaattactaattgagatgcctgctagaagcttaatagcgagacagagatgggagctgagacgaaaaagggtacacgcaaccatcaataatacctaaacaacaggcttgagaagacttgtcatctaatcatacaaattactgacctccgtcatcatcatcatcttcttctcttatgtatgttctcttctcctctcctctcctctcctctccctttattttctatcttcctcattccatctccaattttctttgtccgtgatctagctaggccagtagctatcatcagttgcatatgtctctctagagtctagagttgacaagtttgcagcaacagatagatcgatagctctctcaatcacatgaactcctccaccgccaccgccatggatcaaacaggcaagtactggggcatgtggggagcaagcagcagcagcagcaccagcaccgcgagccccatctctgcttgggcagcggcgtacggcggcagcagcgaaccgtcgtgggaggagcaggcctttgcgcgtgatgcggcggcgcacctcggcggctgcgtgtggccgccgcgctcttactcgtgcaccttctgccagcgcgagttccggtcggcgcaggcgctcggtggccacatgaacgtccaccgccgtgaccgggctcttctccggcaggggggctcgtcgtcccctgatgacgtgcacgcccccaacgacgatcagtcacacccacagcaaggtgctctcctgtacagggcagcagcagcctctaaccctagcaccactaccacgccgactactactactgcagctgcaggtactactactgccggctcagcagcagccatgggccaggatggggatgccaacaccaccactcctacttcctacttatcaacaattatcaaggagagcaagaacaagctcttcatgcccataccagatcactctgtggcggagatgagagaagatcaggcggccatagatgatcatcagtgtgatcgtcatgacgatggcgacagcgtgcagtcagccaggaaaaagaggaggcgtttggatcatccattggcagcggcggcggcacttctgatctttgtgcagccaacggcaaaggccgctaccgatgtttcacaagaaggaagagctgatcatgagacaaaggtaccacaaatgacaaccccaacaagccctagctctatttcccctcttctggatcaacgacaggaattagatctagagttaaggcttgggactactccaaaagttacatatatggcgatacacaaagctagctagtatatacttctgcatgctaattattaaggagatcgatttattgttgagtttgtcatatcaatactctttctcttcatcgcttcactcccccgttgattttgtttctcatctttctcatttctccccccttttcctttcttgtgctatgagaccataccgattattacattttttttgtccaaagagctatacatacctttctccctctttcagttcaatctcaactgttgttcttgtttcaatacataagcagttacaaggatatattgctgttgttctttgctctcatgcaatttttctctattattgctgttgtttttcttgtgttcatacagacctgagatgaatttaagcatcctgattttgcttcgtaatgactgaactctcgtaatgactgaaacattttcctcactagcatgtttcttcattaattttcatttttatttttgcttggttcatcatgaaatttttgtgctaccaatctctctacataaatcatgtatatatatgtatggagcctgatggatgcatcttgccggtttatataaataagttccctatatattttacccaaactaagacttgatcagctagtagatcaatacccaaagagttttgtatatataacttcaccataattttgtgtgaatacgatcttgattagcaggttaggtttgcttgcttgagc

SEQ ID NO: 4641 - DNA, 2865 bp, Sorghum bicolor
tttttggagagcatactgatcatgcatatggtacatgcatgtccatgtactacattcgtttgtcgggtggaggaaatcaatggaatgttaattacttcattctcacctacacctactagtcctaattagagtagctaccacttaaaataaaccagagatagttcctcctcctccccccccccccttgatttgattgaagggttaattagttggctagttgccgtgctgcaaatagtatggtgacacagtaccttgtgtggttgtgctttgtcccggcccctgtgatatgataatgggcagagggtatgcagcagcaatgtgtagcagactagcatgtcctatatatgtttgtgttggatgatgtgcacccaagtattgtgtatcaagaaaaatattgcattattgtagggagaaacttgctaataagcacctagactagaaaagcattgtttagtgtacgtacttcaatgaattagtgatgtatgagatattgtccgtcctctagagcatttcatggaacttatcgttattattttccagtcttctctccgaggtagattctttcatagtggaaggcccatgaatgatgagagatcgatttttgtgacagccagagaattaggacatgttagacacagtcatcctgtctatagactgaggtatggctttctttgcctagtaatagtatctcctctactattgctgttcttgagttttgcatgttagatcttgcttcacttaatagaaaaattaggtggaaaagatatcttgatcaagctgcaaaaggaacacaacttttgctgccatgtcactgtatcatctttcatttttggtacacttgacaagaataggatattattgatatttgtttgctgacaatatattgttcttgcctagggaagaagttcgctctggaatagaaagcatcaccaacgatcaatcaactttggtggcattgtctactcaaacaaattctatcgataatgagtatgacagtgtaacacctcaggctgtaagtgatgataacaatcatatagaaaatgcaactcgtgactatgaaattctaacacaacaatcagtgcaaaatgaagattcacacattgaaaacaatgtagctaatagtaatgatgcccatcaaaccgactttgctcaagaacaaatagatcgatatgaagattattcagactcagggtcctcggaacaggacaatgatcattctagttatgcctttcatgctccttctaacaatgtcatgcaacgggaagctgaaacttatggaggacaacaaagtgattcaccatggtcaagggatatatctggcaccgaggatggacatgacaacacctttgtacatagagatgaagaatggctcattattgattctcaagaacctggaccaaattggcagttaggacgaagtttcccttcaagtagaaacgtcaataggcttcgtccttcggatgatgatgtttatggaattgaactcagagagctcttaagcaggtattttattgcaaaggtccatggaaggtaaatgttgtccttatgccaaatgctcatatagcccctttattttgcaggcgaagcgtgtcaaatcttcttagcagtggctttcgagaaagtctggaccagctcattcggtcttatgtccaaaggcaagaacatgattggaattttgagggtcaaagaccaaccaccactggtttactcaacgaagatcctattgaaatcaggatagatgaacaaaatcgagctgagagagacaatgcacctcagtcatcaactatgttggcagatcaaacacttttcccgcagcaacgccagtggcatactgaattgccccatcataattggagtcaacaaagcatgcatcattctgaatttgtgagtcacttctcccaccaactgggaagggaattttttgttcattagaggtcactagagtcctttagtgtacataaatttgaatatccaagcatttatcttgttaaaaatgctttgcaggactgggacactatccacattttgcgagatgagttgattagagtgcagagaggaatgactagcatgcaacagatgttagaagcatgcatggagatgcagatggagctacaacgctccatcaagcaagaagtgtctgctgctcttaaccgatctctaaccatgcaaggtgcacctactcttttcctctcattccagtgtcatgacatggtacatgattaattcactatggttgaagaatgattcctagaacttgaaccagatgaagaaatattagaggatggatcacaatggaagctagcaaggaaaggaatgtgttgcatttgctgtgacaaccagattgactcccttctttataggttagtcagctatttctcacgtatttttagttgtactgtttatttcaaaaatactttctaaacaataacctctacattgccttagatgtggacatatgtgcacctgctcaaaatgcgcaagtgaattgctccatggggttggaaaatgcccactttgtcgtgcacctataatcgaggtgatccgggcatactgcataatgtgacaggaggaacctagatagaaatgtagaggaggatgagtgggggttaatttgactaaatgaagaggttggctcatgagttctgagtttgactgtagcagcaacagttgtatcttagggaacatccgaacatgtatcatgttcatgtatcctctccatgctaatgcatttgtagagacttttaatctaataaccatgtaatgaaatagatccatgtgatcatttacactagccttcgttgtactttgcaccctggaatgcataaatgtcatagcatcatgcaaactaaaaagttgagttgacat

SEQ ID NO: 4642 - DNA, 6179 bp, Sorghum bicolor
catgtatactaagtgaacaccataagaaacatcatagaacatcacatgtatactacataaacataacataacaaaacatagaacactaaatttatactacataaatatcacatatatatagaaaataaaaataaaaaataaaattactaagaagaaaaatataaaaacaaacatgattaacaaatgataaaaagtgcatagagcaaataaaataaatgaataatttaaataaggatagaaaaaagattaaaaggaaataaaatataaaataagaatgaagaaacatagaaaacctgaaaagaaaaagagaaacaaatagaagcaaggaagaacaatacaaataaaaccaaaagaaaaagaaaataaaaggtaaaattaaaacaagaaaagaataaggaaaggacaaaaaataaaataaaatcaaaaaacgaaaactgaaaagaaatgaaaaaggaaaaatatagacagaaaaattgaaataacaatgaagaaacataaagtatgtggattttaagacccgtaacaacgtacgggcattaacctattaacttctaagtcatcaaaatcatcacacaatgcaagaagaaagtagcagagcaaaaaacacaatgaagttgtgaaactaaaactaatcccgcacatccgcagctcatccgcagctcatcgttatgcgagtgatcaaactcgcattcatcgttgtccagggccatccttgccgtctccggtacctcgacggttgcaccaatgaacaagggaacagagcaaatagttaggattagggattagggttagggttagggattagggttagggattaggattagggattacctctgcaggccggagcgccggaaacgacgggaaggaccatgagcacaccctagtacctcaacggagaccggagccccggagggtgcgccggccgatgatgagaacgacggacataagatggggaggagtcggggaggaatcgactttcaggatgaagaacaagggaacaaatgcagattgagggcgagaaccaccaaatctgatagagaagagggagatgagggcagagaggaggggaaagtgtcgagattgaggacggaacccaccggatgcgaccccttacccgccggagttctccatggatacggcaaagcaggggacaccgacgagcgagagagcgagagggtgacgagcgagctgcgagcgggctgcgggcaaggagcgacgagcaagctgcaaacgggtgaggcgcggcgcgagggagaagactgagaggagctagggtttgaagagggagaggtcgcggcggctggcttatatatggccagcctcgccgcgccctaaatccaacggctatcctcgctcctccctcatccaacggctaagccgtgccgcccgttaaagcgggccatgcccgggccggcactacgggccaacttcgcggctcaggcacgtgcacggctgggacgggctagggctaggctaggcccgggctttttcgtatcggactcgagtcagcccattttatgcagcccatttggaaatcttagccatgttgttggaatattgggctaatgtataaagataaacggttttttttatataaatctatagatttcaaatttatgagatacacgttactatatgtgttgatgtagtaatgaccggtggtgaaaaaggctagcttgcttgtcctcaacaaaatttgaaacggatggatggagtagcttctaaggaaatactctctgtgtctttgaaagcttcaactcctataatctgtgtcagtcaaacttttttaagtttgaccaactttatagaaaagagagtatcaatagttatgatataaaattagtatcttacaaaaatatattctatgataaatccaagacgatgatggttgcgccctctgcagccaggcatccgaaacggtctcacatctgttggcgggatgtgtggtcaccagggaggtttggttttgggtcctagtaccagttggcctacaccagcttatggataccctcggtgatgaagatgtcgctgcttggtggctgcaaaagaggctgttgcttgattcggaaaagaggcaaggttttgacgccttggtcctgcttgtctcttgggaagtttggaaagaacggaatgtgaggatcttccgaaatgaagtatccacggtggcgaccatcgcgaagcgcatccacgatgaaggaagcctttggattgaggccggcttcatccccttagctacggtctgggcgttctttgacaacgccggtgtcgcgcaaatgagcgccgtatagtacttttttgtttctctagattgttagttcagctaatttgatcgcttgccactcgcaaacgagtgaaggtagcggacctaacaccttttgtagtttcaaaactcctttcgtcttaatgaaacacgggggcagccctgttcgcgaaaaaaaagatattaatttggtactataaatcttagcttttttttagaaatttggtcaaaattttaaaagcttgacttaggacaactttagaaattaaagttttcatggacagaggaagtataatacagtgatctgatctcaagtgatgatggcatggctcctttatttgtggactaataacaatgcatatatactacatgatgcatgcatgtaggttatcaaggccgatagcatcgaggcagccgccggacgaattctcgatgaactgaaggagggcaataacaacagcagcagaggcatcactggaggcagggagcatgtcatctacttcgacggctgggacggactgggggcgtccgctgtcctccgagccgttgcacagcgcctcaccccaggagctttggaggcccagggtgaattgcggttcgatcagatcatccacatcgactgctccaagtgggagagcaggagatcgctgcagagggctatcgctgagcagctggacctccctgcccaggtgatggagttgttcgacaggcaagatgaggaggacgattttcatgggatccccaggggctctcgcactgagataccacaagtcctggaggccatgtatcaatgcatacagaagctcaaccacaggttcttggtgattcttcacaacgggagcagccaggagattgacctgtccacctttggcttccctctgttcggatactcgaccaacaaggtcctctggacattccaagggagattccggcttaaacccaggatgaaggtcgataaggccattcagaccactgcaaggaagacggaggttttcctctccgcctcacgcgatgagagagatccacaggagctctggtctttccttgttcatcaagaggttgatgaaatcattactgccggaggcatcatcactcagtcggttgccgctaagtgtgtctcgtatctactgaggctgtgctgcatgcgccatttcttcagcatagactatgatttggccacccacagctgcaactactggatctgtgaaggcatcatacagcaagggcagggcaccgatcaagaagacgaagaacaggcttggagagttgctgatgctatgcagcatgagatgagactggatgtgcagtatttgcccctctttgacatggtaataatgcgtggtgagaccaccaccatgccatcctcctccagcacttcaccaccctactggcatttgccagtaccagccgtagccattcctaacctagacatgctccaacattatcctgaaaaacaaataagcattctcaagctctctcgccgcaccattagcccttcatcaccacccttcctctactgccatggccttaagttcctatggctcgaccactgtgaagacctagaagaaatcaacacaattgagacaacagggaaggaggaggacatcagccaatgcttccagagtctgtgggtgctagacgtgcgatatacacgctgcaagaggatcttgtctgcacggatgctgggattcatgactcacctcagggagctaaatgtggtgggagcacaggattgggacatcggccagctgcagagccaactacctaacatccgaaagctccgagtaacaaagtcaacattaggctgctcggaaaataacttgttcttgggaatgaacaagatggagcttcttgacttttcagggaaccatacaaaattttctgggttgagcactagcagcaaccagcttgagactatgatcattactgatgggtgtgttgggatacaaaagttctctttcaagggatgttctaagctgaagaatctgttgttgcgtggactgtttgagggactttgcatcatagacttgtcggccacagcagtcaaaatacttgatctcagtgccatgacagctcggagcctgaatgagctcttcttgaatgactgccacaagctttgtgcaatcctgtggccatcaccagaagtcaagaacaaaagttacttcaagaagctgcacattgacaccacggggtcatcggcactcatgaaagagaactccacagacggtgtcactgcccccagtgtcatgacatcatcatcggcatcattatctgtggttcatggtgctagagcaccctcagaatttgattggtgtatcaagctaaaagatgcaaggctcctcaggtcacttgtgccgcccttcaaagaatatttcactaccaaatttgtacatgtggagatttactcttctgcccctgctttttctcctggcaacgacgacaaagatgttgaggtcacctttgaagaccatccacttctgcagccaagtgaaggtgacgctcccatgctcaccccatgcccaagtattccttctcatgatgccctgtccttctacgcccacatacaagaccagaagctaaggtgcactaaatcattgccggagggtgaacagactatgactagtattgttataccagatataatatgtcgcagtacttatatcctgcatgtgcatgatagcttgtccatcaccaatatcccaggccctgctcctacactaggttcaacatggcgctatctagagtggtgccgagttgagcggtgcccaaagttggaatatgtcttcaccactcctcagttgcaaggaagagatgatgtcttcgtcttttattttctacagacattctgggcatcagagctccctaaagcacgttacatatggaattggaccccgttccagtttaaggcaacatttaatggtttgaaattgctgcacattgacttgtgccccaggctgatacatgtactgcccttggttccaatggtgaaccaaagtctacgatatctcgagacgctcgagatcgtgtggtgtggtgatctgagggaggtcttccccttgtacaccacagatgccaaaagcaaacaagaacaacaacaatcagcaacaactaccatggagttcaagcatctgaagcgtatccatctgcatgagcttccaaagctgcagggcatctgtgggcaatggaggatatccgcgcccaagctcgagactgtgaaaatcacgggctgctggagcctcaagcgcctgccggccgtcagcaaaaagccaagcaagatggtagagtgtgattgtgagaaggaatggtgggacaggctgcactgggatgggttggaggccaatcaccacccttccctgtacaacccaacccactcacggtactacaagaagaccctgctcaagggctccgtgcttagatgactgaggtatgtttctacgcattcatgtcacaggtgatctctccctgtagccaacactttgatttctccttaatttgtgcctctataattccctccgtaaaattgaatgcttcttcccatattttctacagctcctttgcttcctacagtgcttgattggttcctcttttgtcaatgtaggtgggcagatggacgatgatactctgcttcgccctcacctgcttgtatttcatcccctgctttgggttgactggtttgtatttcttcatggcccctgtatgctgtatctgcaccagcctgcactgtggattggttcctctttggtttgtcaatcagtgccgtcatcatgctatcttattgttagagatataagatggtgtgatacagattgatgtatctctgctctgagtagtagagaaatgaataagggagaccgagaggccggctaactgctgctgctgcttgtgctcctgtcttgtgtgttccagcttgtggtgtgat

SEQ ID NO: 4643 - DNA, 6936 bp, Sorghum bicolor
gacatgagtacacggtgtgtgtttggcgctcaaagttagcacattacaccagtatatatatagaagctcaatagaggcggttcctaacccatttccatagtcgtttttcataaccactagtgctaggggccagtggaaataatattttctctgggggttaattgagaaagttcagttaagataatcgcatgtggaaacgatttccacaggcggttatgttatgtcaaccgcttatggaaaggcttgtcctgaaaatataaattgggttttaaaaataaattagcacactacactagtacatagaagctcaatagaggcggttcttaacccattttcgcatggccagtggaaatgaatctttgtgctggcggttaattgagaaccgcttgtggaaatcgatttccacagatggttcagttaagataatcgcctgtggaaatcgatttccacaggcggttgtgttatattaaccgtccgtggaaaggcttgtccagaaaaatataaattgggtttaaaaacaaattagcacattacactagtacatagaagctcaatagaggcggttcctaacccacctcctcagtcgcttttcagaaccgcaagtgttgagaaccgcatgtgaaaatcgattttcacagtgtcaaccgcctgtgaaaagacttgtccagaaaatataaatttggttttaaaaatatgtaaaaaaagattttaatcatggggaaggcccactagccaatcgtgtatttttttatgtaaaatcgcgtgcatttattttcatgtaaaacgggatatgatactattagatattgacattataaatagccaatttgagtatttagatacggatacaatcggatattgaatatccagacttagatacgaacaaatatattcggtatcgaatacggtcagaaaatatctatatcgttttcgcccgtagtgcctacctatatgacggtatatagcttgcaacatggttattatattagacatcccttgtgctttggaaggagagcatgtgtgacacatcgtaataagaactatatatctggattatattctgtttagtttttttttttgagtaggtcaatggacgacgactcgattttaaaataacatggaaaacttgggtgattcctacaccttcccactccgatgtgaccctgcagcgacagcttgccggccgggctttcttccatgcccgttgtttgtttgtttactagtgtatgtaatttcctgctatgtaatttgtgcttttaggcattgcattgcatggacgtcgttagttttgtggtggcactttccttttgccgcgggaaaagggaataatgtactcatcactagccttcacatacacatggtcaaagaattaaatcgcaagaattaattgaagtgacagcatcacctgtggcacaaatctatttgctaatataatgggcgcagttgatttaataggcacagagggggacaaagacaccttctgaccaagcttcttgcaaaagaaaaaaaatgccaaagcataatatggtcacgtcattctataatctgaatgcatgtccatgtaagactccttctgccgtgtagttttctagctaattttcccttgaaaggtaatgacagggtcataaaccgtgcaagtcgactgagagccaattaatccttgctaagaataatgtgaaaatagactcctttttctgaagaaaaaaatagacttagtcagtaatagtccagtcaatcttgaggttttgagagaccaattgttgatgaattaaattgaggataatgacgaggtctattttctccattatatactaatgaggataataggcctagttggtggttctttttccaaagacaaggtctccattgttgttctgtgcgtgtgtgatgtcatacgcgttgagaatttatcctgagaccgcacatagattgatgggctatcaactatcatcgcttggtataaatagatggtgatgcattcaactcggcagcaacaacaagatatgcaactttctctgcaacaacagcttgggatggccaagcttccagttctacgagtgaggccgaggttactgctgctgctatttcttacccactttatgctgcaactgcaatgctccaatggactccagagtgaaccaaaacaagtaagctatttcagttgttttttttttagtttctttttcatcttgctactgttggcaaaacaggatgtgtgtcttgattccagacaatttttttctgcaacaacactgtgagagaaaatttcgcaccagttgttttaaccattctattttattcacatgggctgattgcattactaatttcagacatacattatctaccttggtgaccgagagcatgacgatgttgaccttgtcactgcttcacaccatgacctgcttgcttccattctcggcaggtaagctcaagaccttttgaccttgtaagctattcatagcagaaaatggacatgggcatttagactgctctggacccactacttggacagtaaagcagaatttcttaagaacgagtgttgaaccagactcatcagcttgctggtcagctcgtcgtttagacctctccctccactgtgtatctaggttgtatgctggctcaaggcgatctagcccctactagtttgtgaccagaatcaacgtcaacacactatctaactgatttcacataaaacaccaaccatgactgaaagtcaatttctagtgcctgttggtgtttttagctgcatctaaaaatgcttcaaaaacaccaactacccgtagaaatatcaccagcttcgagttgtatttctacaggcgacggtctcgtatagaaattattttctgtataatcatttgtagagatggttttttattccagcattgctgcaaaatggtggcacctctaaaaattgtttgtgtaatagtgtatctcacgggcactaattaacaagccgtagatagcacaaacaactgaaaatgtgttgcagtacaaatttctgtatattactatattatctcaaaatctaacatatggaactgcctataattttgaagcaaggaggaggctctagagtcaattatctacagttacaggcatggattctctggcttttctgcactgctaacaaaatcacaatctagaaagattgcaggtaattatattttttctagaagaaacactccacaacatatatataagaattttcttatcatcatgttgaatgtgttctttcttgcagctctggctggcgtggttagtgtaacaaaaaaccaattctaccgcacacatacaactcgaagctgggacttcgtcggactggactacaatcagccaaatggattgcttacaaacgctaaaaatggagaggacatcattgtcggtgtcgttgacacaggttattacacatgcaatttgctggtacaacttgtgtcaagtcttctgtgactgaccagcagggagtaacattttaatttatctcttctctaagttataataatgcattttcaggtatttggcctgaatcgttaagctttgctgaagatggttatggtccccctcctccaaaatggaagggaatttgccaagctggtgcctcgtttggcgcaaacaactgcaatagaaagctcataggtgcacggtggtatgctggtgatgaccttgacaaaagcctactggatggtgagttcttgtctcccagggatgccaatggccatggaacccacactgcttcaacagctgctggcaaccttgtccacaacgttagctttaatgggttagcgcacggcgtggcgcgtggcggtgctcctcgtgctaggcttgctgtgtacaaggcctgctggggtgcatttccaactcatggctcatgcagtggcgccggtatcatgaaagccatagacgatgccattcacgatggtgttgatgtattatctctgtctattggggggccatcagaatatcctggcacattgcacgccgttgcaaatggcatcactgttgttttctcagctggaaatgatggtcctgtcatccagacggtgcagaatgtgtcaccatggctgctaacagttgcggcaacaaccgttgatcgcttatttcccacggttatcacccttggcaacaaccaaaggcttgtggtacgtcagtttctaatttcttacacatctagatagggacaaacatacacagttgtatgtagccttttgatggaaatattactacaaaatgtagggacaaactttagattattgattatattatatatatgcatatgtaaattatagtctttttccacatggaagtacgagttattattatttatgttattcgttttcaggtatttattcatttataagttcaacaacttactaaatacatttttctttacctactattattacagggtcaatctttgtttgtggcaacagaaggggcagatcatttctatgaagttctaggttatgatgctgaaacgtaaggctattttctgaacaacatctttgttgttaggcattttagttccatacttacataaaagttcagttttttccataacgtatatttttcactgcaactttgtcttcctctatgtactagtacttatgttactaaatacctacaggtgtgaccctgcctacataaacagcacagatgtaaagggaaagatcatcttctgcatcacacctagcaagatgtctccaccaccaaaattgtctgccattagttcattactgcttgaaaatggagggaaagggttcatattttcacaatataacaaggatacacttgatcagtggcaatacaccagcacgaagattcctttcattgctgttgatttggagatcgccaaccagttggtgcaatacctaacgtatgtagagattaattccaactctcaagaaaaatattgtaatttaatattagagagtatatatataccgcctaaaatcatgcggtgccattataccaatatataggatactgttattcaaatgttggtattaactttcaagtccttttcatgtaattcgtgtatgcatgcattcatgatatatttgtttccttgcttctaatcatttccttccctgtgctgaaataacaggacaacaagtgatactcctaaagcaaagatatctttgacccaaacaactattggaagtggaattcctgccccaaaggtagcagcgttttcatctagagggcctagccccatctatcctggggttcttaaggtaagcatgttggtcgatgttggaagccatttatacctggaattggaactttagtcgattaatgaaaccatgcataattagattaattatatatctttaatttcattcaattattacgcaataatttcgtcaacattgcacactgaactaatgtgccatacattccaatcaacagcctgatatagctgcacctggggtgaccattttggcagctgccccacaaatccctatttacaaagctctgggtgttcactactatttttcttctggaacatccatgtcttgccctcatgtgtctgggattgtcgccttgcttaaatcagtgcatcctgactggtcacctgctgccctgaaatcggcactcatgacaactggtatgtatttaagttaaccatatacagtgtacagatattactgttggaccaaacaatcgtgtttaaattggtaactaattattgccttaaacatccatgtcttgcagcacttagcactgacaacaatgggttcccaatacaagcagatggaactccagtaaaaattgccgaccctttcgattacggagcagggtttgtgaacccaagcaaggccgacgatccaggtcttatatatgacattgatccatcagattatctcaggttcttctcctgcgtgggaggactgggtgtcaacaacaactgcacgacacctaagtcagctgtagcagacctgaacctcccatcgatcgtgatccctaatctcaaggcatccgagactgtcatgcgcactgtcaccaatgttggccagcctgatgcactgtacaaagcattcttccagccgcctcctggcgtggagatgtccgtcgagccatcagttttggtgttcagcaaggagagaagggttcagagtttcaaggtggtgttcaaggcgatgcgcaagattcagggtgactacatgtttggcagcttaacatggcacgatggagggagccactgggttcggatcccgatcgcagcccgcatcataattgaggacttctattcgaccgtctcatgatgaatcctctactatacaaagaaatagtaatattatcctataacaatgaaaagctagctttcatgtagaagtctaggcctggttggggggaagagacaaaaaaaaatgatctccgtctcattttgtaattggaagttagtatgttctagtgatgtgtatgatacatgtgtgcgaaaaatatatgtgtgtggtgttttcattttcagagacaaccaattttaattttcagatcacggcagcagatccaaaggcctatggtgtgcgaaaaccaaaaccctagtttgctcttgctttcgatacgatatagggattgtacccctaccgtgtttgtcactgtcgacgaaagctggtcggcagtctaccttggggtatacccacggtagtagtttatcggtagacggtgcgcaaactacgaactcgatggtgacgcaagacacgggcgagctttttttccaggttcggccgccgagttggcgtaatacctacgtcctgcgtctggttgtattgatttgtgttgagagaataacttgtcctaggggggccccttgcccctccttatatagtccggagggcagggttacagatctggaaactaatcctagtcggttacaattgtcatagatagttcaatatcaatttgtattctaaccgactagaattctgcttgatctcc

SEQ ID NO: 4644 - DNA, 5896 bp, Sorghum bicolor
ctagattcaaaagattcatctcgcaaattacaagcaaaactatgcaattagttatttttaatctatatttaatgttctatatatgtgtccaaagatttgatatgataggaaattttaaaaaaattttgggactaaaccagacactttcgtttatatttgacaattattatccaattatggactaactaggttcaaaagatacgtctcgcaaattacaagcaaaactatgtaattagttatttttttaatctatatttaatgttccatgctcaaagattctatatgatagagaattttaaaattttttggaactaaatcaggcctgaataccactaaaaaattgtagctgaatgaggccttatttagttgtgagtttttttgattttgattactgtagcatttcgtttgtatttgataattattgttatggactaattcgtctcgcaaattactaacaacttgtgcaattagttattcttctatctatatttagtgctttatacatatatcgcaggattcgatgtgactgagaatcttgaaaattttttggtatctaaggtcttgtttagtccaccccaaaatctaaaaactttttcaaatttttcgtcacatcgaatctttgaacgcatgcatggagtattgaatatagacaaaaaataaaaactaattgcataatttatctataatttacaagatgaatcttgtaaacctagttagtattgaataataattgttaaataaaaaaatgctacagttaaagggactaaacaaggcctaaaaccagtcgtgaatggaaaaccaaaccagggaaggcgcagctgtttgccggcagacgggtgggcccgggcagagccccgccgccgaaacgcggagaacacagagcaggcgagcgacgggcaaagaagcagatcagcgcgaccgcgacccgcaccgcaccccggctgccgccacctcccgagtctcccgagctgctgctctgctcctcgttccactcccttcccttcccacccaggggagacggagaggagacccagagacggactgctctagccccgaaggaagcatcgcctcctcttccttccttcctaccccctcctcactccgcttgtccggtcgtcgcgtacgtaccgccctccatcccccaccacaacgacggccgctttctccccgccttccgacgtctctctctctctccctcgctctctctccgctcagcagctccagcgcccatcggcgagggaaggaaggaagagggagaaagaaaaaaggagcttcttttcttccgtcggcaggcggtaggcctggtgactatggatccgccgggctccgggctcccgacgccgccgaggtctcctgcctcgatccgtggccgccggcccacgtggagacgctgctggtgctagtaccgccgtgtttcttggcgggccttgctgcctcctcctcctcttgaggattgctgctgccgcagcctgctctgcaggagggatggccggacgctcaaggtaggctttgccccctccattcttctttgcttcgattcagcaaatatgtttggatttatatctatcaagttaccaaatgcttccagcttgggggtttatcggatttgggcttgttctaaatctcctcctaacctcctctgccccggatttatttaaccttctggagtatagtagtacgtgtataagatccatggcggtggactggtggattcgatttttggccgatggatagatttcgatgctattttgaggaaggattagtactcttcacaagtggtggcttagcctacccgccgcccaaaggcatcgattttgccttttgccagatcttgatttgtgccgcagcttgatgattagttgaaaaaaatctgtcatgttaactaactgtctacatctgatgaatgcagcaggagcgtcggcgtgcgcagcgtggaatccatggcggcgccagaaatgcgcatcgtctgagtgaatgaagcctggttggtggtagagccgatggtggtgggaacggcgctgctgcgcggcggggtctccatctccatctcctcggtgtggatcctcctgttcctctcctccctgctcctcctctcgccgtcggcggcgtccgtcgacttcagccactgcggcggctgcgacgacgccgacgacggcgccctctccagcgcctacaacatcctgcagtgccagaaggtcagcgacttcctcatcgccgcggcctacttctccatcccgctcgagctgctctacttcgccacctgctccgacctcttccccctcaaatggatcgtgctgcagttcggcgccttcatcgtgctctgcggcctcacgcacctcatcaccgtcttcacctacgagccgcactccttccacctcgtgctcgccctcaccgtcgccaagttcctcactgcactcgtctccttcgccacggccatcaccctgctcacgctcataccgcagctcctcagggtcaaggtcagggaaaacttcctgatgaacaaggcgcgcgagctggaccgggaggtggggatgatgaaaaggaaagaggaggccagctggcacgtgcgcatgctcacgcaggagatccgcaagtcgctcgacaggcacaccatcttgtacaccaccatggttgagctctcaaaggcgctggagctgcagaactgtgctgtctggatgcctaatgagaccaggagcgagatgatcttgacgcatcagctgagggaaagggatataatggacccacagaaccgctctattcctatcgatgatccggatgttctagaaataaaggcgaccaaggatgcaaaagttattgggccagattcggcgctaggggttgctagccgaagcaagcttgaagcagggcctgtggctgcaataaggatgccgatgttaagggtgtcgaacttcaaaggagggactccggaagtgatgcagacgagctatgccatcttggttctggttttgcctaatgatgcttcgttagggtggggtcggagagagctggagattgttgaagtagttgctgaccaagttgcagtcgctctgtcacatgctgcgctcctagaggagtctcagctgatgcgagagaagcttgccgagcagcatagggacttgctacgggcaaagcatgaagccatgagggcaggggaagctcggaattccttccagactgcaatgtacgatggaatgcgaaggccaatgcactcaatccttggtctcgtctcgatgatgcaacaggagagcatgaatccagagcaaaggcttgtgatggatgccattgccaagacaagcagtgttgcatccacgctgatgaacgatgtgatgcaaacatcaacaatgaattgtgagcacttgtctttggtaaggaggccggtcaaccttcattcctttatcaaagaagctgttggagtggtcagatgtctaactggttgcaagggtgtggagtttgagtttcaagtggataattctttgccagaaaggatcattggtgatgagaagagagtcttccatattgtcctgcacatggtaggcaccctaataaaccgatgtaatgccggctgtatctcgttatatgttagtggtcataatgaggttgaagagaggcataatcatgactggatgctgcgaagagcaaacttctctggaggctatgtatgtgtcaaatttgagattagggttagaaaatccaaggacaatcttttgagttcatcaagcagtgagataaggcatgggtccaaacccaacaattctgagatggggcttagcttcaatatgtgtaagaagattgtgcaggtaaatcaaaataacaaaacatctcaagcatttacatccaacaaaataggacacaaactatattgtcatctcgtttatgtcactcctggtgcttctcagattctatatattttgtgctggtaatgcttggttagatttcactttacaaggttaatattgttacagtaacatcaatttcttagatcgtggttgttctgttaccctacttgactcagtttgcatccgatttcttggaccttccagatatagtcagatgttagaaaaataattgtactcgataaaaaaaagggatgttagcaaaataatagcagttctttgatgttgagtggcacaagatttttcgagtctgttgactgttctccgtctcacataattttgtacagctaggcactagcagcttagacttggtcgtcaataaatagtttgctatacaccaatttgaactgtcaaaccagagtgtgtttagcggctatagtgggaccttttatggaagtgttggaatatttcttatttattatctcaccacaaactgggcaaactgagaggacatattggtccttttgttgaacttatgctttagtcataattattttatggtatttcttgtcgcagcatgcaccactttgcataaatatatttagttattatgctagtagtaacccaaacctcagtgactctatttgtcatgctctggttcgcaatttgtacattcacttgtggaaatggccaatgtatacttgatttgatgtacagtcattagtgtgcttgctgatgtgagccattatttgtgctgcagatgatgaatggtaatatttggtcagtatcagattctaaatgcattggagaaaccatcatgcttgtcctccagttccagttgcaacctgtgactccagtctctggagcgtcctcagatttgtaccgatcgtccgccattcccaactttaatgggctcagagtcctccttgcggacagtgatgacaccaaccgagctgtaactcacaggcttctggagaagcttggttgccgagtcctttcagtcgcttctggtgtccaatgcatgagctcctttgctgccgagtcatccttccagctggtgattcttgatcttgccatgcagacgatggacggattcgaagtagcccgcgcgatcaggaagttcagtagcaatagttggctgccgttgattgttgccctagcagcaagaatcgacgacaacatccgggatcgatgccagaggtcaggaataaatggcctgatccagaaaccagtcacactagctgcactgggagatgaactgtatagagtccttcagaacaattaaaagagcctgatgcatggttctcatttctttcaatctcaatagattgctgtagcttgatcggtagtcactctgctactagtttctgccaggttagatccatacaatcacaaaacatttggttggggcaaaaggaaaatgtataggaagctgaaagcatccgctttttgcttggttcctcggtgaaggacgacgacagaaaggtacaaaattttggagagatgatactgttagaacttagactcattcattgtaaaccctcagataagccaatatttagattcattcactaacactaattaactacgatataattagtttggacgaaatccatgagcagtttagtttgtgattgggactcttgagatggatggatgggttcagtgaatgcaggcatagtatagatgtctaaagagggcaaggaacttttgttattggttacacatgctgaaaagcaggctggatgagattgcagacaagaaggcagctgatacggctgatgctgaccttctatctttgaaaattaaatactagtagtacttgcaggattgatctggtggctagtgcttgtgctcctgctcaagatgcactgcatctgctgcatttcgtaatatttattacttgggctgcttctggtcagcaaactcttgcttgccatttttgattcctcagttttttttaatatgatattctttccttgttgaaacacattaccttataaaagaaggggggaaaaaaaactttaagcctgtttcagttgtaagaatctggtgtcttggca

SEQ ID NO: 4645 - DNA, 4287 bp, Sorghum bicolor
aatgaaatgatttacttttgtttccaaggcatgctcagcacctaagaaattacaaacagaaatgatttgtatctaaggaatgatattgtattgctaaacaggacctagagaaaattctaggcactaggcatatcatcggtgatgattgatgagtctactacagtctacaggtaacgttctggaactgtctactataatgattttcttttttcctttttgtttccaaggcttgttcagacccatggtggtgtacctgtgtatcaaataatctaccatgtgtcatatcaggctctgtggtggagagtatctagtggaaaggagtagggagagaggggttaggttgggcattctgtttaaatcgataatttggtttggttctctagtttaggaaaaaattggtttcagaaaagctagcaaccgatcggttcattgaaaaaaaaaagagaaactgacgattttactttcggttttgttggttcagtattcgagtttcagccgggagattccagaggacttatctcctacgccatcccccgctcgtcgctcaactcatccgtcatgctagcaccgccccgcttgctgtttgaatgtgcggctgactggtggcgctttgcttgcagctcgcccacacagttgccatgctgcttgcacgcacggcagcggtgcctagctcctcactcgccactcacaccagcgccggtgtcgcctcatcctgttgcgctgcttgcgcacgcgtgttagggctagggtttgaaatgagatgagtgccggccctaaggggagggcaggaggtgcgacggccgagggctctcgcgggatgggggcccaaacctaagtatataatacaacatatcctttagctgctatagtatttgtttattagtacatgtatatatatggtgcaatggcttatcaccaaaaaattgtgagccaaaaggagtcaagccaccaatgcccgtacacgagttgacacacatagcgatcacgagtcgcaatttctagacttttggtgagacggtgagaccacgaggagagacgcagcggcatcagcgacacattcaccagttcaccacgcgatcatgagctgcaatggataataccagaacctctgcgcccgagttctagccttcgaaaatccaaacgatagcggcgaccaactggcagagttcgacgaggactacgacatgtgatgttggttatttccttctacccttttattttttgtgatttgtgaatcttggttttgttcatgtcccaattgtctaggcactaggttttctttcttgtttaatttttgtctagtactttatactcatatagttatatttttcttataatttaggtcaggtgttagaattttagaatgttactaaaaaacatttgtcagggaccgtaagaaaatgaaaaagacaagaagagcattttgtctatatatgattggatttgttttccctttatgaaaaaattagcttatattattataaaattttatagtttagaggtcgtcgtgatgtattcgccagagggccctcaaaattatagaaccgacactggtgaatataggaggcaaggagaagaagcgatgggctacatgcggcttggtgagtcgttgggctaagttggcaaagagcgtggcaaatgcacgtggatggttggaccactagacggacgagtgctcctcgggttgaacattctttcagttcaatttaggggtgaaatcaaacaccaagctaaaaaccgaagctcctgaatgtcaaaaccgaagccgaacctaaatacagatatgtccgctcagaaatgtgctgacagtgaaagagaggaagggggcattggccattatgattggatgagaaaattgcgctggagccaatgtaccaaaacaatgcaatcttctggagtcatcctcgatcatataactccacgtgttgctgggcccttcgctgctgctgctcttgctcatgctcgccactataaagccaagaagacaccacaagcaaaccgcaaagccaacacgagagaaaccagtcacaagcaatgagctcgcgcgtcaccaagtcgctgccttttctcgtcgtcccgtcggaggccacgcccgccggcgtcctccccctcaccgccatggacagagctcttgcttccctgcccatggcagccctgcttgtcttcgagaaccccatcgatcagccagccgagagcatcaggagagctctgtcccgagcgcttgttctctactacccaatggccggccgcctcaccatcaccggcgaccagctgaaaatcgcgtgcaccggcgagggcgtggcgttcgttggggcgtccgcgagctgcacgctgcaggtagagatgaaaacggaacggaaatatttcaaactgaatcgctttcgttttctatatatgatatcgttttctatattataaaaccgttttcgaattttgtcaaacataaaaattttgtcagtttcagttggtttcacaaccacttttattcattttatatactctttaattgctaaaatatagaaatattccacaccgaccgcgttcgttttctacattgtaattccgttttcgaccgtttccgaccgttttcagcagggcagactcttcggcccgcatccggtggtcaccgtcgaggacctcactatgaactacaccgcccagtacagtacggacccgccgttgctgctggtgcaggtgaccgagttctcctgtggtggcttcgtcgtcggggtgacgtggaaccacgtcgtcaccgacggcgccgggatggcgcagttcttgcaggccgtcggcgagtatgcccgcggcttccgttccccttccatcttgccggtgagggtggaccacgccctccctgagcttcccccgccgataaccaccatgaccaaggcactcgtctgcagccagcacagcgacttcccgtcctcctacatcactgttccccttagcttcatcgaccgcgtcaaggacgagttccgtcgtcgtcgtcacagcagcagcggcggcggacagatggcgccggcgtcttgcaccgcgttcgacgtcttcaccgccaccctatggaagtgtcgtacgcgcgcgacgatcgccagcgccgccagccaggacgcgcccacggcgctcgccttcacagtgaacgtgaggaagccggcgaaggccaaggatggctactacggcaacgtcttcgccttcggccttgctgcctcgacgctgcgtgaggtcgccgacggcgacatcctggacctcgtgaggctggtaaaggacgccaaggcaagggtcccatacatgtttgctgatggagcggcgtacatcgccgacgagatgagcggccggctaaatggcctcgacggttatgacaccctgtacgtgaccagctggtggaatctcggcttggacgacgtcgacttcggcagcggcggcgctgaacgtgtcatcgggaacatggagcgcaaggtggtgccaggctgcatcctgtgtgggaggaaggacaaggccgagggtgtcgccgccatggcgctctgtgtcaagcaggagcacgcggagaccttccatgcggagctgcaaagcctcaagtgatgtggataatatgaatattgtctttttagtttgttagtgcacacaaaaacgtagactctttgcccatggaatcgcgcatagaaatcagtttattttcctttcgtatagcaaacacaacaatcaaaactggagtactttttttttatgtatgagtgagccgttcaaataaaacatcaataatcagaacttaagttttgattgttgtttcttaaattctagttggagtttcttatgttttgattgaaattgaacttttttattgaattgagaaatatatctatctttttcatgtctagaaccaataattattcaaattgtctagtcttgagattgctttgcggatcaggatgtggggagtaagcagcaagcaagctgatcttgaactcaataacacatatgcaacgattgtagtcgagtgtctgacattgaatggactacgaagcaaaagattgtgatgatgccaatcaatgtgcctccataaagattaaatttgttggcaaatatcttttgctatcactatgtcaaaaaaacacttcttatacacgcacttaggcacattgcagacgcgctagcatgcgtcgggaataattaatgcgtatgtaataaggtttattatagacacacaaaacaagcgtctatactaagaatacatctacagacgcgcgtaccaatatgcaactgtgattaaatctgtgtgaacgacaacattta

SEQ ID NO: 4646 - DNA, 2854 bp, Sorghum bicolor
acaacgttccattcatcagaatcagcggtgagcttactatgatttcatctgtctctagaaccatgcaacaagatctactgcatcaggtcatgcacattggtaaacaggtgaccacgatttgccaacattttggcatggctgtctgaagattaaagtaaagtatctgttggatctgctgcttctgcacgcatagctcctttcaaggcatctgttgttggcctattccatgtcacacaatccctgcactggaggcaatcatgcatgttgccgtcaaattgatgaaaccctgctgcaagttgcaggcagtgttaatattgtagacatatatgctttttgaatactgcaagctgctgcatggtcagaggctatgtacgcagcagaaagctatatagagtgcagctccttcacatcatctttggtgctgatagttattaggtcctatttaactaactggtttttattattattattattattattactgtgtagattgttcaacagacctcgaacaaaaaccaatccatatactagatcgccatccatatatatcagccccatttgtcaaagcttttcctgtgtgcacacaaccaagaaaaaaactaataacacatggtaatcaaagaacaattatcattgtcaatccatatactagatcgctctccatcatgcaattttaaaaatgttttctttatcaaagaacaaagttagaatatatttaatgtaatttaaaaattttaatgttactgcttacaatctttcagcactaatagtattaaactgcaaaatctaaacatggtaaccgattctatgctatgtttgaaatcctggtcacatattagtagccattgatctttctttgggagaaaatgtctagagatatacttatctatgtatcagatcatatgagtaactgattgttggacgtcgaaagtgcgcattgtagacatcgatagtgcgtgttgtagacatcgaagtgcgtgttcggtatgtgtgccaatcagtcattttctggatattggcgacataattatgccaatcgctttattcgcatgcctatgggtgaaaatatttgaggggcgctttataattcttagctattagtcaaaaaaagcgcgcatgcacaaaacccacttacttgcaggaagatattcttactttcacgcaatgccaagctatccttctcctatatatatatatatatatatgataactctccttatcagtaactatgcatgtaatccaaagctggcatggtacttgcaatatgtaagggcttacaacttcttcccttatctgatatcatatgcaattgacatgattttcttcattgtctaaggtcttagctcgctgtataacatgtctcggatagtttttttgccttcctttcccattgtatttttagctatataacacttatccatattcttatgattatattttcatcggatgtattcacttcataattataactagtactagtaataatgaattggtgtgtttgttggaaacaaaagaaagttcattggtggagtaataaaaaaatggcaaaacagtatgcatcaattatttacacatcagctgtgttctgagtatgttaactaggtattagaagtgtatatgagttgataatttattgcaaaggacataactatattcaataatcgattggaaataattcaccaaagtattcaaagtgacatgttaaatctgtattgtttactcttttgtttactgctagataattaaacaacccagttggacttgtaatttttgtatacgagtacatacacttcaatttagcactaggttgttaaatgtttctatagcaattgttactatcaactgctgtctagttttgttcaccagctcctattctttgtagcagttttatttgaatgttgggttgaaattatatctcatagcacttctttatttcacttcaactacatgtttagattattcttatgaactatatgtatatgtgtattcagtgggggaaaatggtgaaggcatataccgttcttatggccctttgcatggtaattctgttttcttgcaatgccgtggagggtggagcatacatgaggcatgaagcactttctcgcaaaggtctaaaagaacaaagaaagctagccactattagtggactgaatccttcagttagcaatttgtcaggtcaggcatctagcaacgttaatggtgtgaacaacaataactctgaaagcacaaatactaatatgccggacgccggtacagcttataccccgatgacttccactaccacagattcccaccatgacctctcagttgatcagtaccgcaggattactcacaacaatgagaataagccgtgatgaaggattcatatgtcagggcactcagtatcaaccatgcataagaatctatggatggaaccatctatctagtttgcaactttaatcgtaattaagttgtacttgtgtgtatttctagaacaaacttgtattataagatgcctactttgtgtaacaacggtatatattttccatgtactatgaatccatctcaagcagtggattctcaaggttttcctatgctcatgaataatgtaccatatatattggactagtacaaataaagcatgtttatagtccacagtaatggtaaaattccgagttagggttacagcaaggatttctgtatatccagcatattggccagttgaagagggaattgttgaggttagatttacgaatctttctatattcttctttcatactacaccatattccacttggtccataagttaccgtctcttcttgatttagttccatggccacgtcgctgtcaatagataactatatatatgttatct

SEQ ID NO: 4647 - DNA, 3510 bp, Sorghum bicolor
ttaacctaaattttatctaaaacaacataggttcgagtattactgtaccgtacccagccgacttgggtggggatcgggcctgcgcttcatctcatctgccccgccgctagtgcttgggatttgggaagggagagagaggcatcgccacccccgcacggttgacggtgccacagcacgtacgcgtgcacgtgggtgaagcatgggacaaccgaaaacgaaggatcatgcctggcagcagctcgtgacccgtgtgacgtgcccatccaccccgcgtcccgactgccacgtgcgcatccatccatccgcggaagggagcgtgacggcccaagtccttggcggccgcgggagggaccgtaccacgccacccagaggctcgggctccagtccacgcgcccgatgtcagttgtggttcatcgtcccaagatgggtccgtgacaaactgtagcaaagtgccaggtcgacataaacccgtcatctccaaaaacattcagttgctcaccactaaggtcttgtttgtgttacaactaaacggagttaatctcatcaaagatagaactgctcccgctctctgacgggaaccgttcccgctcctgctacgctcccacgttcagaacgaaccgtcggtgccatggcggttgcctgcgagcacttccccatggcgtccgtacggatgtataaatatacatcacaagatcaatgaaaactactgttcatttcgtccatttacattctcatttacattccaacacaaaacagtttgtttagttcacaaaagtttttggtttcttctatttgtatgtgacaaatattttccaattatagattaactaagctcaaaagattcgtctcgtaaactacagataaactgtgcaattagtttttattttcgtctatatttaatgctccatacatgtgtacaaagattcgatatgatgtgaaatcttaaaaaatttttggaactaaacaaggccttagtttccaaaaaaaattaagattctcgtcatataaaatctacggtatctgcatggagcattaaatatagataaaataataactaattacacagtttacttgtaatttacgataatagttttttaaacctaattagtttataattagataatatttattaaatacaaacgaaagtgctatagtagcttcagaaatttttcgtgaactaaacgaggcctaactttcagaaatttagaactgttcaagttgctcacttgtagtagtaacttcagaaatctagtgctcctcacccaagcataccgtacccagcgcgcacactctgcaaactgcaagtgccaaaagaaaccttcaggaatttaattttaaaagctttagtgagcaattcagtagtatatggtaattgtacgtgaatctcggagctgcagcaaaatcgctcacggctcaatcttgctagtttttgatgttatatattgaagaaacagtaccagtacatactcccagtacaccagtacgagaggctcaagtagaggcctcgtaaacagtggccggccggtgccgtctctgtctggcgaccccaaccccatgaccatgacagtagtcccattatttttggccggttggcagcttcctcgcactcgtctcgtcggccggccaacaagttccggtcacgggcattcgcagctctctactgtactgtacccaagcttgacctgactgccacaccataacagcggccggcctggcgtcaccctcatcgctgcttcacccccacctgtccacgcgccaacccccacgtggcccccctgcctccatggcgtgtggaccccacatccaccggagccaccgccgtttccttcctcctatcatccatccctccttccagcgtctttaaaaaatttgaaaaaacttgctcgcggccccgcgcccccacgtgtcggggcggtactggattctcgccggtgcccaagatgcctatatttatcaatcatcagagggctagtcttccgtcctctccagcttcttctccacttctcagctcttcatcaatcacaaaagagtcctcctttgtactactgtagtacaacacacatcagatcagcagagcctcttcttcatcttgtgttgttgtttcgttttcccttagcgacgccatgggcatcgtcgacgtcgtctccgagtactgctccttgcccaggtctcgccgccatctcaagaagaggaagcagttccaggtacatacatacatacatacatacttctgatgaatcttgatctgtttctcttcaaaatcccaacaaactgacctgacctgaccttgaaaacctgatacacgcatgcagacggtggagatgaaggtacggatcgactgcgaaggctgcgagaggaaggtgaagaaagcactggaggacatgaaaggggtgagctcagtggaggtgacggcgaagcagaacaaggtgacggtgacggggtacgtggacgccggcaaggtgatgcggcgggtggcgtacaagacggggaagcgggtggagccgtggccgtacgtgccgtacgagatggtggcgcacccttacgcgccgggcgcctacgacaagaaggcacccgccgggtacgtccgcgacgtcgtcgctgaccctaccgccgcgccgctcgccagggcgtcgtccaccgaggtcaggtacaccgccgcgttcagcgacgagaaccccaacgcctgcgccgtcatgtagatggtggtgaactggtgatgatgtcggtgccggtgttggggggacctggacgacctggaccctcgagaggacggtggtgacagcttttggttctagatgcttttattgtttgatgttggagcttttgctcattttatgtttttttgtttcattttttttgtctcgtttctgggtttgaggtagtagagtagaagagatgtagtagtatgtgttttgattttgtgaaagaaaagaacggatttgtaatggtagtagtaatttgtagtagtgttgtggaaactgaaccggcaaaatcggtcgtcgttcttgctattgccgtctgttcatttgagctgatgaatctgcagcaatcaatcgttcttgctattgctgtctgttcatttgagctgatcgcagtgaatcagagtgatttcagcgtgattggttggttcccaaagggacgtgcaaatatcctagcagcagcgtactagtagtggtggtttcggtatggatttgagcactgatgaggacgcgccacggtgcattatttcggtggttgcaaacgccaaacggtaggtagcctttggtctttgggcggccacttttatttgggttggtgagcagtcaggtattattagttgcaaaattgttttcctggttgccattcatggccagcaaggtgatttgctcatactattcttcctccgtcctctccgatctgcgattcctttaatttcccctgttttttgtgctctcgagttgcagcttaaagcaagaagaattgcaggcgctaaggtcttgagaaagtttcagcaatttctgtttataacta

SEQ ID NO: 4648 - DNA, 9709 bp, Sorghum bicolor
ttggacagatggacgtgatatacttggggactgtaccgaccaccgagcatgaaatactcgaggactggtcgaccagtctgcccattcgccatcctagggactgtaccgaccaccgagcaagatatacttggggactggttgaccagtctgcccattctccatcctggggactgtaccgaccaccgagcaagatatactcggggactggttgaccagtctacccattcgccatcctagggactgtaccggccactgagcaagatatactcggggactggttgaccagtctgcccattcgtcatcctgggcactgtaccgaccaccgagcacgaaatgctcgaggactggtcgaccagtctgccttttcgacaaactgtgattgtaccgactatcgagcatgtcgacattctcaactgtgctcaaaaactggtcgatcacccgaccacagtttggggactgtttttattttcaattacatatgaatgggactcatataccactgagaggcaattttattatttttttaaaaaccttgttacaaggttcatacttcgccttccagcaagctcggggactatatcggtataatgcatctagcgatgcatgttcgtatcagaaattttaagatgatttttctttttaaaccctggcaccacatgtatgctggaaaatggacatttttagggttttgagctcaaaaccctaaaaaaatgaggagcagccacggggaagaagggtgggtgcggctgtatttatagctcgtacttaaccgaggcgggcaatgtaaaaaaaccgccacgattaatgagctattaaccgcggcgggcgatataagggaccgccacggttgttgtgttacattgcccgccacggttaatatcccattaaccgtggcggttgtcttctggcttggctggcttgagctggcagtgaataaccgtggcgggcgaaaccaacgcccacctcagagcgcttatagaaacgttgtgcaaaataaaatttgtagtagtagaggatttcagtgttgaccagccgttgcacaggaagtgactagacattagggtatgtgtctagtcaagtgtatgctgcctggcatgaccggactttgcacttttcttgtgcaccaaatgtgtaagtactcataccatatcattagggttctacttaacgattgactggatgctagctgaggactcactagatgcaaggtgatgcgtctgatcgctacttagagaggtacaaatgttgggtatgggcgacgagacgcgtgtgttggccatggacatgaccacctctgggtcacattgaatctttgtgacacatgcatggaacattaaatatagataaaaaaataactaattacacaattggtttataatttatgagacaaatcttttgaatccagttagtcaacggttgaacaataattgtcaaatacaaataaaagtgctacactataaaaaaactttttagcaagagaactaaacaaagacatagataagatgatttccaagagttgtcctcaccgttaagtactctctctatccacaaataaatacacacattgttttagtcaaatctttttaagtttaaccaaatatatacaaaaatatactaatatctatcatatataatatgtatcattagattgaacatgaaatatactttcgtaatatacttatttgtagatatattattattatttaatatatatctagttaaatttaaaaagtttgactttccgggaaacgagacgtgtatttgtttatacacggaaataatatatgttaatatccacatcaccttatttgggatcgacacgtggggctcgatgattgggcccagcccgcaacaccgcacccgaggtcagatcgcatcggccgaacgcacttgatccccaccccgactcgacttgtaccgttcaaaaaaattcaaatccccctcccccctgccaacgtctccgtctccccgtcgcggcctccgcagccagccattgagccatgcggtccctcttctcgcggcacgcgcgccaccccggtacgccgccgcccccgtctttctccggcggcgttgagacccctcctcgtcgccgctcgaaggagaacgtcgacccctcctccccggcgcgcaactaccaccactcagccctcgaccacggcgcctccccgtttcgctccccgtcctccgcggccaaaccgctctcctcccgcaaccgcctgccaccgcgtccgccatcctctaacccactaaagaggaagctcgaagtctcctctgcggcgggccctgcgcacgacgccgcgcccagcgccgactccggcgtccaggtacgggctagggcttcgtgggcgatttaaggtattccgtgttgggactatggatctggcctgacggctgttggctctgccggttttgcacttctggtcacaggtggtggtgaggatacggccgtcgtgctgggtcgatgaggaggaggcaggcgaggatgggcgggggccggaggcctgcgtgcgcaagacggcggccaactcagtcgcgatccaggggcaggacttcacgttcgatgctgttgctgactcggtctccacgcaggtgagctgggtgaaatttttgggtggttttgggggtagtttccctaagcttggggattctatgtacacggtctggattagctgaatttggagttatttcagtgagcaacgtatatatggtgcttgtatactgttattttataagtgctgaggcgatttatgcgtctgtggatttgtatataacctacaattttatgtgtgatttggcagaggccagggtaggtcttgttttactgcaagtagctaatgttagttttgatctgaatagtagtgttctgtgctcttaatggattttggttgggaggatcataagtgctggttgtttcttttggctagtttcattggttagctattctaacctatgtttaattgtgcaatctctgtttggttttgtgatgggtttggtcttttgtgttttacttttatgtacttaaattaaaggaggatatcttcacccttgttgggctgccacttgttgaaaattgcttatcgggtttcaacagctccatatttgcctacggacaggtgatttaccttcagtttaatatctaagccgtgtattggctggtacctggaaagaaactgacttgtccctcattcttattttgtcacttcaaaagactggcagtgggaaaacgtacactatgtgggggcctctatctgcactgtcagaagattcagtgagcagcgagaggggcttgacacctcgtgtatttgagcagttgttctcccgcattaatgaagtaacgtgatttttttttcttctaaaacttctttcttttaagtattttctgaactaaatctgaaacatgccccatttacaggaacaagttaaacatgcagataaagagctaacgtataattgtgtctgctcgtttctcgaggcaatttcttttcttagtatctagcaaatattgtattcattcttctttgacgcatgaaatgtgatccaatcttattataatatgcagatctacaatgaacagatcactgatttgctagatccctcgcagaagaatcttcaggtgaaaaagcttgtgaaaaggccttcagtggcataggtggaaatcattttctcagtttgctaatatatgttattcctttgcagattagagaggatgtcagaactgcctgtgtttatgttgaatcattgacaaaggagttggttttcaccatgaaggatgtaactcagttgttggttaaggtgtgtctccaaatattgacatctaatgtatcccatctccatctatttgttgtgatgacattgaacctaatttctgacaattgcatttggcatatgccactctcaggtacaaattttattatgcatatgatgattttgtcactagactacgttgaaagggtgaaaaattgcctgagttctgtctatcagtgaacatagttgtaccatcatggaagatttttatggcaccctcttgatgtacacaaactacaaaacacttggttctgcataatttcatcgcaacatggcctgctgcttcactagagattgatatatttctgtatgctctacaaatacatcctatttttcttaactttgtgttgaatagatttattgcaattaatgcagggcctggcaaaccggaggacaggggcaacaagtgcaaatgctgacagctcacgctcgcattgtgtttttacgtgtgtcattaagtcagattctaaggtattcattgaaattgggcccaataatactatatatacatattatattaatcatttatgagttgtcaattagcaaaatggaattgtaatgagtgcattttcttgaccttctgataatggttctctgtcattgcctttctatgagctgattgttcttttgagtttgggtcattgctttacataagcatgagttatagttctagtttgttccattctaacaaaagcagatgccaaactgagatgcttgtgtggactgaattgttttttaatgtttgatgattgcatataccaaccagaagaacacaaggaatagttaatctgctgaatatctggttttttggttgattgtgcatatgtaccttgccaataacctgatatctttaggctttagctatatacattctgttctctcatatatggagtgctttaatgttctttcatatgtttctgaaatgtatgctaacagaattgatgtactgaatccttgcaatctctgtggcttcaatgcaaaggagaattataatgacttcatgatacacaaccttttattattcattcttggtccattctgtttgtactgtgcaatatgcagcttaaaagacttgtatctgttcatgttctgacagaaataacatttaaagaaagccttgcttgctagttgctttgcttatataatgcattaaaaatgttcttgttgctccaatcactaaatgctgtctaagatattgttggtttcagtatagatgcattatatagtagtttacctattttgctcttgttctatagaatccagaggatggctcaagcatcacaagatcaagcaggataaacttggtagaccttgctggatcagagcggcaaaaactaacacatgcagctggggatcgattgaaagaagctggaaacataaaccgttcactttcacagcttgggtaaagttccgtttgtactttcaatgaaaagtaaaaaagttcaaggatttaagcaaggtttttgctaattctccagacaccgactgatatctaaactcagttgaagtctactttactaatgatggatgtggtactgcttgatgtcctggaatgggagatgcataacacttgagttattaaatgatttcataagctgtcaaacttgagttggtatcatgcctatcaacagttccagatatcatggttaccacatttgatagagcaatggtctcttgattcaatatatgcatgatgtgcatcatggttagaaattcttataaaatatgtttactgctaattgtgatttctacaattctgtagtcaaccttctcgaactttgacaagttaatagaaaaatataattaacatctacgatgccaaatgaatgcatcatcaaaataaatttgttgtcgtagtcttgtagtcatcgctgcctctttctatagagttggtaaaagttagagaagtttgacttagaacaaattaaaatgacctacattttggaacagaggtagtgcttttctctatgtatattgcatactattttagctcttggcacatgaattaagatgtacagtaccagttgaccaatttaatattaaataacacatctgaagtgttggggcaataaaaggcatcatatgatgttgcaatcaagtgaaggctatttgtaagaattaagacaaacatatttatagtgtgtccaatagacatatctatgtatgagagccacgataataaagtgggtggtttaggaagaaaagttgatttgtagactgacagctcaatgattgtttttttcctgttagacatccattgaatatggttgtggaatgagcgttctttaactatatgttgttgttcactgcagaaacttgattaatatacttgcagaaatatcgcagtctggaaaacaaaggcaccatgttccatatcgtgattccaagctcacttttctattacaagaatcccttggaggcaatggcaaactggcaatgatttgtgctgtttcaccatcccaaaggtaccatctaagctgaccagcaattcattaattctgtgtccagttaatattggtttctagattcctcattgcactttcttgtcatacagctgtaagagtgaaacgttaagcacacttaggtttgcccaacgtgcaaaagctataaaaaacaatgccctagttaatgaagagaaagttgaagatgtaaatgcgctgcgtgagcaaatcaggcaattgaaggtatgattgtgttccctctgacaaccaagtttctttataatattgctgttttggttcatgcctcatcagccctgtttcaaaggcgttacctaggtgtctaggcataccaagtatgtcttgggagacagtgatgccttgtcacctaggcgtctcggtggacccatcattcgcctgaacacctagtcgcctttgaaaccatgctcattagtaaggtgttattttccatatcctacaatgcaggatgaacttcaccgaatgaaatctaagggatgcatagaagggaacaatggcagctttgccactggatggaaccctaggcgcagtttgcatctgttgaaaatgagcttgggtcatcctgcaacattccaatgtataaaagaagatagtgatgaggaaatggaaattgatgagaatgatattgagaagccctacaatcatgaaaatattgcaatgtctcctattaacgttaaagaagacaccaaacgtttagcttctatggatgtaagtgctggaacttcacatgttgaagatcttgacagggataagaatttgatatccataaaaaggtcctgctgtagtgctaacaaatttaacactggtactgatattggagatggaaaatgcaaattaaacattgccgccagtatacagaggggacttcaagtcattgaaagtcaccaaaacaatagtgcatggaggagagcatcggttggattaaatgctagaatcatggatattcagccttgcaaggttgatgttgcaattcagactgatcctgaagaatatgaatccagagataaccctctagctctgattcctagttgtctgcttgaagcttctgcaaatgagagtaggaatcccagtgcttgcagagacctacaactagtaccggctgatgtgacagtaccatctgatgaccaaaagcagtggcatttgctgaaagtaagttataaccaaaagaggctcggtgcatatcttgatttgtagatcagttaagttgggtgtaaagcactcatgcatatcttatatttctatataggctgtggagaaggtcttggctggagctatcaggcgagagatggcacgtgatgaacagtgtgcaaagcaagctgcagaaattcaacaactgaatcgtctggtgggtgtttttctctctatacataagacaagaggctatatgttcctctgtttaaatcattccgttttttttttcaggtgcaacagtataagcatgaacgcgaatgtaatgctgtaattgcacaaacacttgaaggaaaaattgctaggcttgagagtctcatggatggaactttaccaactgaagaattcatgaatgaagagtttttatcacttatgaacgagcataaggttgcatgaaattttcccttgccatgtacttaacttactgtattttctttttgaagactgcattcacttatcagctattctgttaccctaaaaacgcagatcctccaaaagaaatatgacaaccatcctgatgttttgcatgctgaaattgagttgaagagactccaggaggaattggacatgttcaggaactctagggacgagaaagaagttctacaggaggagatacaagatctgaaaaatcagttgcattacatgctttcatcatcgtcatcaatctgtagactctggcctccagtgccattgtgtcagggaagtaattctgaacctggaacaaaagacaaagatggagatactaattttggggacactcctaattggactgaagctgagagtaaatggattacactcacagaagagcttagagttgaacttgaagcagcaaaatcccttgttggaaagttgcagtcagaactggattctgagaagaaatgctcagaagaactaaaggaggcagtacaaacagctatccaaggagctgcaagacacctggaacaatatgctgatcttcaagagaatcattttcgtttgcttgctctgcataggaggatgcgtgagggtgttgaggatgtgaatatgagggcagaaaaggctggtatcaaaggtgctgaattgcggttcatcaactcccttgcagctgaaatttcagtcctaaaagctcaaaatgaaggccttcagggccagctaagggatactgctgaagctgttcaggcagctggtgaattgcttgttcggttgaaggatgcagaggaagcagaaacactagccaaggtatggctttccaacattgcttagaccttacatttagacagacaaaagtagcttatgtggtcagttgataatacaacagagtttattattttgggtgattacaaaactttacgggggaaatatttatgttgaatgctcttatagtggttccttgtattttgttaaatttagtagtatgacatagattttccagttacaacaggcttttgtactcctttgttgcagaagcaggctttagtggctgagcaagagacagagaaagcctatcaggagattgacaacttgaaaaagaactatgatcaggaaatccttgctctaaagcagcgtctcacagaatcctctcagtgcaaggacgatacattacggccacatgaaccgaacgatcttgagcctcggtatgacacagctggtaaccccagcgggcaggagttcaataccctgcaacaaggtggatcattggaggtctccaagagcacagacctcaactcgtggttttatggatacgacaaatgtaacatttgatgctgaagtgtttaatttgttcagtcctagtttgtaccattgaaatggtgataatataatgttgtacaccgggtaagtagagggaaaggatactcctgaggaacgctggtgggtcctcatcgtctgatgaggtgtatgcagattcttcagatccttggtgaagctgtgttttgtcttgtaaatctagatgaacaattttttacaatgaagtggcgacaccaatattttgttgctgtatgattatgttggttgtagctgtaatgccaaaagtatcaggtatcgttggtcatggactcatggttcaaattctcgccaggaagtcatgcacgatgcagctagtgcattgcaagtactggttggtaactcttaacgcccttgtagctgtttcgtggtgcagtgttggaactgttttcttgtaccatgtgatgaaatagtttgtcgaatcttcctgccagccgtaatatgttgtaagggcctctttggtacagattcgagtggct

SEQ ID NO: 4649 - DNA, 3175 bp, Sorghum bicolor
atctcaatgttatacaccgtccactcgatccgagctgatatttacaatcaagcactgagaaacctaaaaggacattctaaaaagagacatttttctctatggtctgtgcaatgttgttggaccaactaagagaaacagttcctgaagtgtgcctttgcaggttctagtgcagaactagaataaatcgtcaacactaatctttacaaaactccgtatccaaggatctagccaagtacaaagagttttgtaaatacggataccctatagagtgatgcattcaaagaatgaaaaacacttttcttgagtaagctgtaaatactgataccccgtaaagtggtgcattcaaagaataaaaatagttggagacttgttaagcttatagtaccttgttttgaacaagaacattgttcttattggctttgcccataatccatgctgaagtattttttattccttcatctgcattgctaagttctcaaatcaacaaaagaaggtctcgaagtttatcaaggtctaaaaacaaattgataaatcatgttaccataagaatcttatatagaaaaataagtgcaattcttggtttgcaaaagctaataaacatgattggaagtaagttgttgatctttatgaagcaaggaaaaggagatttgaaaaaatagttttaacttttagaacaaatatgagcacattagttgcttaactcatggaaggaaaataaaatgaggttgactcgaacctgttgctacctcttgtatacttgtgcctgtagccaccatccatgcgtatagtctcccttgtagtgccgaaattgaatacagtacatcggcatcattaacatgctaaaatcggatgaagagcaccctaactaaaatgggcataacagcaatctgtatccaaacgacatgattgtacaggcctgcagctcgttccaggaccaatttgcaggcttaacacaatgaaaaaataaaaaaatgaaattcatagaagatctcattttctacttggtacggctgcagcagcatgaacacgttcgctagtatcccagcggcggcgaccatcgtgccctctccgcgtcttctcgtgcaggtcatccaccatggcgaagatgacgaggttgaagcaggagaggcagccgactggcccgaagtggaggtcgctgtggtggccaggttgaaggctcggccaaggcgccgagctcgaacacggcctggctacgcgctggatcggcctcgcaaggcagggcggctggcgcctagcgaccagcgacctggaggcgttgtgagaggagtcgtgcgatctggagccgcaagaaccccacccggcttcgtgctcggctttgtcttgcccacgatcgaggtcgcggtgcttcacgcggactgcagggcgagggcgaggacgagggctcagtgatcgagggtggaggtgcgatgcggtgtggaccgctacgggatgcgatgcggcctttccttgtgtgcgacggtgattgcgtgtgcgggaagagcgaggtttcctttttctccttttgtgccgatggtcgcacggagaggggagacggaagcgaacccaaaaaatatggcagtggttttacttttattctgtttagttgtaggagatttgtgtatgcgtctccgtaatgctgcagccaaaatactttctttattatctttgaggttgtgccccccttcttctgtgcagacaggagggatatagatgatgtcaagcatgcagggtgcaggtacatgataagaacgtgactgaattgccgaaattaatgtttgcccattcattatcttagaaataatttggcccattttttttgcaatgacatgcacgatcttgatcttttggaccacagtacgtatttggcccaaatgattgagctgggaaaattccctatttatttacttattgtttaggtacttgtataaatccagcatgttagttaattaacgctttgagttcatagctagaacatccaatatttgcaaatggagcttctcatcaccttgtactatgccgtttccctagccacagtagtagccctcctttggtttcataagcccagagccgtgagagccggcgacaagagcaagcacgagaagcgactgccgccggggccatggacgcttccgatcatcggcagcatccaccacgtggtgcgcggcctcggacaccgcacaatgatggagctgtcccgccggcacggcccgctcatcttccttaggctcggcgaggtcccgacgctggtggtgtgcagtgccgaggcggcggagctggtgatgaagacgcacgacctcgccttcttctcccggccgaccaccagcgtcaccatcgacatcgtcggctgcaagggcaaggggctcggcttcgccccctacggcgaccgcttgatccagatgaagaagaccgtcgtcgtcgagctcctgagcgccgcccaggtgaagcgcatcgagtccatcagggccgacgaggtaggccgcctcctccgatccgtcgccgccgccggcggcgttgttaacgtcagcgacgaggtgaaggcgctcgcgccggatctcgtggcgagggccatgttcggtggcaactgcgccgagaagtccgacgacttcatccgccggtacaacgaggtcagccagctggtgtcggggttcttcctggtggatctgttcccgtcgtcgaggctggtgcgaaactacaggagcatttccttttcctgctcggagcgtttccttttctgctcatccgtgattgcttttgtttccaattttgagcagggtgccgtgggggtgcgagatcgcaacacgaggcaggactatgggcccaggttacaatgtcgcaccaaaacgatgtccactctttagtctttttagttgtataggagatttaatgctctatgcatgtgccacaagattcgatgtgataaggaattttaaaaagtttttggtttgtgggtgaactaaataagacttaattgacaaaccattttctatgcaacctttatttcgaggaccttttgcattgatatctgtacctctccaggggtaatgctttctaagctttgtgaatttggtcaaccactgtattttgcaacttgaaagtacacatggtgaaagttgaaagcgcactgaagactgaatttgtcaactctaatgtgcctgcctaactcaataaaacagaa

SEQ ID NO: 4650 - DNA, 12078 bp, Sorghum bicolor
agccactatcggcgggttcaaacccgactccacatggcctttctccaggccaggtgggaccaggtggcgttcctcctaggcctacgcaggagggggccttcgggtgtgctagcgaccctccgcctacccagcagatcagatctgggtgggtgtacagcaacgtgccgcaggttggaccgtcctcgtggcctttgtggccagctaggagctcttcacaccacagtggcgacgggtcgcaggacgcgtgactggctatgtggttcttctactttgcaggacgtttgatgttggttttgcataccatgttggatgtttcatgttggatgctcgattagtacgatttgttggatgatggacttgttggactcctttgttatggttttatgtgtgctatatatgtggatttgtgtgatatatatgtagatctatgtgatatatgtgaattccagttatataatcatatttgtgatttgattgttgtgatgcaaaacagaaaaaacataccaaaattttacttattctagctttgccacctgccacgtggaaaacaggtagcaaagctggaatcttatgaaccatgacagctttgccacctgccaataaagacagtcggcaaagaatttccgttctgaaaaaaaaattaaaacagcctttgccatctgctcatcaagacagtcgacaaagaaatttagttataaaaaaattaaaaaaagcctttgccgactaccgcgtggcagtaggcaaacggaatgcgctccgtcatctcacaacgacgtacatcttctttgccgactgtcatgttgataggtgacgacgtacatctcctttgtcgactgtcatgttgataggtggcaaaggctttgccgactgctttccacttggctggcagcaaaggttttttgccgatgaattctttgcgacgtgttctttgctgaccgccacatgtaaaacagtcggtaaagcctttgccacctgttttagggcgggcattccagaagtgatagggcctgactttactcatacgcagattttcttcgtttctgtctagccaggctaggacagtgcgagagggacggactcttggatcagatgagagagcagcatgcaggacgaggacctccgtcaagccaaccaatcaccttctcttgtagacctggctgaaagggcacgacgaccaatcaagcagctctggcacccatggagcctgcccacagcgggcctgtccgtggcatgtgagccaggctctgtccatccgcaaaccaaacgctggataaaaagaacaatgacgatggataaagagaccaacacaataatactagtaggatattgtgaggatagatctcaaacacaacaacaataataagctgatagctcacttaaagttataatagtcttgagagcccccgtttccttctccaatcgtacaatggtataaactagttgtaaatttattaaggaaaccatcattataatttgtataatttttaagaatattttataatggtattatgctttttttaagaatataatgttattatgcttaaggccctatttgacattagcaatagctttatgagttattgcgagctatttttttatgctgaacactcttttttaaaataactttatagatgaagctccttttagtttgggtcgttgaaatttggcagacgttgatttattgtaagagaaaaatatagttgttgtgaaaagtatgctgaatatagggtgaaagagagatgaattaaaaaaaatagctttttacatatctttttatcatttctctcttaattatgaatgaagtagttaacgaagctattttgtcaaatgatttttataaaatagtttatttttacggaaaaaactgctcgtaaatagcaaaactcggccgtgccaaacgggctaaaccgaaaaagccacacatcacaatctcacggaatagacgtgacccaccccataacggactgacttgcaggttgacgcagctctcaagtctcaagtacagtagacgccaagtcggtcacattcacactcacacccccacagcacaactttccgatcccatccctctccagcctccgccctccgctcgccgcgcttccgcttcctccgccaccaccgccgggatggctgcgcgctgcccctacttcgccgtggaggagtcctcccgcggcatccgctcgggggagtccccggccgcggcgctccgccggatcctcgcgacgcccggtgcgcaccaggcgccctgctgctacgacgcgctcggcgcgcgcctcgtcgagcgtgcggggttccagattgggttcatgggcggtgcgtgcgcttccgttatatgcgttcttgtctgtttctgtgtgatgtcgatcgtcgttccctcgttttctcgatgaggttttactctgcttgtttgagagtgccgagatactaatcgttaggcttcacgttgtatagttccaatcggagcagatttactgaatcccaattcatatcgtgtgcttttctaccgatgaaagtcacacaaagtgtagggaggaactatccttaaatctgttgctaaaaccaagcaaactcacaacttcttcacgatgttttaaaattgaattgaactgcatgcgtcattggaagtaaaatttcaacttcaagaggaaggttatgatattgacaatcatcctgtcttgggctacatatgttctgtggttatttttctgactacgtgctgctatggtgtttgaatgtttccgtttggaaaggtaaaatggtttgattagaactgtggaatgtagttcagctggccagcatttcttcatgcaaatttagtctatgacaggcgctattatggaaattgttctgttgttgcttatagggcttagaaataaccgcattcaagattttgcttgccgtgcttgtccaaaagaaaccttctggagatattcaagttatctcatacaatggagtcttcttatcttttcaggtttctgtgtttctgccgctcgacttggcttgcctgatgtcggcctcatttcctatggagaaatgatagaccaagggtgtctcatcaatgaagctgtttcaatcccagtgattggtgatggagacaatggttatggaaactctatgaatatcaagagaaccataaaagggtatatcaatgctggttttgctggaattatgcttgaggatcaggtgtgttgtccaagtcattgcaattcatccttgcacagattaccagctccacttgtcttgatgattactgttcatagttccgacaaataagacacattacactacaagcgaattcttcttacagttaaccttatggtttcttggttaattggaattagttgccttgtctgcttcttcaactaaagacagtttcctgagtatcgtgcatacgtcctgcaaccatgtttccataagtaatatgaataccccctgctgaagaccaattggtggctaggattaggatgccccttgaggatattatatgaagggtatataactagcaggtgccattcttcaacttggagaaagtgtattatcatattagtcactggacccattttgtatattatagattgcagaccaataaagattgcctatatgccatgaagatatgttttctgtagtggctaacggagtaacaggggaaaaaagatttggcatttaatacccataactggtgttaccaacaacactagtaagtatttttttataagatttttttttttgccctttctggtgctcattcgaactcctttgaactcattttaatacctatttcatatgtatatatttcaaaatctactttttctcacaaatgataaacactagaaggatattccgcgtgttgtgcggggatcacagatgatttataaataaattttagtggatggtgtggtatgctgatgtggacaaataaatgcatgttagtggataacgctgcttgttgacatgaatagcttgtatgaatagatttatgtcataattgcatgcactagtgggctgctgatgtggtagctttcatggagagacatttttttttttcttttctggaagctgtttttctttccttgctgcgcttgtggctacacaggaatggccggcttaggttcagtcattgataaactagtctttatttattttattttatctataaagaaggcatgcatgttactgttggaagatgttggtggccaacagcctcgtctcgatccagtacatggtacagtgattgacattgctctgtcattatcctattttaaatgtaagctcccttcaaatttagtctcactggatccctttctaatgttgcattagcctaattgaaaaaatgcaactgctatgcatatgcacaaacgttcaatctcttgatcagattatctttgttgtattctaaaaaatgttgcaattgaagttttgcattggacttggtgtaataaaaatctaagagaattaaagcagatatcatatggttgcaacacaatcattatctattttgactctataactaacttaaatagctcgggtggtctttgccatatttatctgacactatttgaaataatgtgtttttggatatttactccctgctattgcccaacaaaaaaagtaatgcagttaacttgttttattctatgttctcaggatgcaataatatgatacttgcctatttctttttatatctgcttacttaggttatatgtaaatatggaaagaagtctttcagtttcatattaatctttttgtttatcctgaaaaaaaaaacgactttccacatttttaaggtggcacctaaagcatgtggacatactgaaggaaggaaagttatatcaagggaggaagctatcatgcacataaaagctgctgtagatgctaggaaggagagtggctctgacattgttattgtagcaaggtcagatgctcgccaagcaatttctcttgatgaagcattatggagggtgaaagcatttgctgatgctggagcagatgttctgtttattgatgcccttgcttcagtagaagagatgaaagcattttgtgctgttgcaccagaagttccaaagatggttagttgtattctatgtttttgttgctttctaattacacatgaattgttatatccaagtgttatggtagtttctgcattcgtccagattgtagttcagtataacagtcctcatttcctggtcatgttggtcatacctttaaatcctttttccaatgaatttgactagggtatcaaaaggacacacgtacataaaaaatataattctctaaattagaattgattacacttttcttgtggaaattgtcttacagtttcctagtgaaaatttgtttttaccagtcaccaatggatgcacttggaaaaaaaaatgtggaccagttaactaatgttatatgcatggttatatccacttttgctggttcagttttggtatttccttgctagattctagatactttttgtattccttggaaactatgctagggtcaacgtacagtatagtgtctccctagcatagtgatgaaatatgggatagtagtgatgaaatggggtggtgtgattatgaaccagttttcttacacgattaccattttctcatattcccctaggttatctataatgtcaccatttggactcagctttagtgcatatgattatgaaccggtttgcttacacaattaccattttctcatattccccaagtctgaattggaaagcatgccagtacaaattagatttactgctcatattttgttaccaatggcaacgactagtccatttgccttttttaacatttgcttcaagttgtccccttctatagcagtgacatgacacatgagtacattcacactctgttcaggcaaacatgttagaaggtggtggtaaaactcccatattgagccctgctgaacttgcagaaattggtttcaggcttgcagtctatcctttatccttagttggggtatcaatgcgtgccatgcaggtttgttttcttacttatgtgaagcctgtggcattattagtttctttttttatctatattgatcaaagctgaggtaatgagtgtcaaactgctgatagagatcacatgtatatttattcgttggagcacaagctcaaggtagtcctagttcttgttgatccttttgctgcctccagttagttattccatactgaactacacttccttggtagatctgaattctgatttcttgtacttttggctgactacacatcctctgtacctgtgtatcctttatcggtggattgcattatggattgaaggttatttattatggtatgattacatagcagattaaaaaaatgtccaactagcccactaactgtaaattgtctttatgtgtgctggagactctagtgcagttctatccccctaaatgaaatataaggcatactttgaactgctcgtgaaatgtagtttgctgaccagataaataattggtgtcttccaattttccagatcccacagaagctccccttacagcaatttcccccttaatcacctatgaccaaaacacttagagcacaaatccccttcattgtatttatgttcaatgtcaatgagaaaataagcatgagtggagaaccaaggataacagtggggttggtgttcctgcttaccttactcatagccttccaatccgtatatcttgattggacatgccaacttggttgtgtcttgacaatactttcacatagtataatttgctagatttgtgaacatctgagttatgtctagtgagtaatgaatcatgttgacatcctaagctatctcatttgtgatgtggtgcgagcacctaccttgatactagcattctcatctacggtaggcatggtgaatcctttgtatcactcggataaaggggacttagtagatggcctggtccttcagcaagatgtcccagatcaacaccgatagaaactctcctcttctcgttccatcagcagcaactcggcctaccaaactttgttcttggggactaagtttgccccatggaaaagaatttggaaaagctgggctcctctcaaatgcaaatttttcatttggtttaaccatcgataaccgttgttggacggttgactgtcctgccaaacaagagatgcctcatccgtcggcctgccccttatgggtgtgtttggttgggtggccagcccagccccagccctggctccctggggccaattttggtctgtttggtggcttttaagggctctggggcctagtgtgggctggccatccgtacccctttagcatggctctaggagaacaaccaaatcggtcgttcaatcctagccaagctcgagccagcccatgagctcgttcccctcacctcctccatcattctcctcacctctgctccttcccaccgcggtccacgtgagctccgaggaggtccgcccgtgctcctgcccaccagcggcggtcctctgctcgtcctccgtcacggcagttctagcagtggcctgcaccctgtcttctcgggccacggttccttcgtcatccccgcccactgaatacctccgtcatcccgttcgacctcgccacctgccatcggagccccttcgacctccctgcgcgccggatctcacgacccctgtcgaggatgtctcatcgaggctgcatgtgcaccatctccggccaagttctagcctcgtcaggatggaggtgtggtccaagctccagctcgtcgcgacctccatctccgcctagctcacccagctcgccagatcctctcgtctttgactctgcagtgagtgcgacctttccatcctccatggcgtccactggcagcgagtgatgggaggagaacgggagcatgcgcgcacagacatggatggaacctgctcacgttctttggcacaggcaggggatgtcttcgccagggagctcctgccacggcgccgcagcagagggaggatggcgtggtcagtcatgaagaggtcgtgggaggccttgaggctcagctctagctccaccagtaagctgaggaaccacgacgacgaggctggcatctccaccttgcactagacgtccaccgcggcccaagtgtttgatgaaatgttgaagagggggtgagctcaccagaatagagaagaggtaattgtatgcagtgtaaatcatacaaccaaacacacctagttgttggccaggcttagatggtacatgcaaccaaacaagtccgtcttggcttgctaggggcaggcttgggctagcctggcttagttttgctagtcaggcttgtacatgaaacgaaccaaacacaccctgtgaccaggtagaagaaactattcagcataccctcatctcctgcttgtttacctggcaggcctggaaatgtttttttagaagcttaacctgtctgcagtagcgtcacatatatctagaaccagtttctctcggtggtggggctgtgctgttagaggtctccctaaggagatgcacaagggccttaactctctaatcattcttgtcacctgggagatttgggaacataggaacaccattgtctttgaaggagccaggttagacactccgtctcacagtggctcatgaaatcagcttatggtgtttttgcgtcaggacgggccggggtgggtggtgtcttgtcgatctccatgagctccacctgacgggcgaggctcatcgcggcggcgaccgtgtcgggattatggatgcgcaccgcgtgactcaggggcgggaggagaccgccgatgaagagttggacccgctgggactcatccaggcgcccggcacggggaaggagggcctggaagcggtttgcgtactcctcgacagtcccggtgcggcggcactccgagagctcaaacatgggggcggcgcggaggggcggcccgaagcgttcgttgaggaggtctttgaacctaccccaggatggtgcgccatcgtcttcttcaagctggttgtaccacagctgagcaacgtcgtccagatggtaagatgccattcgaacgcgctcttcccccatggtacgatggtggcggaagtacgactcgcatttgttgatgaagagcatggggtcgaccgtgccatcaaagcggggaaagtcccacttcttgtgcttgaagaaggggtcgggattccgcggcccttcctggcggcgatcgtcgtggttgtccgaggacgacgaggacttgtccttcagggccgccatgtcggacttcagggagttcacctcggagctgagggacttcagtgcgttgagcacgtcggcaagggtgggttcggccatggacgctgtggagctgagtgttgaaggcggcggcggctggtgggaggctgctgaggatgagtgatcggaacgcgtgggcgaggatcggcgagaccgtgataccaggttgtcaagggcctcaaacccctgactggccggacctcggctacgtagctcgtagccgccgtccgtcacgccggcgaggttatacccctcagccgtcggcttgtagaaagagatgggaagattagggataactttctgcctaatctcaatttgtccctgcgtacagtatataaggcccgtggcctaacagatggagagagctctccttaattgtaggactaatcttaacaaggaaataactaactagctttcctcctaatcctgtcagccactcgcctgcccttcctgggccctggccgcgcgctcggcgtcccggcgcacgtcgcgggctctcctgcgccgggcataagtgcgcccgcacatgacagttttggtggtgcctttgctctatgagctcctcattaggtctcagggtcctgacccttgaggttggttagaggtgggctggttgtgctgtgtttgtgtcccttagcttctcgtgtgtgcggtgtgcttgagagggcctttcattagcctctcccttttctgtatgcagtttgtacttatttccttctctcctgtattgtttgagaaaaaaaatattattattttgtcagttttaagttctaatgcaatcatttatgttattttagtttttcctcttcctcaactcacgatcttgtatcattcatttcatccttcacctcgcatacataatcattcaacaatgtattacgtattgttcctagtttctgaagatcctgttggtgctaacaaaccacaactactattgactaggcttatcattttcaatagatgtttcattctgatggtgtcaaaagcattacgtattgttcataacacaagaatctctgacatgcaggatgctctagttgcgataaaagacggcggtgtacctccacctagcatcttgccatcttttcaggagatcaaggatacattgggtttcaaccgctattataaagaagagaaacaataccaagtggtgagttaggacgcttttgttcttactctctttttttcagcatctgtctactgggcactcaggaagcaccatggcttcttccctgcgtcccccctggctgctgcccactgtcctaccttacctgcaaagcagcctcctctctgctccctcctgctaaccactgtcatcttctccctgactccccgaaacaacctggcccacaactggtcctccacgacactaggcagtgatccctctgctaccccaccgtgctcaacagtggaatccatcgccatcatcaggccagcctatcgccggctcaccgcaggcttctctttagctttgcaaaggacccttcaacgctgaatcctaaccacacagacattgccagagtttggatgggcaaggctgagaatataccaaaacacaaaattggacggtggcgaaatcgggtgccagatgccagtgtaggcaaggagacttgtacaagcattagtttttccgtatgtttagggcctgtttagattgggaacgaaaattttttgggtgtcacatcggatgtgtcgggagggtgtcgggaggggtttttagaaactaataaaaaaacaaattacatagctcgtcaggaaactgcaagacaaatttattaagcataattaatctgtcattagcatatgtgggttactgtagcacttaaggctaatcatggaataactaggcttaaaagattcgtctcgcgattcttaactaaactgtgtaattagtttatttttttatctacatttaatgttctatgcatgtgtccaaagattcgatgggatggatgaaaaaattttgagtagggaactaaacagggccttaacatgaagtttcctaaatcacatgtttatgtttacctttggtaggacaagtgaaggaagcaactgacgtctgatcttgtggattcagccggatcgtttccatggcttaattgccagcggacatgatgcagaaccagtcgtatttatgttgagttgtaaacttgtatcgaaagctgtgtagcgcagtatcctgtagaacacatatatatggttttctctgcttccgttcctgctctgctgtggtttcagtaatcccgaacttgtggttccagtctaataataaaacaggccagcttgatggggctttcgttatgccagagcactctttaccccgtcactgtactaggggcaatttctccggaaatcaccattgttataaataccaatgtccatatctggttaatggaaaccggcgtggtctgtatatacaacgggtaattggtgaaaccatttccttggcacgcgcttccaattttccactattccctctgttctaatttgtaagatgttcttgcttttctagatagatagttataaagatgttatatctaggtgggtaataaaaattatgtaaaaaagataggatgaaatttggagtattttttaagcctccaacaggttacaaattaatattcctataataacatcaaattcatatatatatatatatatatatatatatatatatatatatatatatatatatatatatattaggtgagtttagttggatttagaccaaattcatgggttatataggctaaaatgacaagggtgactagttattttggtgggtattttttacccgcgggtagaagagtatgaatagtatacacccacacacgtacctgcgatcccgatggatataga

SEQ ID NO: 4651 - DNA, 7897 bp, Sorghum bicolor
gtgcaattagttattatttttatctatatttaatggtccatacatgtatcgtaagtttgatgcgacggaaaatctatatttctatctatatttaatgttccatacatgcgtcgatttttttgcaaattttttttgaactaaacaaggtacaagaaattctcagcaatcatcaggtttcagctctgcgctgcactctgcacatcaattaagtcatagtttcaggccgcactaacagtggcaaacagacggccgcaagacacgggggatacacagtacagcagccgtggggtgagctaatcgatgaggatgggggtggacgaggtgtacccgccggcgcgctcccggatctcctcggggatgtgggcgcggagcacctgcaccctgaacaccacgccctccggcttgccgtcgagcagctcgaagacgcacccgtcgccgagcatgaggccgttgtccagcgcgaagccccgccacccggcctccaggcgctggatctgccgcccccccgtgaaccgcatctcccaggaccggccgtgccgcgtcaccgtcgccggcaccgtggtcgccgggaggaacggcgccagcgacctgggcaccacctgcagcaaggcaaacccaaggagtttgtttggtcatgctcattcatgcatcacgtggaagcctcttgcgtgactctgtttcagcaaatgcaatgcaagcacaagagcatatgagtagcaacagtaccacttggaacggctgattgacatgagacttgcagaggatgcatgtgaagtatggcctcccgagaagagggaggaccccgggctgcatggcacacggcgtctccgacatggacagcggatcagctcctccgtctgtagggctcgcgccggcgctgtgtccggcggaggacatcgccaccgatttgcctttgctcatgacaactgcagtcgcaaataaggaagatctatgtcagctagagaatcacattttgcagagattgggtttggtctttggggcacaactttttttttttttacctttcctggatggacgacggagggacttggaggactgatgagtgaggacggatgagaggaggaagaaccatccgtccatgagctttagctcacgagatcactgtggccagaacaatctgtccgctcaaccgggcctgtggtgggcccagctgtcagaacccgcagcaggccagcacgcgaaacaacacggcatttgttggtttgggccttagggcgtgtttagatctaaaaagtttatgaattttgatactatatcatttttatttttatttgacaaatattattcaatcatgaagtaagtaggcttaaaatattcatctcgtgatttataggcgaactgtacaattagtttttgttttcatctatatttaatgttttatacatttgccgcaagatttgatattatggggaatcttgaaaagttttaggtttttaggtgatctaaacaaggccttagttcctgatgacaacccaaaattttgaagactatatcacatcgaatctttaaacacgtgcgtgaagcattaaatatagacaaatataaaaactaattacacagtttacttgtaatttgagagataaatcttttgaacctatagagtctatgattagataatatttatcatatacaaacgaaagtgttacaatgctcgtttcttcaaaaaaattggaactaaacaaggccttgtttgttccaaaacagcttgggcctaatgtggtaatcccaagcccaagcccaactgccaaacagcgcgcgtcgcggcgggaaaagcaggtccttttcccgccaaagcgccccaaacttccttactcccgccgccctggctctcccgcacttcagctccgcaacaaaccccgcctcccgcccgcgcctgtctccgacgacgccagcgcaccgtccgcagaagccgaccccggccgggcgaggatcctgctccccgctccagacccgctgacccgggcagccaccgacgccgcatggagatcgtgcgctcacaccggcaggtcgccgccgcagctgccgcagccggcggcgacggcggcggcgcgggggcgctgccgacctacaaggcggcgccgcagctcgaggtgcggctggaggagttcgagctcttcgccatcgaccgcctccgaggtgcggcctccctgcctcttcctatcccgcgtggcttcctttcgttacttcctcaatctgctggctaacggttggagtgcgacgcgtttcgttacactgtcatgtgatgggcagttctcaaggggatttcggatggactctcgcgggggaagaggcccgaggagatggagaaactggtgagcgattctcgcctttgctgctaatgatctttggggggaaattgtaggatggaaaactatatttggaaggattttgctggcaggagtaggcgaaggtttcagtgattgtagtcttgtgtatgtgtaggatcgacctctttgtctgagtttgatttcactacagaatatgagaagtcgctaacttcggatgttagcatggtactactatccgatattccaaatttattttgatcattgtccatgcttatgggctaatttttgtagctagaacctcgtcagaatcatactgaagtaagataacatatggaaggttttggaaccctagtatggacttagcatcgcactctggcattaaattttgtgttaatagaaatgccttattctgttctgcacttcaggtcagtgaattgtggaagacatacatgaggcaccaggatcctgcagagactttgaacaaggatataatatcacactttgtgctccgcctagtctactgcagaacgtaagcttaatatccgtatgtttatctttgttacacattaactatggtagttcacttgtggttcttttgaccaacttaatggaaagctgtatttgatacaacacacagggaagaattgcgaaagtggtttctctccatggagactgcactttttcggtatcgctttcggcttgagagtcctgaatcacaggtgacttcctgtccatttacaatagaactgacaatgtaaaacaatatgcatttatgctttaactgttgcttgttgcacatcatctgttgcagaggatgcttatgactgagtttcaactgccatacaaagcactgccacactcagagtttgaggtatagagtttggcctctaatagaactgctgaggacttggatcttcttgcttaacactgtacaactgcagtgtttggctttttcctgtttgctttgtgaagtgattttcgttttcatgttttaggctgtgaaagacaagttgagccaagttgcgcgttccatcggtcaatctgcaaatggtaatcatttgatattaccactatctttcactcaatttatgcagaatgctgttccaactggttgttagtatcagttacagaataggatgcttctccatgattcatatttttgtgcttcgtgtaagcagttattgtaaggtagcttttatttttgctatgccgtttcccttaagtcagctggatagctcaaaactttataataaaagcaggctgtgagcacttgaatccagaaattccttagttttctaaaaagtctaagcgtttaacacactgaaacagcagatttaccattgtaagtgaacttcaggttaaaggaaatgtattgcaatttgcaatgtatagaacagtcatttgaaacttctactgtgttaaacttgtcatcaactttcgtctgttcttttattttctttcattatctgcttttgttttaccggaagctaaattcatcctttaccttttcatttttgcagtggagcatgtgttcttcaaggtatgtacacttacatgttatagctctttatctcttttccatttaaatcgtttcttctttgcaaaaaataactccaagtaaatcatattgtaatccaattaaggtaccttttgaagaagttcctgatcttgttgccagccgccgggtatttctttcaaaaggctatgcttatgtggcgatgagccaggtttgctgttaccatgagaataaaaaattcaattcttgttttggttggtggcctttatgatcatagctatataattctgtaggtggtttcgctagtggttactcaattccgctgcaatatctcaaaggcacttgctttaacaaacaggtacatggtgcactagttttactttgctcagtacctatggaacattttttggaagccttcttacttaattctctgtaggaaatctcttgtggctttagatatagtacctatgctattttttgtgtggaaataatcaaataatttatcacatacttgcagaaagatcatactttgaagtttccagttctttctttctatgacatttatgagcagcagttggcattaagctctaaactcagtgctcactgttcatagtaagctaatatatgtgtaattttttaatgtacagaaaatggacagcaaccattaaagaacaagaaaaaggcaggttgactcctgtgagtaccagagtaccgcttccctatctttctttcagaaccatttttatatcctctgtgatggctaattttattatgacagattgtcgaagcattaagtaatgcatattttggtcctgattactctcaggtatgctgtctcactctcacctatgcagttatgccttactttcctgagatttaactatcttttcctctaatgaattgcttgacttgttttcatacagccaaaggatactgttgacatatctctaaaggatattgaccaactggctaaaagttctttccctctttgtatgcggcatatgctagataaggtgaggtagcttaaatgttcctgtagatatacataccttgcaaccaggtgtctcagtgttttcatctattttgcagttgagagaaaatcaccatctgaagcatgggggtagaatgcagtttggtctttttcttaaggtaatacttgaatgaattagagaaaaacttagatatataggtacctaaaattatgtcacattaatttacttctggaaattatgatccagggtgctggactaaagttggaagatgctcttgcattttggagggcggaattttctcagaaggtacgtatatattttttgacatgtactgtgtcatgcaaacatttaacagaaacatgttacaacatcatcacctctatatattagcagtgcacactgagctaatgtgatccaagatatgcaaaattaagcagttttttttttctcaaggaaattaaacagtaaattttccctgagttgaacactcaagtaatcacaatttctgttgcctcacttatgttgtatcttctttgggtaaggttggttctgagcggtttgacaaggaatatgcctataccatcagacataattatggaaaagaaggaaaacggacagtaagtccctcctccacgtgttactagaaattgcaccagaattattacttactctcacacatgctgctccaggattacacaccatattcatgtcaaaagatcatttctgcaacacctggtgttggagatcaccatggatgcccgtttcgacatttcgggtacaatttcacacttagtcttctatagacgatttctatgtgcttattatttagataggtgctctgaacttcctgttagcagtattagtttgtatttccgatcttccctcttttcattagattactcctgaactttgaggtggaagtaagatcacatttggaaaccagaaaatctgaatggagcaaaaggcctccaacttccagtttttctgactaaaaaaatgatacccaacaaaaaaagaagcttaatgtaccagaaagaagccatatgtaatacctgatgtttggtccatgcatttgcttctgctttactgtatctgcagcgaagaaaatttgcgggcagcactcaacaaaatgggcgttggtgggcatgcattggaagagataatggataaagtgaagaacaggcattaccaggtgttgtacttcattgccattggcttaaccaagcaatatgatatccctcaactgactagtttatctggcataatgaaatatacagctagcttgcacattaacctttgagaccacacacggtgtctcctgtgattctggaatcaaccatccaaatcaatatttcagtgaaagccagaaaattctgcgagccaaagtgagtgcagtagtttattatacacttgactttttttcttatgctctgctggtttttatcaacatgagttaatgttccaatttaacatgtgtggctcaatgcacagaaccaaacaatggagagccaatcacaatcagcaacctaaattgaatcgcagctggagaaactatccgttttcaaaaaaacttaccaggtcttgacaccactcagcttttgctctacattttctctatcttatccacaacttgttcgtgacttgatgcatttctaatgtgcaatgctgaatagaagacatgctgtgctccattttctgtctatggcatatgtgatttatacctctgctgaatctcttttgactgccaacatcttgtgagttacactggttagaccgttgaagtcctggggtcaaagaaacccgtcacattcttgtcaaaaaaaaaaagaaacccatcaccagtccgtgttcaaagccttgcattcttcttaatgctatgtcaggggcatctttccttttaattcccttttcacttccagcagttctattagatattcccttgttcattggaaccatgtcacatccattcgacaaaatttagtttctgaatgattgaaactgccccagaatagtgttttacttatttatgtgtgatatttttgtttcgccccatccaaggtttcccttcattactgaatttgcttatattaatgcatacagctctgaactttaaggggacttttatttaatgtgtgtgaccttgtgtgtccctgttagtttttaattgatttgctgtgtctaaaacagtgtaatttctatacatccatttttttctatcaaacatgtgagttggtataagcccactaataatcttttggtcaaacagcaggtaacactgaagcaaaattcatccttgatgccaattatgttatcattactggttgacaattattgcttgttgctccctggtgtttccaaattccagctgctggcttggcctagaaagaaaacctccaggctccagctgcgagctgtcataccctacaagtgatggcaccacactctacactagaatagaagtgttacctagtgctgcgaacagcagcaggtcaaggctgtacatgtaattctcgaaagtaccataagtgaatattctgaatttaatgtaggatcagctgtgctgtgctgttatgttattgtcaaactctgagtagatgataattctttacttctgattctgcccatgtattatctttttaaaatgactgcaaaagctttgccataattttattagaaaaaaagaggttggtccagtttttaagagaagaccgcacctaaaaatattaaaactacgagatgaaaagctactcaccaaacaactaaaaacaactcaacacatgttagcaatcaactagataagacagctaaaaaactctttacaaaacactaacatcattggcaagaccaccgatcgtaggttgacccaaacaacatagatgattgctattaaaacaacatagatgattgctattatgcaactaaggagaaaaactaccagctccgagtcttgggtcgcgtggatagttcgctagctcatgcagaccgtctctttgcgccacatcgagctaccaacactcttactaccttgttcgtgtcgtaatggactgtacacttatcttcgcgaaccgtccataagagca

SEQ ID NO: 4652 - DNA, 9660 bp, Sorghum bicolor
ggttggggacattgggccttgtctgaagaagaagacattatatgtgctagactagaaaaagcaagcagctctaagcataggttcattcttcttgatattagaaagagacaaagagatgcactcatctaaattgcgagtctcccaatgtgttttttagccgataccttgatcaaccagtccctccaacctgggatgattgatggccaatttctcatggaggatttcttatcccagagattggggtgaatattagaatgcttgaaagggactattggtttcagcaataattgctctgcttggatttgagtcgcccatggagcctaagaaaatcttgtgcaggttgtcctcaagagggatgaatatttggttctgaagatcctgaaggtaggaaaaagcatgagcaaatattgaaggggaaaaggagattagaaagaacgaaggaagaaaaaaaatacctcaggaatattatcgatagacgccattggaataaaggagtcgccgagttgaaagctcgattggatgttgttgaatcgtgtctaagtcttgcgggttgtgtgggtttcaaatttttgactggaattactttggagggaaaccctagctttttaaaactgatggatagggaagaatagaggagtaaacggagtcatcaatgtgtccgcgttggttttgattggcgttggtaattggcaaattttgaaataaaactaaatttatctcaaaattggggagcatgtgttaaccccaaattttggtgagacaggattcgtctgtgggtccaccccatggaaagtaggaacgaccggatagtggatcgactaaacaaaagcatggatgaaattagtcgatcagagcatatcgaatcaaagcaaggcacaagaagacgtgtcgggttttattacaaagaaggaattggagtccggattaccttttttgagtagtcgtgtaatattagaatacatgactaggttccggggctataaatattagaaacctgatcaaaaatatacacaatcaaatacaaacatttttcggctccagccatcaaccttaggagtaggagtaagagtagatctcgacaagatcttcgacaaatcgagctgcattggttgatttcgacattcggtttgcttgtaagtattgtcatggtttatgtttcgtttatcacggctacatcattcgaactcgtgttaagctcgatttgaactagttatcgacttagatcttatttgtaaggctgcccttaacagacaaaataataaccgaaatgataaatagaaaatcccaatttttttagctcaaatggggaactaaacaagcccttaaataaaatttgtcttttatatcttttaacccttgagcggtttctctatcgtctacaggctttggtgaggtagtcccgttgtctatcttaactaacgagaaataggaatagaaaatagcaatatttggtgaaagagaaaaggttgttggagaccctttttttcactaaaatttctctttctgggccttgtttagttcctaaaaaattttacaaattttttagattccacattacatcgaattttacggtacatgcatgaagcattaaatataaatgaaagaaatagctaattacacaatttatctataatttacgagataaatattttaaatctagttagttcatgattggataatatttatcaaatataaataaaagtgctactgaatccgttttgcaaaaaattttggaactaaaccagaccctgttgaaagagaaaatttcactattcgaagagagcccatagtgggctcggaaagcgctctggcatcatgcgacggtggcccggcccatacgggtagtgaagtttggctgcttgctctgtaggactggtccggaaagggattttcttttcctaaaaaaaaaggaaaaggattttctcggcgcgctacgactgagccgagaggagcggtagatcggcggcagcggcgaggtagggttccggcgagtgcactcaatggcctctgaggcggcgcgtcggcggcaggagatggcgttggagggtcagcggcacctggaggagaccatcgcagccgcgttccagatcctcgtatccatgaacgacgagctctgcaacgccggcctctggtcctcctcctccgtctcggccgctgccgctggctcccagcaccaccactctgctactacgccgccgccgccacactctgcggactccgacgccgccgacgcagggggcgggcccggccccggcgggtcgctcgacgaggcgaggcaccgctacaagtcagccgtggcggcgctgcgggcctccatctctgccttgtcgtcctgcgctcaggtgagaccttgatgcaccttgtgctcctggcgcttatgcctaaaattgttttaggcgcattcttctgtgatgaaagatggtacttatggtgtaaaaaaaatcggggcattgccatgtaggggagccaaagcaaattcttgttacgagactgatttgagatatttgcaatggtaacaactccaactcatgtaatgtaatgtcttggtggccatttccaaagcttacaaattttttatttccatagataggtccgtatttggtggcacaattataaaggtgaaatattgatgtgaacttgtgaagtatgtggtgctatggtagacattacttcttttgagaaaacaaatcttgccttgctaaaaagaacatcattggcgacctaagattgaccccacatttgatttcagtaccaaggatccagtcgaaatgaaccatttaccagtcaagtcaagccaaaattattggttgatgaacctcttcccaccgacccaacttaggagtctgctgcattcatgcatgccaaatgcacaggggtgctattgaccaaggttcggctaggcgtcgactaggcgtcgactaggcgcgattaggcgctaggcgaagcccgtcgcctcgactatggccatagtcgcgcttccaggcgctgggcggcgcggagtcggcgctgggcggcgcggaggcgggcgcgagcacgagcgcggccaatttagcgcgccaaatcggagagcgggagaatttcccgcgcggccaggcgcgcgctgccacgaaacggaggcgcgggagaatagaagggagcgcggcgacctccctgctcctccaatctcttcccctgctcctccaatctcttcccctgctctcctccaatctcttcccctgctcatccccgaggcgccccccgctggtcctgctcctcctcccgccggtcctgctcctcccctgctcctccaagttcgtcccctgctcttccccgacgtgccgccgctgccctgctcgtcctcgactggaacacttccccaccggccaccccaagtccccaaggtgagctcccttccctcccagctcctcccctgctcatctcccctctttgctctttgctctttgttcagtagcagtaaaaatgtgttgcagttgcagccatatatatatagtcaatagtcatatatatatataatatatatatatagtcaatagtcatatatataatatatatatataatttatggctatattgccaaaacgcctaggaaaacgcctaggagcgcctaggaccgagtactcccgactaggcgctaggcaatgggtcagcgccctgattaccctaaaccctcgactatgtagaagactgtttaccttaccttaggaaagaatgttaatattatccccatcatagtcgtaattggtcaagcctgatttttgcacactgttcaagataaaatttgtgttgctctaagcaatatagctttaccatgacatttgtccatctttgtcatgacttatcaaattaggaatgaatggaccaaaattcctatctttgtataagccatggcttagctgaggtacaagcgctcagtctcctgtacatgcctgtgcacggcacgcgctcaccactagccatcgtgacggacccagagctgcagcagaccatagggagtctggtgcggctggcaaccttctcggcgatgaggttgtgcattgagccccagtcgatgagggcgtggacattggcgtcgcccagccggaggtgcatttgcatggtgttgctggtgtggacgccggtgatcgcgtggagccctctatctcctctagctggtgcccatccctctaactcctcatttctctccccatcaatgactctaatttctcattaacactaatctctttacccgacatactaaattgcattcattacagccgcctgtgcctccctgggctgttgcacgcccttgggagctcccctggctgcatatcgtgctctaggcctgcagttatactgccacccccacatgacaatctcttatctcttggtagactgatccaagaccttagcggcttggatgccactcgcctgaccacttaaacaatggggcattgtgacgacaaccaacccatgtgccagtgcagtagtcattgattatcgtatttcttatcaatttttcgtgctacttgtgtttctttcctgtgttcagttagggtgacatcatatttcagtttggaaagagaataggagcacatagcatttttgttgaaggcagcttcaaaggtgatgtgcattctataagagagaattccttatttggccctggagttctattagattccttctttgttgacatcaatttttttccttgcctatttgtacctaggttcctttttttttgcctctgtcatgtcattagtttttgaaggtaaccattcggggtgaaaggcaaagtgtttggatccagtttagtccctgtcacattgaatgtttggatgccaattaggaggactaaatatgtggtaaattataaaactaattgtataaaccacgactaaatcacgagacgaatttgttaaacctaattaatccatgattagcatgtgtttactgtagcattacattcgctaatcatggactaattaggtttaatagattcatctcttgaattagtcttcatttatgtaattagtttttgtaattagtctatatttaatactcctaattagtatctaaacatccgatgtgacatgggccaaactttagtcacatggaaccaaacatgcataaaaaatagcctatttgcagcttcgtggataagcctgcatcccccttttttgatcctcatgcactgaggcatcaaatgtatctcatgcaatgcttttgagcatgttttaagccatacctaactaagttcttctcgcaaggtctattaaaatacttatctttgttattgtttctcaattgcaatttcataatgtgcatgtacagttctaactaacatcagaagaaattggagtctaggttgggcactgatttctcaatagtgagtctatttgggaatcaaatattttgtaaaggtatataatatgcatgttatcaaaatggaatatatatttcttatttgccatctctgttagttttttattgaagttgggtagcgcttctatctatgtagtggtttgaagagtgaaaaccattactgaaattttcaaagctaagagactcgtcttatcaatagcatataacctattttgaaattgtatatttcaaaatttgtagcacttacccagctacccttgtgtgtgtcactaaaatagaacacttacacttaatatagcgcacatgttgagttttagatattcctatctataattttagaaatttatagttcttctgttttactggacggaattttaacgaattaggtttctactatctaaaactatgacttcatagtttttccatctaaaaaatcctttctactttaagctccacatttctagacattctggtaaacagaatttgaagtctaataactaattttatttaaaggggagaaaatagatcatggaggctggtggccgctatgccacaccaatccctctagcacggcataagggagtggctgcatggtcccttctcgcacggtaggattgcgccccattttttgaataaaaggtttcccccgctttattaccataaagtgacagcatccaagttcagtaaaagcgctagaacaggccagcgctccaacacgccaaaaagccatacggcacaacagaaacaaactccagaacgattaccaccgaagagcacagggagaaactagggcctattacatgcaaacatcatcacattgcctgagtcctccaaacgccgagcagtagattgaaccaatcctgatgaatccgttctccatttgatcctgggcgctgagcttgcctcaacttccaccatcataataaactgctccaactcttcctggacctccgacttgaacatcggcaaccagcccctgagcatcctgcccagctgcgcgaacaccttcttcatccccatccatggtactccctgaaagcataacaaattacataatttccatagcacccaaagcactgctgaagaaacaatattacaaactgtgaattttttatttgataaccataaagcagccacagattcaaaatcagaaccaactgtcctagagaaataggcagagataaaatcccaaacattcaccgccacacaacactgaaaaaatatgagtaattgattctccttccgtacagaaaaggcaagaagcatcattaacttgtctcctcttcggcaaattgtccctagtcaacaatctattgttggacatcaaccacaaaactgcctgaacgtaaataggaaccagccctctatggttaatgaccgcataaatcgactgaaccaaatactttccaaaggagttatactccacacaagctgatcctcatccaccgaacttaactcttcccacataagcatgaggcgctcagaaacatttctcctaaaggagagttgtggttcctattaccatgctaatgcatgtgttttgtcgcatcacatgaactaagacagccaaaagggttagatacaaaaataaatttagggtaggttgtttaaatattttttaaaaaataaaaaaatcctaagtcaaactactttataagtttgtatgtaaccggactttgcatagtaacagctggatctggtccgtccaggaagagagtacatgggcttcagcgaaatgtgtcggccgatactaggctcggaaagcactctggcatcatgcaagggtggcccggcccatcacgcccatagcgaagttaggctgcttgatgtggagcctgtggagtggcccggaaagagggggggggggggggggggggttctccggtgctacgactcagctgagaggagcggtagatctgcagtagcggcgagctagggttctggcgagtgcacccaatggtctccgaggcggcacggcggcggcaggagatggcggtggaggggcagcggcacctggaggagaccatggcagccgcgttccagatcctcgtctccttgaacgatgagctctgcaacgctggcctctggtcctccgccgtctcggccactgccgctgccgctagctcccagcacgggcactctgctactccgccgccgccgccaccgccacactctgcggattccaacgccgctgacgcaggggacgtgcctggcctcggtgggtcattcgacgaggcgaggcaccgctacatgtcagctgtggcggcgctgcgggcctccatctcttctttgtcgtcctgtgctcaggtgagatcttgatgcaccttgtgctcctggcgcttatgcggaaaattgttttaggtgcattcttctgtgatgaaagatggcacttatgctgtaaaaaaaatcagggcattgccatgtaggggcaccaaagcaaattcttattacgagactgatttgagatatttgcaacggtaacaactccaactcctgtagtgacatagtggccgtatggagggagctaacaaattttcatttccaaagctgacaattttttatttccatagataggtccatatttggtggcacaattataaagatgaagtatgtggtgctatgctgcacattacttttgagaaaacaatcttgccttgctaaaaagaacattgttgccttattggtgacctaggatttgactattcccgcactattgaccaaaatttaaaaacgttcctggggagaactatattcctactatggcttatggacaaaaggagaagcgaaagatgcctaagaaattggattaagggagtaattattaaggacaaatctaaatagcaacaaacattggttttatttaccagaacttgcttttcacattgtatgtagaagactgtttaccttaccttgaatgaaagaaggttaatattatcccatcattgttgtaattgggtcaagcctgatttttttctcactgttcaaaataaaattggtttgcgaatgctagttgaaattgatccaggcttcttatccctcccacatatgacttctctaagatcatgcatgcacactttgtcaggacactggatcaacagaatctgaagctgaccatgctgaaattgagagattggaagagcatgcttctgctttgagaaaggtactagcctgtaaattctctagttagtttaatctattctactttatattactctcaaagtttggacagctgtgtgaatcatatttgcccatttgcaagccaagccatggcttcctgttagcttcaggcagcaagtccttatatgtctattcataagtagttaagtacagagtaaggaactactgtttttctgtccttgtctgcatggaggtgtaaaaatatgagttagagcattttgcaccatctgcatgatttattttctgtttaatgcacaagtacgtcttttttcaggttctgtattgcatctctcgttcccaaaaacttccagtattttttcaacctttgttggggttcgaagagtacaatcccatgtgtcgctatcaatttagttttggatttcatctatggtagcatctgctgtatttagaaatcaaaagaaacatgatttttgtcaacttctgatatacactttttttatcacgctaatttaacacatttgacagacaattcatacctttctaacattgagacctaatgcaggaaattgaaagcaaaaacaagcaagtaaagctcctcatggatcagctccgtgacctaataactgacgtagcaatgtggcagagcccttgctcagtgtgaagtgccaagttaggcagtgtttgcttgggtgcatggaggtggatgggatgaattattcgggatggttggataatggatgaaacaattatgtatgagatgattgcttggttacctgtgttttttgtttggatggctgcatggaacagtatgaattagtacaatatcaggtttggttgcttgtatggatcatccaagcatacatgtatgacatataaatgcaacaacaattgataataataaaattaaattaagcaagacaagtcgcaactgatctacattatattaataggtacttcgtgcaatcacatttgatcgtacaatataggtctaatccacataacgaaagctacagtacatgtacaacaaaagagtccactcagtttcttaggttttgtacattcatatataaaaaatcattttcagcgtacttccgcttggacggtgttgttcggtgtttctaagcgcacgggactgtacagcatctgtcgagaatattccgt

SEQ ID NO: 4653 - DNA, 2929 bp, Sorghum bicolor
cttctctttagactcttttatccttctgtcatttggacgttgattacgtacgggaattttatcggtctttcatctggccaccgatcgattcatctctcggtacgagtatgaccgcgccctagtgacgccgccggccgcccagctgccgcccctccttcccttccaatctggcgcacgccgctcccctgtctggtgccgatgatgaatggagagcctccacctggtgtcgatggaaccaacgatcctggtgcctcattgcatatgcctcattgtttattaattttttactatatatgaacgtgtgcacttcatatatgccatgcccagccaaggcaccggtaccagccaaggcactgcctagctcggcggcgacggcaggcagcaagtcagtcacggtagctgcccagccagcctgcccagtgaagaacgaccgatgaaattcctgtatgtaaccaacgtccagacgacagaaagataaaagagtccaaagagaagagaaatacatgtatttagatgagaaaagagatttaatacaccaaatgtcatagaaaacaaagtgcaaacgtttcgaatgtcgttttagcgatgtcaacgttagaaatcctattttaacaaaggcacatgtttggaagtcctataatagcaattttctctgctgaatggggccgctagaataaagacaaaatggtcgagctactctggaaaaactgaaggtgcgtttgaggccaaaaatctgttgttgacgtgggtacggcctggtggctttcatgtgcagttcatttttgagcgcatgatgcatagatgattcttgggcgggcggcccattcgctcgccaatgcttggccggcttaacagcaagacttgcagccaaacatgagttactgaaatgaagtggccggggttcacatcaagagaggccgaattcagatcatcagatgatgttgatgctccatgaagtgggcagaaccatgtgacgcattatagagtgcagtacagacctcagacctgcagtcttttttagtgtttcaaggtgtgatccgatcgaggccctttgatttggactttgtttagttcaactaaaaatctaaatttttttcaagatatatcgaattttgcggtggtaaatcgcgagacgaatatcaaatacaaccgaaaatactacagtaatgaaattcaaaaaaaaaaatagatctaaacacggtcttgatgtgagtgctggcaaataataagcatcagtggtatttggatttcaaagaacgttctctcgcgggcaacatgtatcaatgcagcgatcacacaccgcagtatattgccctcgtcgttgacaagtcctaaaaaacccaccaacagtgcgcgagcaacatctgacttcagagagttgtttgcattttacattccatccaatgggcacaggatggggagaacgttgtctgagagacgatgactgagcacacacgagtgtttggtgcgaaccagccgggcaccaactgacgagctagcagataaaaacttgagctggtacttgcatatagctaagctagctctcctgatcactccactccactccaatccgatccacccgcagcaatccgcgagcagcccatgtgccaccgccgagctaaagctagcactagctgaacacagagtgccgtatctgctgcccctggcgatccggccgcggtgtgtgtggacgcaagcaagcagctctcgagctcactcacatgcgctgcgtgctcgtgtcgccacccacaaagacctggaccatgcgtcgcggctgcgtgcacgggcatgagatgagcaccccctcactcactacactctcgtgcccatgcccccgccacctgcgctgtccccgtcgccacccactcaccacgttcacgcacaccgtgtcactctgtacacttcactgctgtgctgacccaatgcatatacgctacgcatggataaatagccaagccacacacagccccctccaactgcaaagaagagaggtgcctgccatggcgcaaccaagaacagcagcgctcctcttcctcctcgccgcctccgtcgtcgccgcggcggcagcagaggtagaggcgccggcaccagcgcgtgctgcggcgacgacgacaaggacgacggggtgccggcgcggggacctggtggtgcgtcagcgcgcgacggggcgcgtggtggaagggaagcccgagtacgcggtggaggtgcggaacgcgtgccggtgcgcgcagtcccgcgtcctgctgcgctgctacgggctcagcagcgtggaggccgtggacccgcgcgccatccgcgccgtcgacggcgagcgatgcctgctccgcggcggccggccgctgccgccgcgcgggggcgccgtgcgattcacctacgcctggatgacgccgcaggacttcccgctcgtcagcgcgcacccgcactgctagctacctactacccttaattaatccttactgccgttagttcctacgacgtacgtactgattcattcagcaatacaagcaagattatattattcgcctgtttgtttgtttgtttgtttgtttgtttttctttcgattcagttccaattccaagtgtaattaactgaacgagcgagcttgattagttttggatcgatttacagcactagctagctactctgttgatgggctgctgttgcatttctggtagtcaaatgttgtatgaaatatgttgtgcttttctggtagtcatcacgcctctaggacagtgggactgggtgatgaaactgcaattggatacgtggagaggtggagtcacgggacgggagcgagcaacggcgacatggtgatgatggactatctaggcaccaagcaccagcagccagcaggaaggcgacgagccgacgacacgccgcgacgcgcggcacctttcatcacgtgccctgtccgcgacctcggtcctc

SEQ ID NO: 4654 - DNA, 3235 bp, Sorghum bicolor
gtagcacccttttaaatgagaatggaactccattgtgagcagcctattgtggagaaggttaagcttcgtgaactttggtcgcatcacttttgtgacatcatgggatatgtaatttttggctttcaactttgatcttattattagttgtagttcttttagagtaaagttcgattcgcttcccctagttgctaaatttgaaaggccccctcaaacttcaataccagaaaatataggcatattaacttttaaaaccaaataaatacctccttgaccatttctaattgatttcttaggtggttttgctacatctctctctctctctctctctcaaaaacatgaagttttcatatgaagttgtgtgaatacaaactttatatcaaagttacagatcttaacacgatgtatacctttcgagttgatattttttattcaatgcaatttagaggctcaaatatttattttaagttactagattttgaaattcattatttaaaaacttcctcaaaggatcttgaattatgacataatccatataaaatttgtagttcccattaaaatctataattttgcagtagaatttttttttatttgagatcatttagaggcctaaatatttatttaagttctctaattttaaaatttgtttttttaatttttcaaatgacctctgatacacaaccaaagttatagctctcagcatgatctataataactttgtagttaatttgtttgtatttgagatcctttagagcaccaaagcatttcatctttttttcttttttgacaataagcatttcatctttgactattctgtttgctgtctgttgtttgttgtgatgaagcggatacatggcgccggagtgcacgtccggccgaaagttcctgctgtccatcaagtccgacgtgtacagctacggggtgttggtgctggagatcatcaccggccacaagatctacacgttcgaaggccaggactccgagggcctcgtggaatacgtgagtggtgcacaaatctcttcttggcatatatcatcccttcgaataccaaatatgtggatcagagcaaggatagtaataaccgtgtgcatgggcatgcaggtgtggcagcactggagggagaagagagcgagcgacgtcgtggacggcgacgtggtgggcgtggaagcagggcaggagcacgccgcacggcaagcgctgcggtgcgtgcacgtcgcgctcctctgcgtgcagtcggaccgagcaaggcggccagccatggggcaggtcattgccatgctcagcagcgacgacgcggcggcggaggagctgccggagccgactctgcctgggtacgtcgtccgtccaacggcggcgtctggtgtccagctctgcttcgggtgcaggtagcgccgccggccgggtgtggtatttggttggtcaaaaattctgaaaagcagaatctgaccacacacaaacacacacacacacacaaaaaaaaaaaaaaaaaaaaaaaaaaaaaaaaaaaaaaactgttcggctgaacttaaagccagccatatttgggagaatgtgattcagtctgagtgtgcattgtttgacctctctaccgaattcttctattttggtcatgtggatggatatgaagagaaatggtcaaattcgtagtttggcgcaccaagctcagaattctgtgatcgtgtgtacttatagttttgaagggttctcaggacttgcttaaactagacttcgattgaactgattttttttctcttcttcttccttttcatgctagattttctgaaatgagaagaaaaacagggcatagcaaaaacccaaaattcaggagcggcaatgttgactttgtgtttgtcataaaagaaattcaggggtggcaattttgactctgccaaatttgacgcgctctgccaacgtagtcaaataagactgcccgccctgcattgcttctctgtacaagctgcatgcctatatatagatgtgttacagctccttctcccatcacacaaacattccatcttccccctaaagcagcatcagctactataccactgactcttgcacacacagttctgcacaaacaggacagatatatcaagtgaccgaccatggcatcccaggccatcgagagccaccgtgccggcgctgaggtcgtcaccggaggagacgccatctgcaggaagaagctaatcgagctgctggaggagctcggcctccccaaaggcttcctgcccctcgaggacatccaggagttcggtttcaaccgccagacagggttcatgtggctggtgcaggggaagaagaaggtggagcacaccttcaagaagatcaagcagaccgtgtcgtacgccgccgaggtaacggcatttgctgacaagggtaagctgagtaagatcaccggcgtaaagacaaaggagctgatgctttggctcagcgtcgtcgaggtgtacgtccccgaggcatcgccagagaaggttaccttcaagaccggcactggcctctctgacacctttgatgcctctgcctttgcgttaggagagtaatcagctgtcacatgaatggttggcttcagaaaatgttgagtgagctgcataatttttcttttgtatttgtaaacttccatgtatgtatcatgtatcttgtgacgaatttgtacctaggagtactcatactcattcatgggctagggtcattgcaaacctttctacgcaatttcttgttctgcagtatatataagcgttatagaaaaaaactccgccctcacagatgaggtttttatattgaagcagatgcctttttattttaatatataacaagtgcagctcactctcagggatggtaaaacaagaaaccaaattatttttgataattgtaattctaacaactttatgcagtcttactcgtggaatttattagcgtcgaccttggagtcaacttcagtactgtgatggcaagaaagaatgcatcgccttttcttgtcgtacgttacagtcggtggcaatggtcttcttagtctccatgagtcggcttatgtatttaggattataaagtaattttatttggcttctgagactatttgtcgggtgtcataatccacggtatgcaaagtaaagagctaagaaccccacttttctcatttaaataagaagcccccacttttcccctttaaacaagaagtctgacacagtcactccttgcttcgtccgaggctggaccactaggcttcggaggagctaagact

SEQ ID NO: 4655 - DNA, 12089 bp, Sorghum bicolor
cgatcatacacatgcatatgcatgcacgtccaccttaataatatatagaggacctttagctttgcgccgaatggggcggctccgttgtgacttgtgaatgaatctattctctctctagtgtgtacttatatgtaggcatatagtatatgtcaatatatgtcgctctctaaccctcatcttttctatcaatttatgatatagtacctctgtcctaaggagagtgtcttgcatagggtttcgacgtttcgtattagtcaaattttcttaaatttaactagatttataaagtatattagcaaattttgtatctttaaataaatttattgttaaagtacaacattcaatgtaccgttaatctaatgatacttattatgaaccataaatattgatattctcttgtatatattgggttaaagttaaaaatatttaacttctcgtaaagtgagaatgacactttttgtgcaacggaaggagtatatataggttaagcctagtgattgcaatgacaagtattccttctttccacatatgcacgaatgcatgcacgcacttataaagactacaaaaaaatatgtattgtttaatagattattaagagaatttccaatagtttttcttaaacacactttataaatcctcatttggagagtcattctaataaaaatcactatttatatctctcgatgctccaacaacttccctatatcttaatccgtcactttggaaatctagctctagtctctttggcgagccataaaccagaaataaagaatgggaatatttattagagatctagttgaagaagatggtggagattttttttgcactaaaatctatatattcttctcgatgcaaaagaatataaagagactcttgaagttgttcttatctcatatcatacctacatgtctacaagaggattttgagaggcagttcttttttatttaaagaggtaggcagtttgttcaccaaaatctatatttctatgattctattaatataaagagactattagagtttctcttatcttgaatcatgcatgcgctatgcactacggcaaaagaggaagacatatcggtctagcccagtcttttggaggtgtttatagtcgtctttattagagcaactccaagagaagagctatccatgttatgtattctatatttggctattttgttagagaaaagagagtccaacagctattgtatttggtttgctaaaatagcaagtcatctattccggagttctcgcatggtaaatatagcttgcatgttccgctagccatatgatttgtcatatagaaagactgttggagatttttgttttttacatgattttctattttagagaggttggctaaatcttgaatttagccatccatttttatcaactctcttggagttgctcttaagaggtacttataggagcaacgtgtaaagggtgtgtgtaggtgtttttatatgtatatacgagtgtacgtacatgtatttcagtgtgtgcatctattcataaaatgtatttacataaacagaatctgtactgaaatctttaatattctccttttcttttaggaaaaatctttattattctcctgactaaacttcacattacacaacatggcatcacagaaggaccatagaaatttcacatctcttgtttaacataacatgggcccatagtagatagcccactaaccttactttcagaatccgccaccatacctcttaattcgtaatgggccagtttttactcctagaaccactcttgcaacgggcctaatttcagcctactttttttttgtgaataattttcagcctacttatattctgtttgctatccagtcggaagcccagaagcactggaaaatatctggtttcccgtgggcccgggagtacgccaccgatggcccacccaccaggccagcgcgcgtgggcattggggcagcagcggccaccgactagtgggccctacacgtcagccccacgatccgcttcccatctgatgctcctgctccgccgcggcgtcttcgtcctcctctcgtcgccctcgcctcgcgcgccgctcgcaaaacctctcctgccccaacgcccgcccagaaccctagccccgacagcgcggcagctcgtggctatgtctgcgccggcgccgaccccggccccgtcggcgggtggggcggggacgatgagccgggacgcgttccgcgcggccgtgaccaacacgctggagcgccggctcttcttcgtgccctccttcaagatctacggcggcgtcgcggggctctacgactacgggcccccaggttgtgccgtcaaggctaacgtcctcgctttctggcgccaggtactgtactactacaccttttagagaaaggataaggtgtctactggatgcactagcacccaaaccattcttgttctgctgattataaaccttggtaattgctctggttcataagcttgctgattaggagactacattgatttcctggattgtagaagattaatgttctcagtttcaatattttaggggtcacatactgaaaattgtcatgcttatgctctataaaataatcaattaaatctagtgtattgtgatgttagtgggaatggtttccatcagttggtactgagaagtgtatacaagtcaaaagtacatgtattgtttaggatgctctcaaatgtcaatgtgtattgtgattttattttagtgatatctagatgaattattttttattgctgtgactaaaggaattcattataatatatttatgagtaaactataccagaactacaacttttacagtaaaattatcacaatctgtgccacctcatggaactgcacatttaaagtcgattgtaccttgaaactacatatttaaatctatgtatcagtgtcatcacactgaatattcagtatcaaatagtattgcaaaaaactacatatttacagtcgattgtattttgaaaccacatatttaatctctatgcatatgtgtgccaccaaactgagtatttggaatagtatcacaaaaccagagatttagaggaaagaggagtggctgtaggtgcttaaatcttctaaaggaaaacatgtactttggtagttttgtggtaagctgacagttctgcaataaggtggcttaaatatgttgtacctgtagtctggcaaaatttactcaatatttaaaatctcaaacacatttaagggaaggggtcttaattcaagttgcaactttccaattctatgtatggataataaccagatgctttcaaatctggatcgaccccattttgggcacatttaaaccgaaaaccgagcaccgaaccgaaccgcagcgaaccgaactgaaattttggttttttcggtcttcggtttcaagatctgtgaactttggtgttcggtttccaggtgcaacgaaaccgaaacaccgagcaaccgaactttctgcagcagcaaaagggtaaaaccagcgaacacagcaataaagccaacgaatgtggccaggggcagcctagcccagtaaggcccaccatagtctaagtctccaactagtatagcccagcccctagttggccatctaccgcacacaaccacgcactagcaccattcgttgtcaaccttatcccgatattggagagtggcggcggcggcgtgacaccagactgggatggaggtcgcaggcctgtcgatctccagccgccacaccgcagttgcatctccaggccacagcgggccggcggcagtggcgcagcgcagtcacggaccccggacacgccgacgggcggatggccaatgaccgtggctgcggacgccggatgcacgcgggacagggtaacaagacaacggcagagcgtcgtgagcgcggcaacatagcgccggggtcgcggccgtggactttggatggggatgagcggatggcggcacaagcaccctcgtcaagctctctggccgtggacatccatcggtttgctcggttagaaaccgaagaaccgaatttaaaactgaaactgatattgtcggttgttgatttcctgaccaaccgatcggttcctaatttttgaaaaacgaagtttgagcaaaccttataaaccgacccgaactatcggttaaaactgaatgcccagggcgagatcgacctgaacttatgatttcttatattagcacggttgttaaaaatgtttccatttccatctgtggtaagggggaaaatgggaataacatgtattgcataaatcatgacatgggacatgcagtaaagtatccttcatgtaatcttttatccaaatgtatattggactcatatgaggtgaaaaccaccttgctttgaaaagatgaaatctgttgcctggagtgtccagttttattgcaggtagtaacaaaaacttctacaaataaacactgcttgcaataagatcaaaatatatttgcatccttaagttcttaacttcttgaaagttaatgttgttttcacttgatttgttccagtgcctgcatgtattagctatattgtcttcagtacattatgagaatatactatagatcactgcttactaactactcaacttctttattagcattttgtattggaggaagggatgcttgaggttgactgtccatgtgtgacaccagaagttgtcttgaaagcctctggacatgttgataaatttacagacttaatggttaaagatgaaaagacaggcaactgctaccgtgcggatcatttgctgaaggacttctgtaaggataagcttgagaaggatcacacattgtcaccagagatggtacaagaatacaatagagttcttgctatcctggatgatctctctgcagaacaattgggtgctaagattaaggagtatgggattgttgctccggacaccaagaacccattatcagatccgtaccctttcaatctcatgtttcaaacttccattggaccatcaggtttgagcccagggtaagacaataatggctgaataggttccactatatttccactatgttcattctagcttaagcatatctgcttccttggttttgcaggtatatgaggccagagacagctcagggtatatttgtgaacttcaaagacttgtattactacaatggcaacaagctgccatttgctgcagcgcaaattggtcaagccttcaggaatgaggcatgacttcgttaaccttctgttcatgacctgtgtttttttattagcatgccttgtagtatttagttcctcttcttcttattaacatattttccatcataatcataaatgtaatgtggcacatcaaaggttatcatgatttgtttggtacatttaaagacatcttctatttactaggtatccatatagtataaaatattatttgaataacctgtttactattttggtaaattggaaagtaaaatgggtatgatcacattaattgcctttagctgtaagcctgtatccgtagagtcctaccaaaatactctcttgactgaagcaaattccttttgctagatatctccccgtcaaggccttctgagagtccgtgagtttactttagcggaaattgagcactttgtggacccagaggacaaatcccatccaaagtttggtgatgtttctgatctagagttcttgatgtttccaagagaggatcaaatggccggaaggtctgccacaagacttaaactcggaaatgctgtgtctgaggtattatgtccagatatttcttggttattattttgacaatatgttatctgagctcttctcttgctactattgatatcattctctaaacttgtagtgctgtttcaaagtaatttatgctacaactgcagggaactgtgaacaatgagacccttggctacttcattggaagggtctaccttttcttgacacaacttgggattgacaaagatcgtctccgtttccgtcaacatctgccgaatgaaatggctcattatgctgctgattgttgggatgcagagattgaatgctcctatggttggattgagtgcgttggaattgctgataggtctgcctatgacttacgtgcccactcggtatgtatcagtatcatcatccgtacactcttggaattgctggttggttgttcattatggagcaaggagtggtgcatctcatatttttgaattaaataaagttacttttttaaaagcccccatccttattatggtcaaatatttattgctatgaaaaaggtagccttctttgttttagggaaaaagtctacttacccccctaaactatcaacgtgtgtctaacctaggctctgaagtacaaaactaggtaacatacactctaaaatttgaaaaacagggcaacgaacccctgtggtggttttggtcgctggtttcggtgacgtggcagctagcgtatcagcggtatggatcccacgtgttacctggttttgtacttcagagcccacgtgtcgtccaggtgtggtggaggtggctggcagatggatcccacgtgtcagacagcccacaattagaggaggttgtgcgggggcccggccgctcgaggagccctcctcgtgagtttctagcgtgcccacattccagacggttagttccacgtccatggatgagggattcaatgaagatttgcaattgctttgcaatgggggagaacggagaactgaccgtgagcggaggttgctgttgctgcggcaggagaacttgcacgtgaacatgggctgcttcatgcttcccttcacttgaagcacctgtgggctacactccggctcgccgtcgaactcgaagacgaacctcgggtctggctcaacgcggacggtgatgttaagctgcgccctcgccgccgtcttgccgtgcctggagcggtgcttgccgatggcgacccatccgctgtggaagacgatgggcttcaccatagcggccccaaggtcaagcggaacgacgagcttcccaatcagcctgccggagttgaccccgcctctgcctctctcccacgccctccctcaagtctcgcctcgccgcctgggacaccctcttcctcctctccttctccctgaccctcgccaagctcaccgccctcgccggctacgactatgtcattgtctgacatggagcacgggctcaacgggatccccgaggcgctcgcctacctcagcgcgctcgacgccgtgcacacctccgccatgctccgcctcccggaggctagcgtcgtctgggccaagaaggcgttggacctcggccccgccagcttcatgctccccgctatcgagtcccccgtggccgccgccgacgcggtctcccactgccgctacccgccgcgcggggtccgtggcaccgcgcaccccatcgtctgcacctccgcctacggcttcgacgactccttcctctcccactgcgaggacgatacgctcgtcatctgccaggttgagaccgtcactgggggatcgcagagatcgacgccatcgccgccgtcgacggcttggacgtcgtgcagatgggcccgctcgacctgtcagctagcatgggatacctgtgggacccctgaactatctcgtgggctgcctgacatgtgggacccacctgccagccacctccaccacacctggacaacatcttcgccagtatggaataccgctgacacgctggctgccacgtcatcgaaaccagccaccaaaaccaccccagggggtttgttgtcctgttttacaaattttagagtgtaggttacctggtttgtacttcagggcctaggtgaaaggtcctaatatggctagagggggggtgaatagcctatttaaaaattctacaaactcactagagcaagaggttagtaaataacaaagccaagctttttgctctagctttaaaggggtgtttgcaagccacctatccaacaattctagttgttaagatcactaggcacacaagagctatgtcactacttacactagagagctacctaaagtttctatacaagtaagtaagctactctagtttgcgggaatgtaagagagaaggtttgatctttataccaccgcgtagaggggatgaaccaatcaataaaatgaagtccaatcaccgggagaaatccaatgaacaaatacaatggagacaagcaatttttctcccgaggttcacgtgcttgccggcacgctacgtctccgttgtgtcgaccaacacttggtggttcggtggctaagaggtgtagcacgaacctcgtcctcactaggacaccacaagaacctacccacaagtgaggtagctcaatgacacgagcaatccactaatgttgcctttggcactccgccgaggtaggcacaaacctctcacaaacaccgggagatggccacgaacaatcaccaactcgtgccaaagctcctccacagctccaagccgtctaggtggcggcaaccaccaagagtaacaagcaaacccgctgctcaacgatcactagtgccactagatgctcaaactctaagcaaatgcaactaggatctctcccaatctcactttggatgaacaaatcttgaacaaggtgagtgggaagtgtgggagtatgctcacaaggtgtatcaacaagttagagagtcaagagagtgagcatgaaccggccaaggcatataaatagaagtcccaagcttcaactagccgttggcagtttatcccactgactgcgttcacaccggacgcgtcctagttcacaccggacgcgtccggtattgaccagaccagcgtccggtgctcctgaccgttagaaaagtagtcgttgcctctgacactgacaaggcaccggacgctcacttttgaaataccggacgcgtccgacctcataccggacgcgtccggtatgcatcggacgcaaactcagagagcgtcgcaaaacttgagtcaacaccggtcgccacaccggacgcacacaccggacggtccggtgtgcaccagactcacacccagagagctctgcaagaggagtttgcaccggacgccaactcggacgcgttctagttcacaccggacgcgtccggtgtgcaccgaacgcaaactcagagagtttcaccgagaaacgaactcaccggacgaggcacaccagactctacgcgaaaactgtttccgcgtccggtgcctcaactcggacgcgtccgacctcataccggacgcgtccggcctgaacgcgctgcacacaaagatttctaacttcttcccttgcttccatgtgccaacaccaaagtgtctccacatttgtgcacgtgtgttagcatatttcaaaaaacatttttcaagggttacttagttagctcactaggtcctaatgcacatgcaaggaatccaatcacctagtggcacttagacaaccgttttcacgagattacccctcttaatagtacggttatctatcctaaatgtgatcacaccctctatggtgtcttgatcaccaaaaccaaaaccctaagcaatacctttgccttgatctccatagggttttgtttttctctttcttcttttccaagttgagcacctgatcatcttgtggtcatcaccatcatcaccatgatcatcacttgctccatcacttggcatgtaccaacctcattaagtctacatacacttagtatagaggttagtactagggtttcatcaattatccaaaaccaaactagggttttcactaggttagacacacgttgatagttcaagggggtgagtagactttttcctttgttttagtgttgtacgattaaatagttaaacaataattgagtttaataactaaagctctgactttattggccccattctgaaattttcttttgcatgcacatcacagtagaactcctttctaatgttggtattggacaggataaaagcggcgagaaacttgaagcacatgagaagtttgcagaacccagagaagtggaggtgagttttacatttccttttattgtacactaatgttctcagtcattattttcctctaaaaatgtttcagtcattaccatagctatgaagctgtgatgttttggtcagtttcttaaattatctgctttgcaattaacaagtttcatttttggcatattcagaaattagttataacgccatcaaagaaggaacttggtcttgcattcaaagggaaccagaagatggttcttgaatcattggaagtaagtttcatacctgcattgacttgttatattatgttcctgttgcgttgatcttcatactttattatcttcttacaggccatgaccgagactgaagcattggatatgaaagctgtgttggaatccaagggggaggttgagttcaaggtgtgtacgcttgggaaggatgttaccataaagaaaaacatggtttcaattaacatcgagaagaaaaaggaacaccaaaggaaatttactccttccgtcatagaaccatcctttgggattgggcgcattatatattgcctttttgagcactgcttctaccaaagggctggcaagacagaggatgagcagttaaacgtattccgttttccccctcttgttgctccaataaagtgcactgtctttccattggtcaagcttgagaaatttgaggttgttgccaagaaaatttcaaaggccttgacagcagcagggatttcacatattatcgacatgacaggtacattaccaaataagcagacttgcgcttatgttctatggcagtttcaactaaattctacttctgatacttcggcattccctccattccaaattataagacgttttagcttttctagattcatagcttttgctaagcacctagatatattatgtctagatacacagtaaaaaaaaatatgaatctagcaaattgtacatttaaagatgtactaatagataaggcatagctttccatgttttatcagttgattttttaattgttaatgtatctttagttgttattagttcagttttccaaatcatatgctgtgggactcagatgtgcgtgctattctttttcagaatattttgattgaacgaaacaaggcatggaatttgttctttgagttgtggtgggtccaatactgcaacgaaggtctatagtttcaattgttctgatctgtggatgcttttgttacaggtaatacaataggaaaacggtatgcaaggacggacgagattggtgttcccctggcgatcacagtcgataacactataagcgtgacggtgcgcgatcgcgacagcaaggaccagatccgcgttgaggtggacgaggtggcctcggtggtgaaggaagtgacggacgggcagagcacctgggcagacatcatgtggaggtacccggcgcataccacctcggccgccgacgaggaagacgcggagccctgaagacagcgctggcacaacaccacccaacgatcgttggtccctgatacatttcctcgcttgcttaacagagccagactgcgttgtcgtgtaagcctacagtagtcagatattagcttattttgttatgttggtctcgtaacttctgctgcttcataccatctcgtaaattccttgttttacagtagccagattcctgcacattttgatttccacaaacaaaatagcagcttctttgttagttgacctcgtaaattctgccacctcatttcatcccgtgtcacccttgatgaactgtaatgttttttgctagcttgaaatgtgcacggtcctggttgagtagtcacgggagagccagcagaattgcaggtccgtggtggctccacttgtcattggtacaaagcctctctcttttttttgaaagcaggctaggcaaagttttaggcccaataaggtagagccaaaagcccacacagccaaactgggctgctgatattgggccagcgtagcccaccgcccccaatatttttctccgcttctctcgtttccaccagtctctctctctctctcttcctccgtgcgaccaggcgcgaaccctagccgagattagattggaggcgagcgccatcaccggaggagcaggaggaagaggacgacacgatgctgcgggttgcggggagaaggctctcgtcttccctctcgtggcgccccgccgcggcggcggccaggggccccctcgccggcgctggcgccccc

SEQ ID NO: 4656 - DNA, 3350 bp, Sorghum bicolor
actctctatgggtacctaaattacaattgaggatgcattattatatccggattcaaagtgtaccttattaagttatagagatatccgtcaaaatggtttccatatagaaacccttgatgacaataatgaggaaattctccttgttactaaaaacaacagatatggcaaatgaattgttgacaaaattccctcttttttgtccgaattgtactacgcatacatcaaacccgtaacacatgttgcatacaaggtagtttttcaaaaggttgacgcattcagaacttggcatgatcgtcttggtcatcctagtataaggatgatgcacaaaattatcaggaattccaatggtcatgaattaaatactgctaagttccccaaatcttcaaattttatgtgcacttcatgcgctatagggaaattgatcttatgtctatcgcccattaagatccaaaatgagccacttaaatttcttgaacgtattcaaggagatatttgtggccccatacaaccaacgtctagaccgttcatatactttatggttctaatagatgcatctactagatggtctcatgtgtgtcttttgtccacacgtaaccatgctttcaaaaaaattattgctcgagttattaaacttagagcacataatcctaaacatcaaattcaatcaattcgaatggacaatgctgctgaattttgctcaaaggctttaaatgattattatatggttttgggaattcaagttcagcaccctgtcccatatgtcatacacaaaatgttttagcaaagtctcttattaagagaattaaactcattgcaagaccattattacaaaattgcaacctaccaacttcatgttagggtcatgcagttttacatgttgaattcaattgcgtccaactgcatatcatgtagtttccccatttcaattagcacgtgggaatatgctaaagattttccatctacggaaactcggttgcgctttatacgtactgatttcactaccaagcgtacctctatgggtccacataggaaacttggtatctatgtgggatatcaatctccatcaattatcaaatacctcgagcctcttacaggagacttattcacggcctggtataatgaccgcatgttcagtgaggtccatttcctggcattagagggagatttcaagtaccaaaacaaatgccaggaaatcaactggaatgcccaaggcatttcctcctcagatccaagtactttagagactgaacaacaagtttagaaaattataagcttgcaacatattgcaaataacctgccagaacttgtcatgtgataatctcactgacctatttactaagtccttaccaacttctgtgtttcaaaaattagtacatggaattgatatgcggtgacttcgagatttgccaaaattagggggagacatcgtgtagatgccacttataccagcatcatattaggtcagtctcaataaggtttcattagagtttaatgcatattaaatatgctgatatggcgctatattaatgaagagagagatgataagaattttatgagaatagagagagtctcatcctcatgaaacttctatacactgttttcaaaatatggatgtattggaaactgaatcatgaaactcccactgaagatgactttatactcttttctttcacaagttttactcaaaaggtttcttgttaaagtttttaataaggtaatattaacataagcatgtgtcatattttctattttccctttttatacatagaagtcgtccaagttttgtggaccgcagagaaactcaaccaaactccaaattttcaccatatctcaccttcacatgccaatatgccacaaaaccaggtcaaaacggctttgctcctattttttgaatggtcaatacggctttcctcgtcgcccatgcactatctctgcgggcagccagacaaatcttcggtctcgtgattatttaaggacaccctaggccctgttgcgaaaccaggctagtttcactaccctcgtctcaccctccctcaccaaataaggtcctgccctttcccgacattcacaggggggcagaggggaaaacacattcatccggcggccatggcctcgattctggtgacgacgaccaccgccaccgccatcctcttatgcgtcctcttctgtgccgcggcggctaacaccaccgtcgccaacgaccccaacctccccgactacgtcatccagggccgtgtctactgcgacacctgccgcgccgggttcgtgaccaacgtcaccgagtacatggcgggcgccaaggtgcggctggagtgcaagcacttcggcaccggcgaggtcgagcgcgccatcgacggggtgaccgacgcgaccggcacctacaccatcgagctcaaggacagccacgaggaggacatctgccaggtggtgctggtgcagagcccgcgcaaggactgcgaccagacgcagccgctcagggaccgcgccggcgtcctgctcaccaggaacgtcggcatcgcagacagcctgcgccccgccaacccgctcggctacttcaaggatgtcccgctgcccgtctgcgctgcgctgctcaagcagctggactccgacaatgacgacgatcagtaaagatcacatactgttgacgacgaccaccgtggtcgtcgctgacaggctgcgcaaaactacaaatcctcttcagtcttcacctgctggcctacaaatataatggtacagagtcgaacgcatggatatagcagtatctgagaaaagaaaagaaaaaaggaaaagaaaaatgttaactgctgtatctgagaaaagaaaaaagcaaaagaaaaaatgtaacttacagtcctgtggctcttctgagtgctggattcttgcaattgtcacccattcttcgttttaacgtacaagttgcagtgcaagacggctgaaacagacagcaataccagctctggcgagaacttaccgacagaaataaccaacctaactaataataacctgcggatctgaaagcaagataaataccatttcatttatatcggaaatgaataagttacatcattctcataaggactaggcacggccaaggtgtatttttgcacctaaagcacacagcattttgatcacatcgtatttcatgaagcacgcattagtcctaggaggtgctcatggcagagcttatccaagaagacagctcttctcttctctaccacggcttcagatctcccacaggtccggcagtccagttgagatgctgatcgccaggttgtaagtacgtaccctccgggtgagggagcttccgagcaaggccgttcaggatttggtggaacgcatcccttggttgc

SEQ ID NO: 4657 - DNA, 4330 bp, Sorghum bicolor
caacgacgacatggggtggtggtgggctctactacggcgagcaacgtggtggcggctcctttgacggttcgttccgacttatggtgtttccttaatcgaataatcgagtagagtaggacaaccgccgcctcatgattaaccgtgacatgttaactaagcagttgcaaaaaaccgtttcgatcggttaaggcgcaacaattaagatttttgtactagtgccactcaccctcgctaccatgtctctactgtactacatgaaaattgttgttttgtgctacgaaattaaaatgttgtttaggagacattgacacattcgtacacaccatttatatctatttgagaaataatgatgaatgagtaggtgacacatccacaccagaaatagatgctatgtgtggatgtggccatggttgcttgccgagaattttttttttccttcctattattttcttgtatgtatatgttgattattacaaggcgtaaagtatcatactatcatctgtgttttcctgtttcctgcaaattcagtaattcctatatatattacccggagagagtacgtaatattaagcagctatatatttgactatgattgtgcacccatctacaaagccttgatgaaagataccgttccacgcatataatttgaaaagaaggtatcatgatagtataagttgagaaatgcgagcaaatagacgggagagagagtaggagtagctaactagacatgttgttgaggagtagaagtctacgcagctctggcggtcctttccccatctcgtcaatcgtcatgcatgtacagtagaacagtagatatatccatccgcgcacccctactcactctgaaaatagtgcccctctccaaacaacaccagaaatagatgctatgcggtttgttcccgctaatttttcttcctattcttgcatgtagtatgtatattacagtctgaaaagtaccacacaccaacgtacgagagagtgtgttccgcagcaggattagggcatatctgtgttttcctgccccagcaaattcagtaattcctatgtagtaataagcagctatatatgacccgatcatctctacaaactcttgatgaaagataccgttccatgtttgaaagatatcatgtcgagtttgggtgcgaaaaagcgagcagatgacgggagagatcgagtagctagctagctaccccatctcgtcatgtacagcagataatccggccccctactcactcttctgaagtgtagtgctgcaccaacaagagtattatcgagatgtgatccaacggatggattgctgtgccaagttgcaaaatcatcactaatggaacatctacagtacataaccttttatttaatagatatttaattgtaacacttatctaaaactggaaaccaagccgagagtgttttttctcgtctaagtaaaactctctctttttcttttccagttcttcttcaacacgtgggttgtcatgttatttaaaaaagatgctacgtatctgcgatcgaggtcggtcaacggaagagagaatcatgccacgccgtcgtggtcagagctcgccgtcctcctcgccgtcgtcgtcagagctcgctgtcctcctcaggaccatgcggaccttgggcctggccactacgtcggcgttgcttccattggtggaactcctcgaggagggggagagagagacggccatttgtatcgtacccccactacaaactcttgaaagatataccgttccatattcgaagcttcgttaaaaaatgacgggagagggagggagagtagctagccacttagccagacatgtcgttgaggacaaccagccagccaaactatactgtacatcagcttcagtcctctcgccatctcgtcagggatcggagtggatacaggataccggaagatacaatctccctactcattatgctcaagtgctgtacgtaggagcaccaattatcaagatatgatcgaacaggcatcacacaagacaagacgacttgactctgcctcgctcgtcatattgtatatataaccgtcccccatccctggcagaggcactcactcactcatctcttgcatgctcatcggcaactcccgtagttgaaagggtgagctcagaatccttcagctttccttcctgctgctgctgctctatagtttgatgcgtacaacgtatactgtagcacccgtgtttgttagttacccagaaaaagaagcatttcgtttcagatcgttaccaaagcatagattttcacttgaaaggatggcaggagctgtgctgatgctctgctactttctgttcggcaattcgccaatactatttgtttcacatgcatgtttgtttgcagatgggtatactggtgattacggtggacctagactgctgtcgctgtagagccaagatcaccaaagtcctcgactgtctcaaaggtacatttttgttactatctatataaagatgggaatacttccatgatgcaattgtagacagatacaatacagccattcatatggacctagaatgaaagcagagtacgaccacgaacaatccttgctccaagaaactgatatcattcaagctgtagtgcaacgtattttcacaaaataaagaaagaaacaaataaaggtaagacgttggggcttcccagttttgcagaggaaagtatgaacaatcttgctttgcaagattcttctgaaaccaaatgatcaatctgaatctgaaaacgttttagcacacacagtctaggcataatatgaaacgtgaagattaccgaacaatcctgcgtttaattaaataaccataattaagactgtaactactagcttacgaggcagaattctgatctgtgcttgcaacaacaaatcgggcagtcaaattatcttttgttttccaattgatgtgcagaggaattctgcatcgagaaggtggagttcgaggacaagaaggagaagaaggtggtggtggtgcgcgggaaattcgacgccgagaagctctgcaagaaggtctggtgcaaggccgggagtaaggtcgtgaaggagatcatcatcgtggacgtctggccgattccacccaagccacccaagccatgcgatccttgcaatcccaagcctgagaaatgctgtgtctgtgaccactgcaagcccaagcctgagaaatgctgtgtctgtgatcactgcaagcccaagcctaagcaggagcaaaagcctaagcctgaggaaaagcctaaggcggcgacgcccaaaacggagtacaagttcgtgccgtacccgtacctggtgccgaaccctgggatgtgccagagctggccgtggcagtgccctcctcaccagcagtgccagtgctgccagaagcctccttcgccgccgccggcaccgccgcagcggccaccgtgcacctgttcgagccacggtagctgtggctgcggccagacactgccggtctggccaccgcagccgccggtctggcctccaccgtgggcaggctgcaatgttgtcgccgacgagaactcgtgctctgtcatgtgatccatggctacctgcttaacgtcacctgtcgctgttgctgtgctgtgatgggtactggacctccgatatctgaataatccgacactatgttctgtatagtgaagttactgtgcgtgtgcagatgtgtttgcgtcctgcagtgtgttatacgaacgtgttatgccagaatgcccttgttttatagtactggtgtactaccttccaaaactaaactgtaatttgcactttgtaatgtgatattcatgtctttgtacgagtatttcgtaattatgcctgcaataatcctttacttctccttgcgctcaatctgcaactgtaaccggtgccgccatgaaagtcctagagcagcgagcgagacaaagggaggaggaagaagagccaccaatcggttatacgctagtccagtagttcgtgggccaagtgtcatgactgacatgttgagcctatggcggagtgtcagtttgtcagaagaggatgatagtgtacttggaaattagagaagtcaggaaagtttttcactagaagcctgtacggatatatcacctttagtggagtggttgatgttagaatgatggagatctggaaatccaaaatccttctgaaggttcaaacattttttatggaggcttagcatgatagaatccgaactgcttgacaacagaagagaaggaactgggatggaacaacagtatgtaagttttgtgggaaggagtcgtctgtggatcacttgtttcggtgtcccatttgttggggatactgtaattttttatttgctctaccggggggtgtactacaaaaaaaaaa

SEQ ID NO: 4658 - DNA, 3833 bp, Sorghum bicolor
catggttttttttggcagcaaccggcaagaactcatcagcttttggttcagctgatattgaataagctagaaagcaatattgagaagtttgcttttgtatatggttatctaggattaccaagtttacattgattttgtattctacctgtttgcttcatctctatccactaaccccctatttccatacaaatgtcgattctataacttttcaattagtttgcaagtgtgctgatatagcagaacaactaactgagatgccatttgcagagtctataatttttccatatctctatgccacaacatactgatatagcagagtctgctggaggtctagctgtagatgccatttgcaagtgtgacatgtaaggtaagatatttccatgatcatttttggacaaacatgtttcttttgtctaacgtggatggctgtcatatagtgttattcttgcaggcattaagcagagcagttgctaggctagcctgactaaggtagaacatctgtgagcttgaaacaaccatggaactatgtttaaatttgacattttatattggacaggcatggtttagaggactgaaacttcagtttatcaaattggacaggcatggttcagggaagttatagaagaagagtcctcgatgacctcttcccttgagcaagtgcttcaatgcaattctgaaggggagttccttgagcttgtgactatggccttggatttttgccactgaactgtatgacatgatgcatagctggtactttcatggttgtttccatgcatggttcacaaactgaaaactcacaaattattacctttataggaatattgaaatatgaattggcaagaaggaaacaagggtagcaaaagaaggtcgccaagagctttgttctctgtttggagttcaatatcactaactgaaaatatttgaaagcgttgttattaattcatagctaccttgtgaggttatgatgagtgaatgcttatctccctttttgcaaactgaaagctattacttagtggtgcatgctgttgtagttctacacattctgaattgtaaacatggatgttttgtaacttgttgatttagttatcatgatgtcgtaaaacttccttaaaaatgtctcattttgtgaatcagttcttggcctcttagttacttgagcatgcctcaaagtcgatatgttaaatttattatgtgacaaaatatttggttatacaatatatgagacgtgaatcttaataaattcgattgttcctttgttatttacaaattgtatcttagtggtgatatgaatattttggttgcttaatttgcatttccccaaattttatgaatattttatgttagatggttaatacgagaaataactttactatgtatttttatgtaaaagtgtttcgcagattatatacatgctcaaatataattgtataaaagttaaactatggaataaaattattggttcttttcatatgcatccctagataaaaccgtagcattagcacggacattatactagtggtgttaagtgtggtacatagacattggattgtgtatcctaacaaatgacaagatgaacgcaacgcaacaacacaaagacaacatgccatttactcatgtttccatttatcgaagtcatagtatctgcgaaacatataagatcaagttatagcttgcaaatggttcatggtggaacccctacttagataaaactattgatgaagccagggattcgatagtatatgacacgcaaatgaatgaattgtaaagaaaacatgttaaatcgtactaaatattgaacagcataaggttactgcacaattgcattcgccacttttctaattatgtatgcatacggtttaggcggtggaattttaacactaccaacgcccatgctcgttggttcccaaaccctaaccgtggcactgctctgtatatagccgtcgcgcctgcaaccattggtacaagtaccctatattcattatcatcacttgcccgcacttcaaagctcaatcccttccttgcgtggcccttgcgtttgccatggccatgcaagcgcggcaccactcccacgactacttcctatcgagggccggctccctgttcttggacgagtacgccgggtgcgtgcccctgccaacgtcgccggcggtggggatccgggacatgccgctgctcagcgactttgcaggcagcgagcttagctttggctacagtttcctgccgaggaagcgggcgcgcatggaggatcaccgcgttgttctgcccccggcggtgatgcaggggctggtgcaagtgcaagtgcaactgccgatgacatccagtaacgtgatgggttccggcgccgtgacgtccacaagtgggagggagatcgacgcgctgctaagagtggaggtacgtacggtacgtgctggtgattgatcggaatcgacttgctgattccgtggaacagtgcctgatttgctttaaactatggttctgattgattcggtgttgcgtagagcgagaggatgcgcgcggcgctggaggcggcgtggcggaggcacgcgcgggcgctggcgtccgccgtgggtcgaacagcggcgggacggatgcgcgcggcggagtcggagctggacggcgcgctgcggcgcaacggggagctggaggagacggcgcggcagatggtcgcggagtgccaggcgtggatgggcgtcgcgaggagccacgaggccgtcgccgccggcctccgcgcctcactcgaccagctcctcctccagtcgcccccctgcgcggtggcgactggcggcgcttgcgagggtcatggggagaccgaggacgcgcggtcgtgctgcttcgagccaggctgctccggcggccgcggaccacagggggcggtggaggagtgcaggtcgtgcggcggcggcgaggcgtgcgtgctgctgctcccgtgccgccacctgtgcctgtgccgcgcgtgcgaggccgccgtcgacgcctgcctcgtctgcgccgcagccaagaacgcatcgctccttgtcctggtctcttgatccgaaaaaatttcggatttcgctactgtagcactttcgtttgcttgtggtaaatattgtccaatcataaactaactaaagtcaaaagattcgtctcatgatttatagacaaactgtgtaatatatttagtgtttcatgcatgtgccacaagattcgatgttacggggaatcttgaaaactttttggatttcgctggaaactaaggtcttgtttagttccaaaatttttgcaaaacaggtactgtagcactttcgtttgtatttgacaaatattatccaatcatgtactaactaggctcaagattcgtctcgtcaatttcgaccaaactgtgcaattagtttttatttttgtctatatttaatatttcatgcatgcgtttaaagattcgatgtgacggagaatgtgaaaaattttgcaaaattttctgggaagtaaacaaggcctaaacaaggccctactctacgaacaagcgggtgatgatggagctgccattgcacagtagcgtgatggatgaggtggtgaggtgacacgccacaacagctgatggtggtgccttggatggcatggcatggcatgggcgacgacgaaagatcgctggatgggcggccacgaacgtacgccgtgcaagcgacctatgaattgaacagcaagagtgcagtacggaggaactgttggcgaaacaagcgaagcacatgggctggcatggcggatcacactcatagcagcagttgtatacagtacagtacgccggaatgtacaaggcaaggccgtttatgacccgtcagatttgagctcgacaggta

SEQ ID NO: 4659 - DNA, 6802 bp, Sorghum bicolor
tccagaagccagcgtccggtgagtgttttctcagcgagaaacactcccgcgacttctccaatttacccaccggcgcaatagaaaaaatgcacttcattttctcgaaaagcgccgaatcccgccgagcttgcgaggcgggagggagagaggaacccatcctctctctacccttcaaactccacctctttctcaaagtgtgccaacaccacaaagtgtgtaccaacaagtgcacgtgtgttagcattttcacaatcattttcttcgaaggagttaagttagctcactaggttctaaatgcatgcacatgaacaatgacacctagtggcacttgataacctcttagccaaagaattcccctctttatagtacggctatctatcctaaatgtgatcacaccctctatggtgtcttgatcaccaaaaccaaaaccctaagcaataccttcaccttgatctccatagagttttgtttttctctttcttcttttccaagttgagcacttgatcatcttgtggtcatcaccatcatcaccatgatcatcacttgctccatcacttggcatgtaccaacctcattaagtctacacacacttattatggaggttagtactagggtttcatcaattatccaaaaccaaactagggctttcaagggttagacaaggagtggcccgtgacatctaggggattatcggcagctatcacttatgtatggtgatgtcttgggccatattgggctaggctactaatgtgcgctacgaagtgcagtctgtgaaggaatcttatgctcgatgatcaatgttctcctacgtaagatacgtctctttagtttcccgattcggttaagaaaaccgaatagaagatggtagcaaaaccaccagagctaaagttaggttcccccctcctcccgctgttacagaatgtagtagttgtaggaatatagcctaataagaaatgctatttttcttttgattattttcatattaatctaactattaaaattataatttgtattaatagagtctacttgatatttttttgttattttcttgaggtattaagtagtatcaaatttattattagtgactaactgctcccacattaggcaaattggtgtcttataaaagttgctcctagctccgccactaagctttgaacttttcaagtattaagggtctgttcggtagagacccaaaacatagctccagagcaggtgctccatcacggagcagctctacgatggagctgagctctcaccaaaccgtttggttaagcttcaactctaagttagacttatatataattactaaaacacaaacatgggtcaaaatgaaaaaccacatcttcttcctaaatccttgtttagttcacgaaaattttttgggtttggatactgtagcattcttgtttgtatttgacaattattgtctaaccatagactaactaggctcaaaagattcgtctcgtaaattatagataaactatataattagttattttttatatttaacgctccatgcatataccggaagattcgatgtgatggagaatcttgaaaaaattttacaaccttaaatccggaaacagagaaaaccaatatttcggttctcaggtccaacccaaaccattttttttttcagtttcaaacaagtgccaacgcgagctaaggctagttcctcatctaaaaaattttcatccatcccattgaatatttggacacatacatagaacattaaatatagataaaaaataaactaattacacagtttggttgaaaatcgcgagacgaatcttttaagcctagttagtctataattagccttatgtgctcctacatgtactaatgacagattaattatatttaatagatttgtcttgcagtttggacgagctagattacacccacggcctaaaggcccggcggcgacacttcctgcgcgcgtgcaccgtgcaggcagccgcacgctttttacacacccaagtttctaccccggccgcagaaaagggagaagcacaagcaagcagtgtcattatcgtggtggctagtgacatggttagatttggtatatccaatcagatcacaggcaggaagcagtcagatctcactcacccctcaaaaaaaaaaatcaaaaacaaaaacaaagaaaaacccggtgaatctcccgaatctgttgcttccctctctctccgtcgcccaccaccaccaggccagcacaatatattccccgctgcggccgcagaccacaccttccaccaaatttccgtccccccatatccaccgcaccacaccacggctgtcccttcctctcctggttctccagtctccactcctccgcctcaacagcgctcggctattcccggattgcggcttggggttggtctggtgattggcggaggtgagcgtgcgaatcgtcgtcccctctcctacctcggtccgcgttctgtagattagatgcgtatgtagttgcacacgcaactgcaactgcaactgtgatctcactccacttgcgcggtatgtacgctgaattcttgattcgtgttctgttctgctgcgataggagggacttttcaagaacgggcggcgcggcggcggcggcggcgcttttttcctgacgcaaacaaattgccccggtctcctgccttcttgctggcgcgcttggggccgtggttgggctcaggaatggggggaggagagcaggggctgcgtcgcctggcccggttcccatctctctgaacttagatggatgcatcggtacgtctctgtgcctctcgtcgcttttgcctgtctgcctgatcgtcgttcttcttctcatgtgtgtttgtttgttccgttctctttgtgctgtgctgctgcgtaggtgaacgccaagaagaaggttagtttctgtgggaacactggccacagccgctgcggtgaagttcatttagctgccgccgtgtgctccggtcgtatgcgaagcaaccccttctcacttcaggttattgtgttctctctgttccccctacatatgtcttgctcaagagtacatctctctacgctctgactccgaacgatgttgtttttgattgggaggctatcattttccttcttttctccagttgtatttggatcttgtagtattcatatttcttcgcaaactgtgtccggtgggtcatatctgcttgcttagcagcaagtactgccgagtttagaactggtgtatccactttttgataacaactaagagggtagtaggtttgtacaattcaaggtggaggaggctgtgatcatcacaatgtccatggcgtttgatttctcatataaaagtttgtggtgcaggaacatgcgaatattttacaacctggacaagtcaaacttgagttttcttattttgttcatggcgattggcacctcatatgtaatttccaccctcttaaatccaggcggaaaaatagtcagacaaacgcacattctctgtcctattgacttggtccaaacctaaatttgcactcttttagggatggaggtagtaccatgttagcaggaaggaaggcttcactatctagattaagggagcctaacttctggcctctgcactggctacggatgcacatgaccactaaacttacaagtatcacacctggatttgaaccttgtggactgtcaaatatatttatatattaaaacaaaggatcaattgcactgcaatcacaaccgtactatcagcagaactagagaagcagccctctgccttgttgagatgccatcctatgcaattcttgtgcacagatctacagatttagtaggctggaacatattaatttacaatcaccttgctattagcttatcaaatagtacatgacctttttttttgttcttttacagcggttttaacactaaagcaatgatgtgagtattgcaggtttggtttgcatttccgttcaagtataaaggaagcagtatttggcatggcatttgaatagcattggaacctatagaaaaaaagtgttccagcagtattacgttacactggtgttgtactgttaaaaaacatggtggacgtagaactgttctataaggacactagcgatcacagcatcagctctgaggaagaagatatgcttatcaggagttgtagcaatctcaatgtgagttttggataccattgtgattcttctcagagcttttctcctgaaaatgatcatgggaatggcatttctcctaagaacatatttgggactaataccatgatcgggtcacgaaatggctcatttacttgtttatctggtgctgctattagtgcaaattttacactggcaaacacaaatatttgcaatggtcttattggtgaagaaattttaccagaactagattctccaaactccttcagaaaaatcgtttcttctccatcaatgtcaagattggactcatactccacctcacaaggcagccctgtgtcaactgagagctctatatttgagatcagtaaaaatctttggaggtccagtgccccaacaactgtatcatccaattttctgactaatacagaggtgaaaatggctggcggagctgctggagaggatagagtccaagctgtgtgctcagagaaaaatggatggctgatttgtggaatatatgatgggtttaatgggagggatgcagctgattttctcgcggtaactctgtatgataacatagtatattacttgtacctgctggagaatcggataaagcaacaaaatggtttatacaattcatcagaaacctctctcaatggccttaaaagcgagttaacactagccatgagaaattcagaaaatgaagacataaaattttctgaaacatttcgagctggtgtgctgaattgcctttctactgctgttgagcaagctgagaatgactttttatgcatggttgaacaagagatggatgataggccagatttagtttcagtagggtcttgtgttctggttgttcttcttcatggaacagatctgtgcatcttaaatttgggggacagtagagctgtgcttgcttccatgccatatgtacaaaatggtgctttgaaggctactcagctgacagagacccactcgcttgaaaatcctttggagtaccaaagacttttagctgaccatcccgacgattcttcagttgtcaggggtaacaaaataaaaggaaagttgaaggttactcgtgcttttggagttggctatctaaagcaggtgacaaattactcttggataagtgaataaaattcgtatcattgttacagttgtaactaacaccattgttttttggtcattttgcagaggaagttcaatgatgcactgatgggcattctacgagtccgcgatttgagcagccctccatatgtttacacaaatccacacacattgagtcacaaagttacagatgatgacttgtttgttgtgctcggtagtgatggcttatttgatttcttcagtaatgatgaagttgtttggttggtttatcaatttatgcgtgataatccaatgggggatcctgcaaaatatctcattgagcaacttatactcaaagcagccaaggaagcaggtaccctccaaattatattttgaatttttatgattgaaatatcaaacagctaagtggactattgccttgcagatcattaatctatgagtcatctgcacaattcattttccatattatattagaagcatcaggatttgtttgatatagttttgtatcttttccccgcatgtaatcagcatctttgaaattatttcagatcatgcagtcaacctgcatcaatgctaactcagcaactcctaactgctttcttcctattttcccagctttaacagccgaagaattgatgaggatacctgttgggagtaggaggaagtaccatgatgatgtgaccgtcattgttatcatccttggaaatgcacagaggacgatgactgcatcaacttccttgtgaaagaatggagagatagagagacgggctatcagctggtaaatttttgtgggtgtttgcatatgtgcctgtttcaaattacaaggttttttttttgttgagaatggtgtggtagtcaacaaaccaaataaaaatgtacatattgttttgaaacaaaaccttgtgttcaatcacaaggtgcacatggatttgtttgacctacttttgtacatggatcaaacatggaggctcgtacttgagctaatgagtccatgagcagagtggtagatcgtttcagtttctgattgccaatctttctctgctaagtatttattttttgtgttaatcgtaaatttatgactcatggtgtcaacttgcttgaattgaagtctgtggtttttgagtccgacgatattgtcaaatgtttatatacttccaaaaatgaaagggcaaacatttgagatgtgtggtccatgtggactagaatttggaaactatgcaaaaaccaaagccagtccagtgcagaggatttactgatatcaccagccactaattccaagaagatattatgtggtgcgtgatgaatctaagcgcacataccacagatccaccacacctctagctagctcttttgtgctttctgtccacaattccatgccgctgcgagcaggcaaccatctcccaatcttctgcattgaaaattgcccatggacagggacagcgtcccgcggccgagtctaacctggaatacaccgctgtcttgctccgccaaagtacaccagtcattaatccttcagttcttgcgtgtttttgtgcatcaatgacagcgacgtcctggttaaaaactactgccaccacaggatcagacaaaaatagaaa

SEQ ID NO: 4660 - DNA, 5876 bp, Sorghum bicolor
  misc_feature (5431)..(5713): n is a, c, g, or t
ttctttatcaatgcaatatctagggttttgctgttggcggcttggggattggatcatggtaagcacagtacgatcggtacggcgcggctgtttggcgcgggatcgattggccgcgcgggaaggagtgccacgaaacaaaatttccgagaaaaaaaagatgatggacttggcattttgcataacggttggagatcacccgattttagccttgccattttcatttgggggtttacaatttgcctaaaatgcataacttcaaatgcataatggttggagatgctctaaggtaatgttaatcattcttttttcaattcattcataagcacagtgcaaagcatcgaactatgagtggtgcgtggtaggtcgatcactaaattttattttttgatttctttcatctagagagtagacacctactggagttgtgttcaaagattaaagctacgtcttccacaaatcattctagaaaatttgaatcgagttggaaaaagcgtaagaaaaaacagagactagagaaattagtcaaatctcaggcaggagctatggataggtttatatatttgactatatttttttctaggctaataggccacattttttagtttcctacaaggcctccattttctccgggatggccctgctgagggccgcagtgtttgaggtgttgacttgactcgcagatttgcctcagcaccaccggccacttgtgcctcgccctcgccgagtcgtcgagacgtggacacaacaagctgtgcgtgtgttatacgatttgggctaaatattatatgggctccttcagaaaaatgtggatgcagggggggccagggcccagcatggccccaacgtagctccgccagtgcatctactgatctccatgaccacaaatggcgtcatggacctgatagcaaacctagggcacacgggggatgtccatgccctaacggcccctcttaagcgagagttttcgcgctatttgttagttttcttgtataatagtcgtttttcatctcttatgcgtaatatttacctctttactagtttgcttataaacctagttatccaccgccatgtaacaatgatatttatctgggactccggagcagcacgagaaaacaaagatcacccaatttgtcatactgggctaaccgattttagcagactgcatcataaggttctttgttttatgatccgcatgttataaacttctaacgctttagtttatgggtggacacgctagaatttttttaatcctaatgagtgaacttatagccttaggccttgtttagttcaccttaaaagtcaaaaaattttaagattctccgtcatatcgaatcttgcggcatatgcatggagcattaaatatagatgaaaataaaaactaattgcacagtttgcctgtaaatcgcgagacgaatcttttaagcctagttactctataattggacatcgtttatcaaataaaaacgaaagtactatagttttaaaatctaaaaactttttggatgtaaacaagttcttacatttcaaaagtgctgtggtatcttagttacctactactatgtctatatactattagctattagtctattactaaccgtccattagccgcctccggaatatgagcatttttcctttgaccagtgaagggggctgttctttagttccccgtctgaacacacggccccatgactcaccggcccatacaaaccggcccatgtgatccacactcgcaactttgaggtgtggtggtttggtgggagtggaacggaacaaagtcaattctcaggcgaggccgacgggctcgcaacgccctcacctgactccctccctccctatacctctctctctacaaagctgcggcggggcatccaagggcaggagccaggaggggataacgcagcattgcagctgctccctcagccaggccagaccctccccctccatcgcaaccgcctcgaagcaccggggagaggcggggcgagagttcttggtcgggctagatggagagggcggaccagaagcgacggccgctgacggtgatggcatcctcatcgtcgcaggtagcagcggcgcggggcatgggcatgggcatggccaacccactggcggagtggaccggccgcgtcaggtcgctggaggccggcgtgcgggcgtggctagcgaagcagcccacccacgtggaggccgcggtggtcacggtggccggggccgtgcagggcgccgcgctcggcgggctcatgggcacgctcgcgcccgacggcggggccgcgctccccgtgccgccgccgccgcctggggccgaccctaaggtcttggcctccttcaagcaagcgcaggtactgctggcccggtccccatgcgcaaccatttcgcagtgaatgttactacttctacaaaattcgctttgatgtgaagagttttgggtggcaatggatatctgaactacgatgccgaaacacatcgttttaactaatgttattatgaatttgtttagaatcttaagaaattggtaactgtttatatgtaatagggcactgataatatctgatatgaaatacgaaaggggtttgtgacatctttttgtcgagatgatagatttttagtttgccccgggagcaagcaaactctaggtctttattcaagaacaaaagcaagatggcttctttttccttttctatgcatgtgatggcatttttctttaaggagaaaaggcaaatgctcttctttcaatttataagccaaagtgtcccagaggatccctttactttgcacacatcggctattgcttctaaaagcaattgtcatgcatctaggacagacgaaggaaaataccatccagtagtggcggagctaggatttcacgtcagggtattccattcaaaaaatttccgacgcaaatatgagtaataaataagcgaagtacaatatgcaatagtaataagcaaagtgcaaataagatagcacccttcttcttcatctaattacaaatacaatgcaaaaaaaaaagtgaaatttttattctctctgaagtctgaacttttgaatgagcataatggatctaggggtgttttgtgttcacatttcttcaagccgaagctactttttttagcaacttcttcaagccgaagctactttttttagcaacttcttcaagccgaagctgggacggagacagagggggagtgctgatcagtcagagcccgaaggggagctgctgctctgctgcaggccgccgcaagctcctttaccagcaggcttcgacaccggccactagggccaaataggcgcagctgagcagagctaggagaggcgaggggggctgagggagagagtaggaggtgctgctgtgcaccagtctgcaccaccggccacttcctctgcttccggtcgatggctcgataggagcgacggacaggagcacggagcattgagagatgtcaatagtttttttctgcctttctagagtctctgacttcatgggctgctactgcgagttgttctattggacttatgggccatttttagtataccaacatgctataccattatacatatgtatacacacttgtttttgttcccaaaacatgggtattccatggcatacaggtgcatacccctggcgcgcccatgcgtccacttcctttaagcaatttatctagggcatttatctaatgtataaacttgaattctaggctttagccggtggacccctggtgcaagcacgaaactttgcggtcatgactggtgcgaatgcaggcatatcttgtgttatgagaagaataagaggagtggaggatgtccagggcaggtaagggtttctgggttctgtttaatttactgttctgttaatatttgagttccatttatcaaaaagaatagttgcaggtcccatggccttgatgtatgttgtacagtacacaccttacttctattccctgcctccagtagtcaatgacaagtagcttaacagttaaccttactaatttgtactttacaagttttttttggttgttgttttaagcaatgctgcactgatccattcagcttaaacttcaagaaaaataaagtagattgcacatttgattccatttgaactcgttgtgctcaaattgcactattgcagttatgttcaacaggtttgtttagatgtttgtctcagttatagatcatttttttgctttacatgattgacgatttctcttttgcatgtagcatggcagcagcttttggttccggggctctattctccatcgtgagtggaatggggacaccaaatccggtagctaatgcaattacaactggtgttgcttttgctgtatttcaaggtggtttttttatggtaagaatctgggaatgtctattgctgatgttaattgcttcgttgttcattaagtcttgtcttgtcgatgttgtttcctctgtgttggaaatgttaccagtccttgccttctgtatcctgtgtagtactgcagcaaaatttctgctttataaactgccacccactcttgagtagatcatttgtcttgtcgatgttgtttcctctgtgttggaaatgttaccagtccttgccttctgtatcctgtgtagtactgcagcaaaatttctgctttataaactgccacccactcttgagtagatcatttgtcttgtcgatgttgtttcctctgtgttggaaatgttaccagtccttgccttctgtatcctgtgtagtactgcagcaaaatttctgctttataaactgccacccaactcttgagtagatcattctaaccattgccaatttgatctgttttgtagatcggtcaaaagttttcacagccaaagagtgaagatacatactattctcgtggaagaagcatgctgcaaaagttaggccttcagaactatgagaaaaacttcaagaagggtctcctgactgatcaaaccttgggcctccttacggacaggtaaacgtttttctttaaaacccctaaattacataattctgagctatgtggcacaagatgtgaaattacgaggtaatggaacctgaggtttgtgctatttatctaggatccttttgcagcttgtgccgcagtatctaggatttatgcagtttattattatttggtccatatagtctctctcgctcaactcagaaaaacaatttgagggtaaagaaaactgttgctgtgcttatttgaaatatacatttatcatgccagtgcactcagagatgtgaagatccctcctggtcccagactcctcattcttgatcacattaaaaggtatggaatgattgacaaaaaaaaaattctggttttctagcatttagtgtttccttttcttgatctttatacattttgcagagatccagagctgacaagagcaaattaaatgatcggcactgcccgccccgcggtgccagttcttccccccccccccccccccnnnnnnnnnnnnnnnnnnnnnnnnnnnnnnnnnnnnnnnnnnnnnnnnnnnnnnnnnnnnnnnnnnnnnnnnnnnnnnnnnnnnnnnnnnnnnnnnnnnnnnnnnnnnnnnnnnnnnnnnnnnnnnnnnnnnnnnnnnnnnnnnnnnnnnnnnnnnnnnnnnnnnnnnnnnnnnnnnnnnnnnnnnnnnnnnnnnnnnnnnnnnnnnnnnnnnnnnnnnnnnnnnnnnnnnnnnnnnnnnnnnnnnnnnnnnnnnnnnnnnnnnnnnnnnnnnnnnnnnnnnnccccactccccccccaccttgagttgcagaaattaggccaggagaaaagtttaattttagctattcagtgacaactagtatttggttgtactactagtatatgttttctagtcattatgtacgcatctttctgcgtttaagtgtttgcaaatcactctgttct

SEQ ID NO: 4661 - DNA, 10168 bp, Sorghum bicolor
tatatgtgatgcaaagattgactgattgagtattcgaggcaactctgaatagcagaagcaacacattgcttgcaacgtaactgtcatgataacatatggaggcaattttccaaatatccggttcttagaatgctaagactttgtgtcaattcagaatcattgttacaatgccacagtaataattcagaaagtacagaacatcaaatgtattgaactataaaaaggcctgaactattaaaacaagaaattttggcaactaattcttcaagaaacatatggctagtggttagactcaaactcatgatcatggcgacccagtgtcagattgcttggggctaatggggtcttgagactcataaactcatgagtcatgacattggagactcagtttcagcatcagactgcgcattcaggtggtgcacaaggagtaacctggcacggttgatggctgcaaagtagaggcaaatgtgctcctcaaggtcagcaagctgccgtagcaggctggggtggttcttcctgagctgccgtaccacctcttctatggtgtggtgctgccccctcccacgctccagcccaaggcggacaagcatcttgtcgctctccacagtggcatggagcctacccaccagccgctcaattgtggccacatcattgttcaagacgtaggtgcccctagccgtggcatcgagccggtccatgtgcttctgcaggcgtttcatcgaggcagccagtggacagcaggaagaattggatgcggcacaagcaggggccatcgccagcagtgcggtgatggcgtgtgtcgcgagcacgaggcctgcgacggcagcgccggtggcgcaggcgatgaggcagatacctgacccgcgcttggcgcagcggagccaacggcgcctgcgtcggacactgaggagacgaaggtcgaggtggttcttgaggccatcaaagcttcggcgcatgccctggaacccggccgcgggcgccgggaacggattgggcatttggtcgaacaggaggaaggcgtcgaacgcgcagtcgcagtgcggcgtggcgagctgcggcgagtgcgggatgagcgcgagcaggtccgcgacgggcccgtacagcgcccgcgcgcggcggagcgcccggcggagcgagaggcatagcagcgacgcgtggtgcgtgctgcggaagtagtccgcggcgaggcgggtgagctccgtgtcgggcgcgtccgaaagagcgcgctccaccaccgcgtcctccggacggagcacgccggccagggtgaccctgtcctccccctctcctccttcctcctcctcttcgccgttgccgccgaagccctcctcccgttgttcgtccccgtccccgtctacgtggatcttatcccagatctcttggtaggactgggtgtggatggcgagcctgtactcctggcttagattgatggtgggcgccgacctggggctgctctccctctcccgcccctccgccgcgccaccgctccgcctcacgccgctgctagcagcggtgctggagctcgtgctcgcattagcgctgctggtgtttccgtcagtgctcgaacagctcggcccctctcctcccgcatcgtccgcacgtcgccgctcccacggccgcatctctcgtcgtcgtcgttctgcgcggccggtgggcagctgcctcaagctgtggcgactaggcgtggaagcaaagttatacgtgtgccggtgcgatgcgctgcggagtggtgtgcagggtaagccaaaggggaacaaagtcgaaggtacttctgcggggtttgacccgtccgacgacgagttgggtcgctcctgagagacggatcggacggtccgcacgccccccatcggttggcatcgtgcggctcccgtgccgcgcaggtcgttacgaggcgggctcgccaagtcagtcgccgcacgcgctccgctccgagtgtcgcgggcgcgtgccgcgtgaccactctagctgggtggttgaagcggagacgcaacgagaaaaatacgtacggctgtcgcgggtcgcgggcggcaggagtcggggcgcgcgggagagatgataaggatggcggcggcggcgtctcagccaccatcgtcagccgtgcgggtgcgcgggtgcggcggcgcggcgtctgtgtcgtcggcgcgccccttcacggggtcgccgcggggtagagtcgcggcgtcgattgggaaggggaggaagcggaggcgcgccatctcgtgctgctcgtctccggacgcagatggaccacgccccgccgcgccaccgacctccgcggcgccttcggacgggtcgatacagctctattcccagattgagaggtaggcggtggtttcatctgttcttctcgaacctcggcgccgctcttatctcgctgttgggggacggcgcgtagggtgatcacggaggcggcaaagcagtcccgggagggctggggttcgactggagattggaccgaagtcgaggtgcgtttcggtggctctcgcctttactgcggttgcgttctgtgtttatatccggattatatatattgattagtgctaattggtatactagggagcgtgggtattgcgaccgaagtcctcggagccatcatttgttgtccactttgttggaggaatttttgtcggagccgctccccagatcacataccgcttcttccttgaatgtctcgcgaacaggtatgtttgaaagcagtgtcaaatcacccaagtttgtttcctatgagctattttatatttctacgtattattttttatgaatgagctatgtgatcctcttgtattgaggaagagtaatatctggactttatgaaaagtactcagagttagctcaagttttgtacttggaatgtacttccatgtgttttgagtttgttttctcaaacaaagcattgccacatgaatgtcctgaaacaaaggtgttttaaaccaatgttttctggtcggctggtcgaccctggtcgacctgggaccgaccaagcgattaatcgcgattaatcagcgaccaggtcgattaatcgactctggtcgtcccctggtcgctcctggtcgtccaggcatatcagctggtcgacctatatatatatatatacactatattatacacaataaaggaagcatcaagactgcattagtgtaaaccaacattcatcttcaacttgtgctggcgcctctagaacagtccttgaactctccttcttaactatttctggagaactgggacaaccaacagcatctctataccccccacatatctgcccagtcaaaaaagcccaaaaacagagcacacaacctggtcgtccatgtcctaatcggacgattaattgcgataagtggacgactaatcagacgaccaggtttttggtcgacctggtcgggtcggacctcctaatcgagcactcctgaccgaccaggacgattaatcgcgatttatcggacgacctgaaaacattatttaaacggaaggaattgttcatgtgagctttaaggaatactcctatttgttcatctatggatagaaaattcagataactctgtcattaactgactgctgatctaatccaattccttctgttattacttatacagttgttcacttttttttttctggtatagctaaagttaggatccctacttccaatgcaaaaattctcacttatcttttcgttttctaggggagctttggtgattgctacgccttatgcgagcggctttgaccatttcttcattgcagatgaagttcaatttaagtttgataggtgtttgagaaacttggatgagcctgtaagtaaagctctctgtttaataaatcaggatcttgtccattgtactaagtatatgaaattttaaacaggtaaatgatatcccaacatttggtgttggacattccttgggatctgttatccacatgttgattggtaagactttaccttgcatctaatttcaatttctgtttatgatatactctctttttgtccttttcttttggctacaattgtataatttgtcttcctaatggtttgtattccaggatcaagatatgctgtgcagcgaagtggaaatgtactgatgtcctttaacaacaaggtatgtttttgcatatctcgccgttcatcctatccacatgtgggtatggttactatttcttttagctgcatgtatcattacaaatttgactcagttttagtcctccatcccaatatacataagcttgaagttggtccgtgaaacaggtataggatatccggtactatatctaaaataattggttgcatgtgatacttcagaactgcatattccagatgtttttgcttcactagctgagatatttcttgctatttcaagttccattttcatacatcattggatgtaaatgccaaagacatgtgagatgttttgtatgagtctatacaacagtgatatcatttttaacatatgatgtggctctttgaatgtgacatgcaaaattgcaaacactagttttatgaaccatatatgccattatcaggtggtgtttggcaccatctcgtttttttgtgcttcaagttagagaaggttgtgtccaagtgcttttcttctcaatttgcctgttccagaaaaatatacttatgaaaaaactaccagtataatatgctcttcatttgttgcaggaggcaagctccgcggttccactattttcacctgtaattgttcccatggcacaaagttttggcccgatactgtcccaattgacatcatatccaacaatccgatttggggtacgatatgtttctgtgactttgatgtgaacactgttcctcaaaatgtttaacacattatatgcaggttactttttcatgcttactctatccatgtgcactttggggtagcatatgttttgcggactgtccctggtaggattgcggatcctatcggggactcgacggagatggtagaggtggaagatcgggggtgtgctgaccctaaaagaattgtccacattgattgagccaattcagagcgtcaacggagccgtcataggtagcgaacttcagcttgtagaatttgggcggcggtggatcctggccgacagcgaagggtgctgcgcccatgccatccagcgtcggtgaagcggcggagtgcgccagcaggaggttgccgccatggaagaggggctcatccacgcctcagtagaggacgcccgaggccggaagaccgccgtggctcacgacggcctgggtggtcggcccctgcagcaagtgcggctgagggttcgctgtcatgtagatgggtgccgatgaaccgagggccaaagcctgaatggaggtggtgatggtggaaatctaatctggttgatcggcggaccttgggacggtggcggtgcggcctggaaatttgatcgcgctggtcccgtcgtagggcatcccatactggtaggagatggggggcgccgcggttgcggaggacagcagtggcagagggggaggcggcagtggcgacgtctgttgcgcgacgaggaaggatcgaatctcggccatagcctgaccgagctctaggatggccgccgtcatctgctccaacatcatgacgacaactagcaaggatgccgatgccgggaggagcggcacaaccgcggtggtgggcgccaacgccgctcgtggagggcagcagcgcagatgtggtggcttggggtggcggcggctgggtggtggtgggcggaggacctgacatctccaataccagactgataggattgcggatcctatcggagactcgacgaagattgtaagggtggaagatcgggggtcgtggcctgtacccgcgaccatgacgaacaggagccgtgggtgctgctgctcgcgagagagaggagaggcggctagggcagagggctggggtctcccggctccctaaaggaagctgagcaaatatgattgctcttacttaattgtatcaatagagtttacagatatttatgtcccttctactccacttattttgctaaataacctatttgggactaatatgaattgcaaatacaaagatagctgagctaataaagataactgggctgggctatcagcccattaatcatggtgccagtacgtcggccataacagtcccgagtaacagaaatatatcttgaagcttttttgtattaactagaatgtcttgtctgtccaattaaacataacaacttttattgaagaccaaaaaactaccacaatattaattttttagcttcgtagggcactctatttcataattctgacttttaaacatgggaatggcatgactttttttaaaaaaaaaaaaagaaaagtggaagatagtatgagggtttttttcttctccactccatggtatgatgaattttggcgaaatagccatcttcgtccttaaactatcacccgaggctcaatttagtccctcaactttcaaaacgcccagtttagtccctaaacaatcgattttcgggtcaatcttgtccatcgccgttaactaatcgccacgtgtttaggagatcatgccaaaagtcatcgctgcccctcgcccatcctttccgagctgcccagtcttcatagcgtccccgtctactgtttcctcctcgtttcccctctccttatctcaggtctcgcaatagatgcctcatgcagaaacaaattcctaacaatgtctgtcatattgtctcatgttttgacataacaaagacaagtgttcacagacaaatgattgggtgatacaaaggcattaatatcattggcttgaaactatttttttttctttgaatgcatctaacgtgttcatagttttttttctaaggagagctgctctgccttttggcaccaaaaatctaacgtgaagacaagcacgagattgacgtgttcatagtttttttctttgaatgcatctaacgtgttcatagtttttctctttgaatgcatctaacgtgactcataaaggatggaggaaggggcaggaatgacttttggcatgactttctcgacacgtggcgagtagttaacagcaatagacgagattgactgaaaatcgattgtttagggactaaattggacgttttgaaagttgagggaccaatttgagcctcaggcgatagtttaaggacgaagatggctatttcgccatgaattttcatatacgttttctttagggccaagttgttttcttttacttttcttgttggataaatcctattcatttacttttcttattggaaaattgaggatttgctactcataagaatgtcgattgaggtggcacacattccatataaatgtagaatttgtttttcactcttttttatagtgtgctttatgatttaccatttcggcccttctaccctatttactatcttgacgtcttccatttagctaaatttcttagaagtgtcatactcaggatggaagataattcctgggattcatcagttaacaatgactgaaggatgtgaattaagaattctaaagattatttttcttaagtattctaacagatgacactctcctaaacacataacatgtattgctctctcatgtaaagattagctggatgcgtttatatttccttcttgaaacattcaatctatgtagcttacgagcttataattttggcataataggcagaagcagccattaagcagcttgagaatctaagcccacctgtggttaagcaacttctacctttacttcaacaacttcctccgttgtatatggacttagtaaatgggagggaggacttcattccaaaaccagaagagacacgccgcctggtatgttagcactattcttttgaatatttgaaatctaaaattatatgtaaaccacccacgcgagaaatggtgacagttattgttatactagttaatgtgagtttacttctgaaatgacaccttctctaaacatacgttgagtttatcaacacacatataaaatctatgaacattatctcaaattgtgtctggtgctttacagtgctgtaagcctgtgacatctctgtcagtacctatttattagagattatcagaattctcagttcaaatcttcacttataaccaatcttagggttcccttatgtgtttatgtttcaatctgtttatgctgaataaccaagattcttatgtgaattattctataattattatatgcttgttgtcttactggcgcatcacaattttctttagataaaatcctactatgggatttctcggaatctcttaataaagttcaaagatgatcaaattgatgaaacctctacccttgcacaagtactaagctccgaagcagctattagctcgttgcttgatatgtcaattcgatcacttcctggggatcatgggctaccattgcaacaggtactatttttcttttcaggcttccatgtttcagagctgttggcaaagccattgctggaacaaagattctataattctggaaaagtaattgtgttgtgtttcttcaggttcttcctgatgttccaccagcaatggctgatgcagtgaaccgtggaggtgaacttctggcaaatctgacaatgggcacaccatgggaggctgttgctaaggaggttggtaccagtttgggtactgactcaggcattctacgagcacagatctcaaaagacattgaaactcttgttgatgtaattgcttcatggatatcttcaaattctggtccaagactacttcgcccatgatcacccagcagtctgcgtacataaatgttagtaacagtgaagagcgacatgattgcactgatgaattgtgagttccgaaaaagttagattgcacttcagtgtgacatcttagtattttagatccatactgtagttcagaaaaaagtgaagatgtgtatttagatggtgtatttttgaactaagatattttagtagaaggaagcttaaggaatagaaataaaatgatagattctggctatggtaaaactgctaagctgtatgaaggagtcttggcaattcaataattggcgattcagcaattggaactaggaacaaaccctttaatagcaggatgtggcagatagcaggtgagtcctggtcagcaactcctgatgccaatttgacctaaccatatggtcaccttggcgtctgaatgcctagcctcataggccatagcctatatgacctaatcacggtctcaccgctgggcgctggtgcctactttgatttttattagaacacagaaatgttgactgtgtcatggtttttcagattgatccttctgcagcaatggaaagtgtatgcttctgtactgaagatacactggttgagctgcatattattatccgtgttatcattttagcatgtgtgatctattatctgttgagcgtgttaagttctattgtgctgacagatgatacgagacattggcaattagggcattatgttaccttgcaggtgaaggaaggatgcatggcactggcaataggagcttttgtggacaatctaaacccattggcaaaggcaagatctccttcctcagattattggtctgtaatcaatttggattaaaggtaaacaatataggcttataaggttcctaagtaagaatatttcttcccactaagtgtattaaaatcttatattcaaaatgtaagagatgctagtaaatgggcaatgaaattaacctacatagttatacataagacgtcttttacatgaaggcattctcagtgttcttcacagtttgtagccaatattgtgtagtggactctaacatctatctttttttgttggacatgcatctacctcctatattgagattttgcacttgctagattcaacagcatagcatgtggacattttccatataggaggtagacagaattgccttccagttttttttttttcaatgtcactaatatatggatcatccttgaaagacttcagtctatggaaaagaaccatttgaattattccatgcaccattacatcaaatatctcgataaatggtaaataaacattttaaaaaggaaattacacagaatgttatcatattacctgcaagttcatggtttgcaaaacttatttgtataacagccagaacacttttttttcagctgatcagtttattcactggtttgtcatctacctgaaagcaaaatcattatcatagtcttatggtcaggctctgtcttgtttagttcatgaaattt

SEQ ID NO: 4662 - DNA, 11938 bp, Sorghum bicolor
gcaaaatgattgaccaaaacctaaaaatttttgagaaaaaagggagaactaaacaccccctaattaaaatttgtgcattattaggcaagatgactccaagatgacagtagtggtgagtgagatactgagatctcgttgctatagaagtgtcttgtttaaaggatacatcataaggtttggataatgtttttcgtagctaatttggacgcgtggggaatggaaacggacggacatgtgcgtgaccagcgacagtggtaggtttttttttttcattttggtgaatcacccttgaagagctccactaaaatgatgaatttggcaccgctaaatctaccattccggagaatccagatgtagagtagaccgtttgagtaacctttagagcaagtattatagtaagctgtaagccgactaaatattgaggtggaggagagaagaaatgatagagaggagaagcagattgtaagcttacatccagcttaggcacaggaactaagaaactttatgagagagataagtggaccatgtattaatagtgaatagctaactattgtatgatgagtgggctgagagaaggctgaaaggaaccttacagccaacaaataggttgtattattaacttgttcttagtagagtgaaaactgtctttggtgaatctaaagctcgtggagttgtcccaaacgtatttttaaaggtcatagcatgaggtttgaatgatgtttttatgaaatcaaatgtaaaatatcgaagggtacactcttcaggacctctgtttaaatgttacagcatgaggtttggataatatattttcatgaaatcgaatgtaaaatatacgccaggtttgaatgatttgcttatgacaaggcaaggattctcatccgttagattttgatggcctgcggcctagatatcatctcccccgggctgcgaacctacctggcacgcagcaagcaaacaaatcctcagatatgctccttcgctcgccctctagtccagtctaagatgttgtcactcgcggacgagaacactcgagcattcatctggaaaccctaatagacaggcacatgacagcgaacgccagtacatgacgcacggtccacggggcacgagcaagggccgtccgtcgtcaccaggcacaagaagacacatgaaccccattgatggaaacacggcgcgagcgaatagccgtgactcttgtgaacggaggagctaaagcacgtcacctttttttattatttattacgagcgagactccttttgttcttcttaagacttttttgtttaacatatgtatagattttataagatgaatcttttaaatctaattaatttttaattattataattgtaaatatgctgcaatatttacaaagtttttttttcataaactaagatttttcttttcactttttttttcataaactaagacttttcttttcgtaaaaaacggagagccagtagcttacgggacttgtactggtactgcactaccggcagccggtagcggcagggctactctagcgcaacggatggccgggaacgcgctcccagccgttggttcgcgatctgctgctctgctgccccgcccccacgtcacgtctccgtccgctgccacctccggcccgggcgcacggggaagacgacgccacacacgctcttccgcgggcccccccccccccccaaccccgctagggggtagtaacttttttccctctcccatccccatgcagcgccactgccttccacctccgccgcacacgttgtctgcgtctgcccccccattccttcgccttgctcgctcccgcgggctaaataatatctcgcgctgctcctcctcctcggcctcggctgccgccactccactccactcccctccacgcgcgcactcgcttcccgtgggctgcgcctgcgcgggtgaaggagcgcgcgcgcgtacgtgcgggcgggcgggcgggcgggcggttggactcggatctgcggctgggtgcgcgcgggacgggatggcgtcgttcgctgtgtccggcgcgggcgcgaggctcggggtcgtgcggcccggcggctcggcgcgatctggcggcggggagcggaggagtggggtggacttgccgtcggtgctcttcaggaggaaggacgccatctctcgtacggctccctctcgcttcttccccccctctccctcctctattcttagtcggtcggtcgccggctctcctcgcttctctctctctctctctgcactcgtgtggcgtatgcgtacgtgctggtacggttccaagagggagtgccctggatcctgagtggttctggttctcatacgcgcacgcatactttttttttccccttttttccccctatgtctgcattccgaccggtggaagcgatcgagcgcggttttcctgaacccggaacctgcattttgttgcgccaatatgcgttagtgttaccagttgctacagcgatcgtttcaacgtctgagccaatggctttactcgttttcttcttattattttgtttttctcaatcgttgcagcctggaaactggtggtggtgttattttctctgttcttatcagtggagctgctggctttggaatttgcaggtaccgttctgagctgcgctggtgctcctggaaaggtgctggtgcctggaggtggcagtgatgacgtgctttcctccgcagagcctgtcgtggacacttcagagcagcacgaagaactacaggttcgactgtcccccttctgtgccttcatgatgcacttgcccaaatgtctgatgaaatcaaattacggggcctcgtgcattgttggttaggagttaggacaccgtgctggttcttgggctactgacatgttagcttgtgatcccacctatatacacctatcaagaagatcactaaggaataatacaccattttttggttatttctgctgttctacataaaacttatctatttctttgctgtagatacctgatgcagaacaggttgtggaggagaaagcatactcatcagcagctcaagcaacctcagcagcggctgaagaaagctcagaagttgacgcagccatcaaagccaaagcaccactcgtggaggagaaaccacgagttatctccccaccaggagatggtcagcgaatatatgagattgacccaatgctggaagggtatcggggccaccttgactaccggtaagctgttaaccatgagctaagctgctgaaatcacgctctgctcgtaatgggactattcatcatggttttgtggctgtattagaaagcagtttggaattaatgactgaaaaacataacctctacatttgaaactcataaatgcaatataagttattttcatcgttcaaaacagagcaactaaactgataagaatgtgtaactggtaagcgggctgtgcaatttactctgccgattcaccgacaattagacaagttgagctccagtccaatatttgttgcttttgttgggaaaagtgcaaatttgacattttttgcttggtttgccttggtggattcaacagatacagtgaatataagagaatgcgtgcggctattgatcaacatgaaggtggcttggatgcattttcacgcggttacgaaaagcttggatttactcgcaggtaaatttacagccacatgaatatgctcttttttagtaaaccagacatcatatgagctaatatttattacttgcttccccttccttttccagcgctgaaggtatcacttatagagaatgggctcctggagcatccgtatgttctcaacaagtcttggcaatcaccttttgaacacttgataatgttcatgattcacttgataccatgtgcacgagacttatacagatagttctcatgaatatcatcactctcttcaaagtgatagtttatcttgctgatcaactcattaaaatttaagaactgatccttacatcttactgcagtctgcagcattagtaggtgacttcaacaactggaatccaaatgctgatgctatgaccagagtatgtctacagttctgcgatattccgtgtttgccttgtaattgttgatgtatttcatctactgtgtctattttacttgttcaagttgaccctgaagctctcatattaacaatattgtataaattcagtacaatgagtgcactgattccttggttctattcttttgcttaaccatcatatcatttaatcctaaattcaaaaattgatgcaaggttcacggcatggatgtggttgtattattaataatctgtagaacatttttgcactttttaatgtgagataagctgatgagttttcatagcatacaaacacatttccatttgataagtattttttttttctatttatcctgatatatggaattatcacttttagaatgagtatggcgtttgggagattttcctgcctaataacgctgatggttcccctgctattcctcatggctcacgtgtaaaggtagattttctgattggttagtttgggagtaaacaattcttcagattttgtctgctaaagggtcttttttctctctctctccttcctattatttttagatacggatggatacaccatctggtgtgaaggattccattcctgcgtggatcaagttttctgtacaagctccaggtgaaataccatacaatggtatatattatgatccacctgaagaggtatgctctagtttttatgttgcatttttaatagcatttgttttgatgcttaccactgcctcgtatcgttttattctcaacttttttcttatagcatgtggatacagaacaatattttgaatcttggaattgacatgtacaaatatgtcttcttattagtggaaaggattctgtgtctttgttccacttgagcctcttagagatgcctacttactccttttttttggttcgcttctccattttgaactttttatgaccatttactaaggggtttttacatgcaaaatgcaggagaaatatgtattcaaacaccctcaacctaagcggccaaagtcactgcggatatacgaatcacatattggaatgagtagtccggtatgccaataagttatgatttatttattttttgctgtgcttattgtttagtcccttgtagcccatactacttctgtaatatttttaacatccaattgttcatatttcttctgcaaaagagaaagggagaaaagctgttagttcttcatttagctgctctctgtttgttcttcgcttagctactctctcagacacatttaattcatgtgacagctagtcagattttggaacatctttaaattggttaatgtggaacttaatttgcatagagacttttatatgtgtatatcaggtcgtcttctattttcttgcatgattcctaattccttctttttgtaaagacattccatattaacataaatggaaaacatggcttgttgtttccattgtgaatgttatctttgtggtaataaatattgccatgttagtagtttcagaagagaaagctgtgcaaactatttgtaaggataagaaagaccatttaaaataaaggtagcttatgggtgattgtttgtaccattctgttgggtaattgaagtttcagtactataaactatgatcatctatacttgagataaacagagtattttggatgatctgttacacaggaaccaaagataaatacgtatgctaacttccgagatgaggtgctgccaagaattaaaaggcttggatacaatgcagtacagataatggcaatccaggaacactcttattatgcaagctttgggtattcacactttcaatagatccatccacttctcttcgttgtttctgttttttttccgtccatctggaactcttgcatcctaatgctttgtacaaacataaacatttggatctgcttcattattttcgtaggccatacaacaatccttagttttattacttcatatgattactgtatacttccattttcaggtaccatgttacgaacttttttgcgccaagtagccgttttgggactcctgaggacctaaaatctctgattgacaaagcgcatgagcttggcttgctagtgctcatggatattgttcataggtatgtctgttcaggtattctagacttggtcgttgccttgttggatggccctatttttatcatgcagacaccattgatttttctttgttagatgtattaacttggttggaagttaaatgtatttgacacctatgagtagatacagtacttcttggaaccttgctttataaatagtcacacagatggtgtggatatggacagagaggctcagatgcaataaacttatttacctggaaattttctaggtgatgctacactgctacaccgaagtcgtgagttgggaaagtataattggtttcttatggataagtggtcctaggtgccacttatcatcctccatccatttatgcatcttcgcatagttactgagctaaatccatatttggtatattgttgtaaggtatgtaaagaacgaacacaatgtagacacttgccaatatctttacggaagagttgtacagggagtcaaatgggctttaagaaatccacctgctttagcagttgaaatttgtgttctggcctttgtattcttaataagacagtaactcaacatacttcatgtcttgattggtttgtccttttgaattgcatagatttaccaatatttctgtgtatcctgcagtcattcatcaaataataccttggacggtttgaatggtttcgatggcactgatacacattacttccatggtggtccacggggccatcattggatgtgggattctcgcctattcaattatgggagttgggaagtatgtaatgtgcacaatatattagctaacagttcctatttatctttccatacatacataacattacgttttgtgcaggttttgagatatctactgtcaaatgcaagatggtggcttgaagaatataagtttgatggatttcgatttgatggggtgacctccatgatgtatactcaccatggattacaagtaagtttaccagatgattctggtagtttgatttcacagttctcctgtggatgcattgtgctgtccgtttttctaaaataattgctctgcataattacatgtatcatgtctcctcgtccagctaccaagtccaagatagcttaccttagttgtacatgatgaaagggataattgacttttctaaaattgctattatttactgtaggtggcattcaccgggaactatggcgagtattttggatttgctactgatgttgatgcagtagtttacctaatgctggtaaacgatcttattcatgggctttatccagaagctgtatccattggtgaagatgtgagtgctcacgatattttggtgtttttcttttgtaaatactcttcttcaaagcagttaatttagttggtgcttttgtcccccctgagggactaggttagtattattcattttgggaaggaagtttatattcctatttaccttgcacgcatgttctcagattgcatttagttctttaacctagtatgcaagtgtcaattgatttgatattattggtgaaaagaaaagttcatcctcataaatatcttgagaaggttgatctggaatgctattacgatggtatattttgcaaaaggaacaaggtttagcatacatgcaaagtagttatggactccaactgtacacatgcctgggcctataccagtattattaaacttctgtgtgtttaaggttctaaaaatatggcttttgaacatcaacatgacagtcggatacaaataggaggttccaccagatcttcagtattcattgttcaacttgtctgattatgttcaggtcagcggaatgcctacgttttgtattcctgtccaagatggtggtgttggttttgattatcgccttcatatggctgtcccagacaaatggattgaacttctgaagtaagtggtcgaatattagtggttacatattgagttcttaattgattcaagtctacatttatgttattcttcagataatatttgtggtatcaggttcaatatgagaattgtcaataacatagcaccttcattctcttttatcgtcctaaaacacatgtagtcgtcgtttaaactttgtgccccaaatatctaaaaaaaaatgctttaggtttgtcgcagggaatagatattagtagaattatcatcaaatggcaagctagcacttccttatcattatgtctataatatttttttcgttttagatataatgaccgtcagagcatgcaattgtcaaaggtgtattgggaccatgccaatattttatgtgacaagtaaaatgtgtgcccttcatgtacatatttcctactttgagctggaatgttagtaccccatacatattctgggtagttccaaataaacatgatgtgatcaaatttcaacattctctattaccacaggcaaagtgatgaatattggaaaatgggtgatatcgtgcacaccttaacaaatagaaggtggctagaaaagtgtgtcacttattgtgaaagtcatgatcaagctttagttggtgacaagacaattgcattctggttgatggacaaggtactagctgttactcttatgtttttctatcagatttcttgtctttcttgggatagttatctgtttgttcactagtcattagccgcatgggcaaactgagcatgttacttgatactatgcaatgattgctaagcacagtgtgtatgatgatttgctaatcagctgaacacaacacatcttcttgcaaatacttttcagtcagtaaaaattaactgactaatgaatcatctatcaactattttgctaagaaagtcatacaacttacagaaacagggcaaggatgagtaactcaccaatgataactctgtaaattggcagcttcaatcaaaactatcagattggtttacactcatagctgaggagaaaccagaaattcgttttacacccaattaaaatcaatctggttgcagttttaggcaactggattgtaacagtttctgaaatatctaggagtcccttgaacatagatcttcttgtaggtctactggtcaaggcgctatgctccttcgtatttttaaaggaaatagctaaaccaatattatcaggagaaacacataagatctatccgtgttatttgatgacttctcgaccaaaggacatttaggtgtcccatctttcatttgtttattcattaatgtgtccttgtatgttttgtctttaactacccagagtattgaagggctttctatgcttgcacattgaagatatttttttattttttttatgctttgtgtttttctcctagaaaagcacgcttccacttaaatatcatcacatattgttgatactcagtacatgcagaagtgtagtattgtgctgtaaactgctggttcaaaatagaacagaatgacatgaacatttcgacttcttttcctgcaggatatgtatgatttcatggctctggacaggccttcaacacctgtcatcgatcgtgggatagcattacataaaatgattaggcttatcacaatgggtttaggaggtgaaggctatctaaatttcatgggaaatgagtttgggcatcctggttagtcttttcaattttattgcatgttgcataattacgagttataacgtgtttgttctttttgtggcatgtatcctacttcatctgaggaagttatgactagtttcattttacgtggcagaatggatagattttccaagaggtcctcaaagtcttccaaatggctctgtcattcctgggaataactatagctttgataaatgccgtcgtagatttgaccttgtaagtttatctgtgctactatattctttcaacgtatctggatttgccacatatttcttggtaaatcttgcgttggaaagatcaataatgttctatataagctaatactaccatatgtcatcattgttgttgaatacaattttaatccatcttttttttcagggagatgcagattatctgagatatcgtggcatgcaagagtttgatcaggcaatgcagcaccttgagggaaaatatgaagtatgtccctggtttttctctgttgcacaataacttaacgctaaatttctatacaacaacaacaacaaatcatttagtcccatgcaagttggggttggcttgctgttaaatttttatctcgttaatgttttttatattagtacagaatctaaaacaaattaataaattgaggaaaactgctggagaggaggatatggaattgctctctgtaggagggtggttggtgcattttactgatgaaatgtgtaatatgattccagttcatgacatctgatcactcatatgtatcacggaaacatgaggaggataaggtgatcatcttcgagagaggagatttggtctttgtattcaacttccactggagcaatagctattttgactatcgtgttggttgtttcaagcctgggaagtacaaggtatgcagcttttttgcatgcatctgtaatttcattgtccaacctttcatcattgttggggttctaagaatttttttccagcattgataaatctgttgctgagatgatgtggtctttatagccacgtagcagtttagcactcctataatttctttttatcttcactaacttacgaacttatcgaatatcgatcttcttcatcgaactctgtaatactgaaatttgtttccaaaatgtattcaaatcagcccatttgaggacttaaatgtgttgtggctggatgctgatggcttttctctttttccttgtcagatcgtgttagattctgacgatggccttttcggtggatttagtcggcttgatcatgatgctgagtacttcactgctgtaagtcctggttttgaggattgtggcacacaggctgcttctcttattttattgcccccctacatctaagataacgacccattttctgatgcttgttacaggactggccgcatgacaacaggccgtgttctttctcggtctatgcacccagcagaacagccgtcgtatatgcacctgcaggtgaagaggacgaatagggcacaaccgcacaacagcggttatcggggaagaacttcaggatgtactccactgctggtggcctgacaccactgcgagatgcgaccacgcgcgatgctgccggatgttgtcaatcgagaccgcgtggcaggacgatcggcttattcaggtggataggttagcttatcgatgagctctcgctttcgagtgactggtgaaggaaatggaccgcgcacaccatgtggttttgtacatatcgcatcagtaggcatcgtatcattgaattctctgaatcaatcatttgcgctatactgattagctgtgttaataagccagtgaaaatctggtcttttgctaattgctaccatagcaaacttcggcgtgctgctgtgcttctcaatacggtgacgtctgcgtaactacgtctcgtgcatatgctctttgtgtaccctacctatggctctgttcatgttagcaggaacagttgtccatacacagccagtggcggagctagaagttatgtataagggggccgtcaaagagctacaatatatgataatttagtgtagtttaattgattagatttttgttctagggttaagctatatttttctaaatttattctagtatttgatgatcttactatgttcgctaatgaatattaaaatctatcagctcattttcaaaatattcatatctgtggtgggtgactgttctgtcgacaacgtggtgcatgtgatgactcgtgaatcctaaaatctatcgtcttagtatttcaaaagtgctcatagtgaaataggatgtttgtttattcatagaagtgagtgtacgtgcatattgtgagcgtctatatcta

SEQ ID NO: 4663 - DNA, 15223 bp, Sorghum bicolor
cactcagctttttaccactttggtggtttccatggaggccaaaagtctactacttatgaagctgagttcagagtttagaggatgatgattacctgattgtttattatgccgagttcatagtttagtggagcatttttggcttactattatttttaataagaattaaatattttctcgtcgtttggtcgtgttttaagttgtttttaagtatattccttaaataaatccgtagcgttagcacgggcactatactagtgatgtatagaaaccagacaatcttcgtatgagtgaaggagcatgagttagagtaaattcgacttttatatttgagtttgattttaaaacattttctataggcactacaccacataggttgtgtcgtgtccaagtttgagaatttttcagaatgtttactatttcttaattattttcagcattttaattaaaaattttaaaatttgaatttttttaaataacctcggatggaaaaactctctaaataaactttgtagatctcaaaaagttatgaaactttgtagttgacaactttttgttttggaatcatcttgtcatgcaaaaactacgtttgaattcttaaatttgaaattcaaattttgtaaacgacctcgagaaactccctaaatgaaaattgtagatcccaaaaaaagtaaacgactcgaacccgggctggctcagccaaccgcttctttggcgtgttgtgctgaccagttgcaccgtgagagtgttggctcacttttccaatcttaaacacagctttaatatgatttgctttaatttgcaggcacagtataattccatataaaagcgggtagaacctaacacttcctaaagttcttaatgccactgtgctatttccgtgccttctcatatactccctccgtcccaaattataagtcattccaagaatcttggagagtcaaagtttttcaagtttgaccaaatttatatagcaaaataataatatttttggtatcaaccaagtatcgttagattctttgttagttatattttcatagtgtacctattttatgacataaaactttatatttctctctatatttttggtcaaacttgaaaatgctttgactctccaagattcttggaatgacttataatttgaaacggagggagtattgtttttccacccacgtataactatgtacgtcactgaggttagattacccacacaagcatcgatcatttactatctatgctatgggcaggtctgccacactttagcaccagtttatcttaattatggtatggatcatgcaaatattgcgcggccagcatcttgcatgctgtctatctactgcatgctacttactgctagctaggagtagaccagctataggttggtattagttggcatgcatctttctttcgtgtgactgcattgcagtattggtaggtaaaactaatactagctgtagcctgtatatatactcgtcgtcgtcgttcactagcagctagcttagccccagatcatcatctgagctagctgctcctagcatatacgtgcgtactgcatctgctgcatgatgatcactaccaatcgatcatgccacccgctgcagcagccgtgcttattagtcgtttccacaatatctccactactatataatccaccagttatgaacttcactaaatgcacctcataaactactactacagtcataagctacactaagtacacacagaaaattacacccataaacatctatgttttgaaattaagggacaagattaactctaatctctcatcttcctaactcaatcacatccaacggtcataaacgttcggatcaaactcatcactcatctcatcctcacgcacaaccgtcgcacttccctctcacggacgactgtcgcaagggaagacagcgggacacaatggatccacacctggccgccgccaggggctcgctgccgatcacgcttgaagccgggacggagagcatggcgtgggggcttggagcatggcggtcgccatccccgccgccgaggccgtcattctcgccgtcgccatcgcggccgccatccccaccatcgtggccccgtccctgttgtgcggccgtgctgtgggtggggctccgatctagccctcgccttgctgggggaggaggcggagaagctgaacggcgccgagagcagccaccactagcatcagcaggcgagaatgaaggtcggtgtgcggcgtgcggagcaccagtgcggggatgtgggcgagggcaaggccggcgtgcggctgtggctcgacccttcctctcctcttgcagaccaacgcggtggagcttccactgcccggctggtgaccgtgcccagcccaggatcctgtccggcggtggtggagagcaggcgatgagcacctaccaggtatatgcttatatgcccatcccttcccctgcatccctgcaaaaccgagagcacccataccctaagtgttaggatctgatctgattatctgattacaagcgtagcatatatatatttataatattatgccttggatctgatatgattatgtgtgtaagtgttttttttttgcaaacatcatatgtaagtctatgaagccaatggcatatttgatttactataatgttagtgctatgtagggttggactgaaaatttgccctgctactgcttggactaaaaatacactgttatgctgcatatataattatagagtatagtttttggtggtccatatctctgtatttcctctttaccatctatctctgaatttctgcagggtatgagcagtccctatggtttcatttcattggtaggaattggatcgtttttttccatattaagtcagagcggctgctgctaggcgactagccaaagcaactgcagaaataacctatgaagatcgtcaatttaacgattgcttaaaattaacaatgataactacccagaatatgagcctcagttcctttttacactctttgttgctgtttttttttcttgcttggaatatactaaacaaattgttgcatctccagacttaaactaaatgtttattgtcaataatatgctgctccaggcttccggctactatggaagtgatgttcaatctactactttcggggaatttgttttcttaattggtcgcttatgattattgtttcatttgtaaacaacggtgtcgcttataatttgacgctagggttcgtttcagtgaatttatccattacaactttaaaaacaacggtgttataggaattttcagttcaatgcaggtcgttgatcacttgattgaacaggaagttggtgatatcttgaatcatgaatttatttttcgctatactataatggtgtcaactgatgtgaattactaaccctgtgaaaattgtgtgggtcaagaaatttctgaggcaccttcgagatgaggttgatctgcatgtggtgttgctgcatctatattgaagccttctatgaagcttccacacaaggtgtggccttgtgggttttgcataactctggtcactaatttcacatgttttcttgtgcttattcgatgtaggattgatattctggccataactactaaatatttgcttttctgttctcttcagcttatgatattttatatgagagacatgaggagcagtgtgtttggctatatgagaaagatactagaagggcttcaagtgggttctggtgatattcaaaagcgctatacattaataatagcggctcttgttaagctgtaactatggtgaatttttcattgttcagttctcattttcacattatttgatacttcatggttaacgacatttttttaatgtaagctgtataagttgtgacggggagctaatgtgaagaaggatgggaaaaaatatcagaaatataagaggcctccagaagcaaagcaaacgtttactttaggatacgcaaattggattgattgggctcccttgctgctaggtaagatctgcatcacttgataaatatcagtagtataatgaatcacatgatctatttatattgtgagttcacttttacagtgctggacactcttcaggttgaaatccagtacatgctaagtgcagaaggatcctcacgtgcttagatactggtgtttgatacaggatgatcaatataacaaatgaacaaattatttccttttgcaaaaataaatgccgcactggcactgatagtagcaaagagataggatgcagtgtcatatctagaatcaaatttggtaggtgcgttctgcaaaattacaggatatcttttggtcttaggttcaacagggagagaaacacactatatatcacattaagttaatccttgttatattcaacaatataagcttgattatgtaagtttatatatctcctttgggtgaatcttcaattcattttatatgtttggttgttaatttgcatcgtctaaaatgccaccgtagcgttagcacgggcaatatactagtttttactagctgcagccacctttgctcaaccaccacctccgccaccgcctggtggggcgcctatctatcacatatattttgacattcgttccaagacatttgatgagctccgccttgagatattagctgtgctgctcacattctcaagcacactaccctacaaccccccacaagtgggtcagatatatgtcctcgggccccagcgcctgaatttccttgacgagccgcctgcctgcatccatgtcatcgtcggggaagagaaggaagacaaggtaaccttagccatggcaatcgatgatttgtacattatgggcttcagtaatggcactgagcattggtataaattcggtggtggattcaaaggtttaccaggagcagtggtcttacccattcaatataattacagagacttgattgatgggggccataagtttctttggaaagttcctttaggcaaaaagtcggccacacatgccaccaaggaattagcaacctacgaccctgaaatcacctctaaagaccagcttaaagatggcgttgtaagatttgttgtgatgatgagtgaagggatgcggctccgagagattcgcgagacattttcgggcaacaactgggagaaggagacatttatctctacagaccaggcaaactctgtggtcgactggggaactctctcaaagctcctcatccggtgggacctaaccagaacaaggcaagggggcgcaaaatggggcggaggtgaatttacgaagcatgctgaaaaagtgaagagaaatagtaaggtcactggtgcgacccaagctgaaaacaaacttgatgtcctgcttcgcccaaaagaaacaatacttgaattagttagttagatcatatatgttagttgtgttcaattaatggagtgtattcattcgcctgcccatctattattatttttattttgatatgtaaacacgtcatccgacctattgtaatagtttatcattattatatatgtaagctctgatttgaataaagtatatccatccaatacaatatacatatgtatatgtgtatccgtcctattctcttattatgccatctatgtgctctcacgctccaaaattttactttgatcaggttgtcaatgtaaaacaccaaataaaacaaacaatttttcatttttctaaaaaatgtcaagatttatttagatttttttgtcaaacctgagaataaaaaatatgagattttacaaaaaaaaaaggcttcccgcgttgctggaatccagtgttcttttgccaattcaaatcccaagccaactgcaactgcttctgaaaagggtcatcgcttgaagtaaatggagcgcatcataagaagcaggtgcctcttactaaatagattcttcttttatgataagaataagaagcaagttccgtgagtttctcttttttctttccttactttttgtacacttgattcagattttttatttatttaacccttactctttggtgcagcgtgtaccttttgcatatacccatatttattcagtcatgtcttaccgtagtacttggttccatgctctcacagaaaaatgtcctatgcatatgcagtttggtattgtccctgacgcttttagacataaaagagcaaaacattgacttcatcaagcaaggcaacagcatgtttgggtaagaaccattgctcctgattagataatctttttcagtttcctgcttggccagatgtttcataattaacgtgcaagtatctttcacctggccatgtgtaaatcaaacttgtagtagcgacgccatagttcacaaatacccaaaagcagttaggcatctatatattcttcattggtctcatcctcatgtgcccatgttcagacctaaactaatgaatgaacttgttgtgtttttgtgagcatcacctcaagcaattgccattacctaaagacatgataaaacagagaatagctcctatctcgatatgttttgtccacttggcgtcgttatgcttacaggaaaacaaagcataaacatggaaagttgaatacaagtattacagcacaacactaaacaccagcacaacaataaacaccaaaactaatctttatgtacaaatcattagcttctttgaatgcctttctactgctttactcaccatgatgggaatttcatacaataatacagttggtcaataaaaatattcatccccttgccatcatgttcacgcaatagcttatttacagccaaaaacctttgtattattcttatgtgcaactatgatcacttgatttgtttacctaattatttaaaccgttaccacctagggctgccagaaatttgggaggtacagaagatgcaccaacaccaatcatctctgtgacaaagcagcagggttttcgtaaacaaagaaaaggaagacaaatggatagaagggtcaccttacttttgaagagctacatcagagttttaatcttacttttttgttttttagcagataagttgctcatgccatactcaataaaattataaagttgaagctttgtgaatgtgaatatttaaaggcatggcaagtagtatcaagggcatcgttgctattctaattagtttcccctttgacttggtttgtaccatctaatatctactcagaactttattatatgccctcacatgaaaaaagaatttgttaacagtagaaaatacagcccaaatatgtatgctttgtaaataagtctatttatctttctaaatcaaacatttattgggcccatttgccactcagttcttagtactttgctttgtttctgccttctcatgctacatttgtatgggccctagcccgcgcaattgtgtggggttcctgctagtataaaattaattcgtgtgtactttgctttgtttctgccttctcatgctatatttgtatgggccctagcccgcgcaattgtgtggggttcctgctagtataaaattgcaggggctagatataaactctactatttagaagcctggcctatgaatagagcactcaccgtggataccaggccgccggtgagctttaaaattaacagccgctagtaattaaagtcacttttttaatgcaggtacatgcttaaactgtactagtaaatagcttgtgaatttttttcccggtgatagggcatatacaagccagagacgagggtctgtctctaagcgtatcgaatccactaaatagacaactataaagacatgttatacaacctacaaacggagttgtttaatgcttttcatgtagctaggatcaactataaatatttttttgtatatcattgtgtggctatttgatagaaaatgtatcaaagataaataaaaacataattacaatattttttaaaaccacaatataataattttgacttgtcttttacagttagagaaagctaactacgaattcaacacctgcactaactaataacagtttccagcgtcaaagttaacaatttcagaagctggtacaatttgatacaatttgagatagcaataacagtttccagctttcagaaagctaacaatttcaaatggcatctaacaaaaactaatatactaacagcttttagaaatgatacaattgcagattcagatagcttttaagaactgatacactaaaagatgcagattcagatagctaacagttttagctgcatgtgctgcatacgaactagtttatacataagtaaataacaagaaaaaagactctattttagcacaatatgaagaaccagtagttgtttctgtactgccctatcaaacacaatacgaagaattcccctataaatagagttacgtcctactcacaagcagcaacctccgatcgacacaatcaaaacgccctatctcattcttcagatcaaacaatgctcctaaatcaacaaattatagaatcatgacagcacattaataagaggacggcctcacccgtcttctcgctcgagggtgttttctgcaaaaaaaaataagacatacagacaggttgagtcgtcctgttgtacgtgccctaaagagcagtgctttgcatgcatgcccttgcaacgttgattgaccagttgacgctatattaaaactccagggatcagtgcatggcattcagggtctgactacacgtgaaattatggaactaattttcattagagcgagcaaaatatggaaaaaattattatgtcgatccgtgtttgtaatttttaatttcatgcaaaaccgatagagtaaaaaagatggaatgacaagcagattgtcatgcaacgattaatttaataagtataaagttttttattctattcaattaattaacagagtgaagtaaacaaatgttgcatgcagacgtagtaaaaaagaaattgaccttttttaaaaatactcgttggccttttaatgtactaactatatgccccacatctgaccaatctaggccgtatttacttcctcacctattttgcaaaatggacgatattctctgttgtaagtgcaatcaagctctaatgtgggttttggtgttaacgaccttcaaattagagggctaatgagatttatcgagatgatgagcaagcaattaaatattgaggatgatgtacaggttgtaggtacccaaattgtgaatgtgagctgatctcaactcaaggaagttttatatttctcttattttgaatattgagtttaggaaaagccgtactataaaggggaattcaagaacagttcgtcaactatacaactagatgctcatctttctagaataacatcctctttcatagccaaagcagcatgcaaaatagtctgtcataatacctgttttggccagggcggcagtgccgcccatttgaaaggtcctaatatggctagaggggggtgaatagcctatttaaaaattctacaaactcactagagcaagaggttagtaaacaacaaagcgaagcttttttgctctagctctaatggggtgtttgcaagccacctatccaacaattctagttgatataatcactaggcacacaagtgctatgtcactacttacactagaaagctacctaaagtttctatacaagtaagtaagttactctagtttgcgggaatgtaaaagagatggtttgaactttataccgccacgtagaggggatgaaccaatcaataatataaagtccaatcaccaggagaaatccaatcaacaaacacaatggagacaagcaatttttctcctgaggttcacgtgcttgccggcacgctacgtcctcgttgtgtcgaccaacacttggtggttcggtggttaagaggtgtagcacgaacctcgtcctcactaggacaccacaagaacctacccacaagtaaagtaactcaatgacacgagcaatccactagagttacctttcggctctccgccggggaaggtacaagacccctcacaatcaccgggagatggccacgaacaatcaccaactcgtgccaatgctcctccgctgctccaagccgtctaggtggcggcaaccaccaagagtaacaagaaaaccgtagccaaatcgatccccaagtgccactagatgcaattactcaagcaaatgcacttggaatcactcccaatctcacaaagatgaataatctatgaagaagatgagtgggaggtgtttgcttaggctcacaaggaagtcaagtatgttagaatgccaagagagtgagccctaagccggccgacaactatttatagacccctcaaacaaatagagctgttggctctctcactgggtctaactccgggtcaccggatgctctttaaaggggcaccagacgctcaacacctgcgtccggtgctccaacgtcagccgcgtgtcagaatctaacggtaacctgcagagcaccggacgctgagcaagttagcaccggacgcgtccggtgcacaccggacccgtacgcagagagttccgcaaactcgcagggtcaccggacgcaccctaagcatccggtgctcaccggacttaaactcagagagctctgcaaaacggacctcacaccggacacggaccaccggacgcataggcctgcgtccggtgcctgtcgtccagtgccttaccctagctggccaggcactgtctgcactggacgctcagacgcagcgtccggtgctccagaagccagcgtccggtgagtgttttctcagcgagaaatactcctgcgacttgtgccaacaccacaatgtgtaaaccaacatgtgcacgtgtgttagcattttcacaaacattttcttcgaaggagttaagttagctcactaggttctaaaagcatgcacatgaacaaagacacctagtggcacttgataaccgcttagccaaagaattcccctctttatagtacggctatctatcctaaatgtgatcataccctctatggtgtcttgatcaccaaaaccaaaaccctaagcaatacctttgccttgatctccatagggttttgtttttctctttcttcttttccaagttgagcacttgatcatcttgtggtcatcaccatgatcaccatgatcatcacttgctccatcacttggcatgtaccaacctcattaagtctacacacacttagcatagaggttagtactagggtttcatcaattatccaaaaccaaactagggctttcaccattactgaccgtctggacccatgtggcacttatacctccagatatgtcccacaacagtgatcttcttccacactcgacagaacacacagacagacaaaccagagctctctctctctccctccctccattgttgctccttcacccctcaagcaaatccttgattccaaccagcaaatcttgagagaaaaggcagcaaaactcgattggagagtagatccactgattcccaaagtcttagagcatttggttcatgtttggccggcggttctagggtttattactcttagagcttgctcctagccgtctaagtttcgcccttgagcttgccctcttgtgtggtagcctagggaggtttgtaacctcattcttgtagctaagaaattacccctcactttaagagttcactctcttaactggagaacaagggtagggcaagcctttgtggcaagcctaagcctatggtggcttcctcaacaacatggacctaggaaaaccttggtggtgagctaaactatgggataaatcactgagtcttgtgtgctactacagattatttcttgtgattgactctttctagggtttggagactcaatctaattttgtgagagttttctatggcatccagtctttaaactggatcttgtgttgattttgcaagattgtgtagtttatagtttcagtttattttctacaaaatctcattactgtctgctcatacgttgaagaccagcagtgacgccctctattctaacagagttttgagttaaatttttacaaacctattcaccccgtctaggcctcctttaacttctaggagatcctacaagtggtatcagagtgggttacttcagatatgcttcaccgcgtgaagtatggaagttggaggaggttcaagaactgttcgtgatccaaaagatggtggtgtacgtgtcgaggatgttagcagcagtagcgatatgtcactctcgacaacaagcaacaccactatcaagaatgacaaagaccaccgatgcggaaagaaagaaggaaagaagagcaggaagagaagcaaagagaaaggcaagagaaagagcagcaaaagcatgatgataagccacgaagaaaagaagaaagaaggcttatacgtgaagaaagagccaagagaagggcagcaagaacaaagcaagaagaaaagaagacatatgatgcctcatctagtgagctatctagtagctcggatgatggtgatgatgatgcatcatattatgcctccgagggaaacgagaagaacaaaaacaaggagaagaaggacatcaaggataaaggcaggaacactaagaacaaatatgtagttgtatcctttaattatacttacttgactaaccatgaccgcaagtctttcatcaatgtacccgcgggcaagttgcctcatttagatgggacaaattttgccaagtggaagaactcgatgagggctatcttatcggtcttcaccctggtctttggggaattgtgtgtagtggattttaaccaccggagaaccccgaagagccaaccaatgaagagctagctgatgtccatctcaatggccaagccacaagtattcttcttagtgctttagatggaaatgagtacaggaaggtgtagacagtaagaaaggccaaaattaatttattgatggccaagataaatagatttgtgattgttgatggtgaagggccacaagaaatgtttgatagattgatgaccttgatgggaaaaattagaggttatggttatagtgagcttgatgatcacaaagtggtgaaagtcatgttggaagtgttgacggtccttaagtactaaaattaataatcaaataaacatgaaaaaggatcaatatgaaacaaacatctagaattagggttttatctgacagaattccacgagctttggtgtttatctatttctgcagggagttatcagaaaatatggagagaaggcccacatgtcatgtttacaacgagataattacgtgccgcgcaattttcctcaatctagaagggtccagaagccatgggaacgaacgagagcacgatcgggctcgggggcagggcggccgcccaccccccttgggcgcccgcccagggttggagttggatcgggactctgcttcgggactacgctccaccgacctaaaggatcaatctaaaccatacaatctatgtcggtttgatccaatggctcacgttcacttgaggggactataaaaccagaccccctggcccctggaggagaagagaagaaatcattattcagaggtagccatcaaagttagggtttagagcttctctcccacagagaattagaattagctactccctaatccttcaagtttagaggtttgattagatagcaattagagaagtagagcactacgctctcgattcggatcttcggtaataaagattggtattattcatatctttctctaattctttgttctaattgcattatgtctttaattagtatgttcttagtttgctctagttctatatttgatatagttctaattgataatgagtttatgtataagtttgcaaagcgcttagctcttgacgcgagggagttaggtgatagatcacatgtgagcgtggtgcttagatgttatttatctgcaaatgtatcctattggccgggtcgtgtggtagttcgcgatagtgacagcttcattgattcttatatagtccaccctctgttgataggataggcagaaccggtattgtggagtaagtcatgcgatgctctgatttactttatcaatgttccttatacatgaatgaaaagtcttttatgctatatatgatcttgtagataactagagtagattatgacttagtagttagtatataacttagaatccattctctagctaatccgacatcacctacataatgaggagtagtctattttctaatcactgtgttatctacccatgaacttataattcattatcattatctttatggtttaccccctgctagagtaagtgactgtgtgacgagtttctcattagtaatcatgttcttgcaagtttatctctagtctatgccttgatagattttgccccttgacttaatttcatctccttagttctttcgagcaaaattataaataacgatacctggaatacttatcctggtgaaatgctacagtgaggtgttttatctgtgcgcttgcggatagaatagattattttctagagagcctttacatttataaatacctttgtacactctggcgccatgctagggatgacaacctagtatctaagtggtgttagctagtgtcaacaagcatttctggcgccgttgccggggaattatacgagtctcaggaataagtcataaaagggaacaaaagggtaatatttaggaaagccagaaaatcagtcaaggttattcatataaaatattagactagactatagagaaataattgcataaaatagctactaagtgagaaatcataacaaggcacctctgctttggcaggttcaccctattgtttttctatgtttatattttttatacagggtataacaggattgactttgggtacattcaactcttcatcatcagaaccaaagcaatctagagaagaagaagctagctaccaattgctgaagctatgacacaaaagaccttgcaagaattctctgctccaagccttgagaacattccaactggtccaagatttgcagtagaagaaggaatacccgagtttgagctcaagtcaagcctcatcaatttggtgcaagctacacaattcagtggaaaggcacatgaagatgctagtgcacacttgcagaatttcttagagattggaagcacaatccacatcaatggagttgacaaagacgtcatactgcttcgcctttttccattctcactagaagggaaagcaagaaagtggttctacactcatcaagataacataaacaactggacaaacttgtcagatgtctttctatcaaagtttttccctataggcaaaacaactgccttaagaggaaatattgtcactttccaacaacagaagacagaagccatttcagaagcatgggagcgttttcaaggatacatatcagattgtcc

SEQ ID NO: 4664 - DNA, 3835 bp, Sorghum bicolor
tgactcgcatcaccggtggatgtggggcgttcctctcttccactagggaagatggtgcatgtaggtctccttatggctcaactttcccctctgctcctaggggggtattagacaaagttttgtgaggatgctcccacaagaattcttcaggtctatggctctgcccttgatagtgtctggtggagatttggtttggttagatatcctttccactaatttctcttacaaaagtgcaaaaggcctcctttgtagggctaagtcataatcaagtatggggaaatcccatactcaataggtctttgttgttgtacatgtggtaatcattgataggtctttgttattgtacacctatcaaaaaatagacgacttggagcagcagtggagttgtggcaagaattggtgattgttcttggccacatccgtgatcttgtgaggggttcttatgtcttccctagtggagtgctaaaggcagctctagtggattgcgcgtgttatttggctaccttacttgtgattaggttcttgtaatgtccgacgtgaggatgaggttcgtgcaacatctcttagccgctgaaccatcaagtgttggtcgacacaacagggactagcgtaccgacaagcacgtgaaccttaggagaaaagtcttgtgtctcaattgtgtttgattagaattctcctagtgtttgattgattcacatcttggtgattggttcatcccctacaaggcggtataaagatcacattctttctatttatattcccacaaagtagtgtaattagctttagttgctagctttatcttgtgtagcttagtttactagtgtaggttgtagtgacttagctcttgtatgcctaatgatcttagcaactataatggttagataggtggcttgcaaacccttaattagatctagagcaaaaaacttcactttgttatttactaaccatttgctctagtactttgtagagtttttaaataggctattcaactcctttagccatattaggatctttgcaaatgggtcagctttgaaccgactcttattgtgaaggcagattgatgcctccctatgcttggttcaaaagtttcccgctgctagtcttgtcaccaccctttcctacgagggttcccttgttcgggtcttcgttagggagaaggccggtggtagtgtcaaggttgacatcaggaactatgtgggtagtgcaccctttggggtcatcggtgagagcttatgctctggtggtgggagcgctagtcttgtagcccccgtgcccatcctttgttgtacttggaggtctagttcactgtcctcaaggtatggatggtgctctcggcgtgctcaacagctactctgccgcactcacagggaggatgggggttttgaaccaacgtgggtaatgcaccctatggggttatcgatgagagcttatgctttggtggcgggagcgctagctttgtagcccccgtgcccatggtctcgtgcgcggtccttagggtgcggacggcgtgctcgacagtcgcactcattaggaggatgggggttttgaaccggcggtgatttgaagatatgatgcagtttaaactggtgttatagcatgcaaatcactctattaacgcagataataaacatgtttgactctgtagtggtttgtgcttgagccagcaacgtattattttagctctgcgtcttaaacagaatcaaaggtggcacatacatgtccttatcaaaccttttgggaataatcggattcctttttgttctgtgcatgtgttttacgacaataagccaatgattcaggcaaaaacgatgggacaagaatgccattgttaattattgacacttcatttcccccagcccggccagctagcattacgacaataacccaatgatttatgcgaaaacgatgaggaacaaaggtatacatgctgtgtccttatcgctccgccagacggctataaatagaggtatgcttctcccattctgagccgcaatccaagactgctatctcatatattatcagagacgctcttcagtacttcaagcttagccatgtctagggtgttggaacctctagtcgtcggcaaggtgattggggaagtcatcgacaacttcaaccccacggtgaagatgacggttacctacggctccaacaaccaggtgttcaacggccatgagttctttccgtctgcggttctgtccaagccgcgcgtggaggttcagggcgacgacatgaggtccttcttcacgctggttggttcccttgtagatctcgcttctctcacacaaactaattaaagtcgatgtgattcagttattctcttagcttacgacacaggtgagtgcatcggcttaggtccgtagtgctgtaacaaatttcagcttacaagctgatgtttttttttaattgttgtgttcttcaggtcatgactgacccagatgtgccagggcctagtgatccatacctgagagagcatctccattggtaagcataaacatttgtatagagtaatactaaagaaaaaaaactaactataaataaaggtttaagcatatgactagcagttgactgtaggattattagtagtgcttgcatgctgtccctgcacaaatacagtatggttgcgcataaaatatagctgacaagagtaaacttcggtggacacttacaggatcgtcactgacattcctggaacaactgatgcttcttttggtaagcccttcaatccatcatcgatttaattttcttgtgaaacctgttttcgcttaatgaacatcaggatagagaggtcgatcagatgcacaaaagaaacttatagtctagctaaagattcgatcgagtacgcaataattacatggatgcaggaacggagttggcgatgtacgagagccccaaaccctacatcggcatccacaggttcgtcttcgtgctgttcaagcagaagagccgccagtcggtgcgcccgccctcgtccagggactacttcagcacccgccgctttgccgccgacaacgatctcggcctcccagtcgctgccgtctacttcaacgcgcagcgggagaccgccgcgcgccgccgctgatcgatcaccctgcgggcagcaaccgcatcaatcctcagccctactcccatctccatatcgcatgcaaggtgcatgcaagacctatagctactatgtggcctttactatttcctatctggccatcgccaaataagagctatcagctttcagccagagctagctccttgtctctgatgatagctagtctctctgttcttcagtttttcagttaatttagttagtagcctctctgtgcatgagcactcgtgtatgtaaagttggagctcgtgcgtacttgtggcactagtgtgatcacctcaactcgatcagctcctaccacacatggagatgaaggatgcgtgaatcatgctgcagggaacacgcatgcttgactggcatgggagctgtcagctgtgcttgtgagagccacgaaggctgccgatcgatgtgtcgagtggcggtgacgggagaggtaaaggccgtagccatggcccatggctctagctagtgctctcctacaatgctgttatgcttgtgtgcctgcttgcagtcagcgcactgtactttgttcctgacccttttggaatgttttaccttgtgtaaaatgtgatcactatttttcgtttgacaagacaatatatatatatatatatatatatatatatatatatatatatatatatatatatatatatatatatatatatatatatatatatatatatatatagatatgtgtatatatatatatagctctctttagagcaatataca

SEQ ID NO: 4665 - DNA, 6635 bp, Sorghum bicolor
ttttttgagagcggagtttttagagctggacgtgtttggcactgtggagctggagcggagctagaaaaatgggagcagaggagtcccaaacaccctctaaaagaagctaaaatagcttagttccattagtcacccaagaatagctaaaataattttagctagctaaaatttagcaaggggaaccaaacagctaaaaatttagcaacagaaccaaacagaccgttaacagaagccccacgtatgtaattggaaagttgacccgttgccccgcaaaagattcttaaacatgatgatttgtgtccttaaaagcttcagaatggcgttttgttgttgatccatttggcgatttggatacgatggatcagcttaccagttggcgcaacatcggagcagtatgaccgacgagactgcatatctgaggaaaaaaggatcaagtttgaaactttaaatgaatgttgttctcaagaattatgaagttttcactgaatttcactttggatgttagagaaccccaaccgcttatgttcttgaatgaatcaaacaaattcagtgtatgcactttcattacacatccgaacagaattgcaccccatccactgatgaatttaactttgtatgcaccttcgctgctggcgcatgtatgctcttgaatgaataaaaaaaaacactcaaagttcggaacagaattgcacctacattaatcactattcaccggaacgagaaccactacttgtcactactcactctaaaaatactaaattaaaaaaaaagactgtaaaaatactgcaacatacatgcaccttcattactgtcacggaagtctaagtagtcatatatcgtgagtctctgacactgcatgaatggctagtttttttttttttaaacatcagcaagctttattgatcgatcaaaatagatacatcgtttacaagcaactgtaaaatagaaacaggtggctcatctatccaaatatgagagtttttctctcgtaaagcttgcctagctaactcatgaataactgtattgcagtttcgattacaatggctaatagagattgacacgaatttcctccaatagataacacattcatcatagatagttgttgctgccgtagccgagaaacccccatccttcattgtattgactacctccatacaatcagattggatttccactcgagtacaaccaaacaggttaacaagtactccctccgtctcaaaatacgtgggttttcctaaaaaataactttaataaaatatatattaaaaatattaatatttatggtatataattgatatcgttagaaaaatctttaaatctaatttttaataaatttatttagagacataaatgttgtacatattttctaaaaatcgagacaaacttacggcatggaaataagaaatgacaaataatttgagacagagagaattgtggtgcattaaaatgttaactaagtttagactacgttaaacttttccttaatttctacttccctgtgttcctgaatgcttcaactcatagagttgtcctaagtcaaatttttaaaactttgactgattttctagaaaaaaacgctaagatttatagtatcaaattaatactatttgatttattataaaatatatttttataagatacttattttatgttatagatattaatgctcttttttgtaaagttagtcaaactcaaaatagtttgactgacatggattttagatgttgaagctttcagaaacaaaaagagtaaccgtacttctactgaaaatatcatcgaacttttgtatctccaaatatgctgagtgtaaaaaaatacattttataatcaatctaataatatttatatgcatcaaaagaaatatttttaatatatatttagtctttgatttgagacggaagagtaccatcactagttttttgaggagctgtgggccccgatgacccgtgcagtatcaacaaaataaaatactgatcccagcaggcaccagtggccggcggaaagcagaagttttaatttttaaagccacactggggtctcgcctgcttggctcctgtaaactgcagtttttacatcctctcatctcccgcgtgctgatacttgcctgctatccctgctgttaacgacgacgttcgccgtagcagcgaaggagcctcgccggctcgaagcaaggctgtcctagccaccatggccgtgtccggcgagaagcggccaccgccaccggccccggcctccggcggtaactctctcatcttctgctgggtggattaattggccctgacaagtatgcggtcctcgtgatgttatcttgttctgcttgcctatggttcttttgtttgtcttgattcatgcatgtaatcatgtgggtaggtataggattaggattaacctttgtttatgcctgaatagcactaatactgacgcagtaattcgctactctgttaactggcccagagtgcctcgaaacgatccttttgctggatgcaagcatgaagacaggaccatggccttttcacctttgcgtttattattcctttttctagagagcattttctggttcttggttcgatctgctatacaaaaggttatcaactttccatgcttttagtagtaactattttgtatatatccattctgctatctcaagtcgcaatgattcatttcaacgctacataaacatttgctgaaaaatatgtggatctgtttctagaaggtcaccgctgtagttttctttttaaggctctgtttagattggagaccaaaatttttttggtgtcacatcggatgtgtccgaaggatgtcgggagaggtttttagaaactaataaaaaaacaaattacatagctcgttaggaaactgtaagacaaatttattaagcataactaatctgttattagcacatgtgggttactgtagcacttaaggctaatcatggagtaactaggcttaaaagattcgtctcgcgattttcaactaaactgtgtaattagtttattttttttatatacatttaatgttccatgtatgtgtccaaagattcgatggaatggataaaaaaattttgggtcagggcttaagaaaaaaacagtcggaaaggtgcgcttctagatgccctaaaggacgatagttacggatggaaaagtttttccatttacagttctctttccacaggaaaaaaggtgacgttgttcatcgaaccattaaattcatgatcgattggttccccaccctgccaaaaacaaaatatattccagatgttgtattatttgtgatagtcctattgtttaaactatgtgtaaggacaaaattaactatggatgcgcgtgacagcgtgtcgaaaatgacagttatattgggttcagaatttgaaaaccaggacaacacgctccaatttcttattggaaccagactttgagtacaaatagagaaactggcaatttaaactgacgtaggagtaacgttttatcaaagtcaatgcctgctttgtgcttagtgtgtcacagactcacaggtgcagcttatatagagttaattgtttcttgggacatcgatctttaacctctgtggaccattggttctccttttccggatcggatttttcacaagtcgtcaaatggtttggaatatatttattttttgttcaggctatttgctacaggatatttcagagacgtctaatattcgtctaacgcctctttagcttcccaccgcactctgctgtggaccattggttctcctgatcggacttcggactttacaagtctgcaaatggtttggaattttttttcccttgagtctgtttgcaaggatgcttcagagacgtctatttgtctgatgtctgggcgtgtttagtttctaaaggaaaaaaaaaattacgacactatagtattttcgtttgtttatgataattattgtccaaccattgattaactacacttaaaagatttgtctcgtaaattccgaccaaactatgtaattagtttttatttttgtctatatttaatactctatgcatgcgtctaaagattcgatgtgacgaagaattttaaaaaaatttagattttggagtgaaagtaaacaaggccctgttgaggaccgcagtaatgttttgacagtgagagcactccgccaactactaccgggtgagatgtaacatggcgtcgagtagagattacgtgaactcagtacatgttcaaagtttccttgcatttccgattttggtcaaaactgaaccccagatgaaagtctgacactgaacatcagccctatgaaagggcctgcttcaacctgcgatcgagataaacacaactggggtgcatgcattcaacaaaataaactgcataatcaaatgttctcatttcactcgcaggaacggcaaggaagaagcttatcctagcactgtttatctgtttctcggcgctgctgtacaagcagattcttcagccaccactgcccaagatcgccggctcgccgggcggccctccggtcacggcaaccaggacacggctcagcgacggcaggtacctggcctatctggaacacggcgtccccaaggagaaggccaagtacaagatcatctttgtccatggattcgactcgtgcagatacgacgcgcttccaatctccacggtactatgctttgttactgttttctttattatgtgacagaatattattgatctgtttcacggaatgagaaactgctggtggatgcaggagcttgcacaagagctgggcgtttacctgttgtcctttgatcgccccggctacgccgagagcgacccgcacccgggcaggaccgagaagagcatcgccctcgacatcgccgagctcgccgacaacctgcagctcggcctcaagttctacctcgttggcttctccatgggcggcgagatcatgtggagctgcctcaagcacatcccacacaggtggctttcacttttcagaagtatctttctcagtactctctggcatagtttatcagtcaaacgaacaaaaagacaactctgaacattgtatccatccatccatcgtgaatcttggtgcaggctctccggcgtggccattctcgggccggtgggcaactactggtggtccggcttgccggcgaacgtgtcgcgggacgcctggtaccagcagctccctcaggaccagtgggcggtctgggtggcgcatcacctgccgtggctgacctactggtggaacagccagaggctcttcccggcctccagcgtcatcgcctacaaccctgccctcctgtcccaagaagacaagctgctcatggcaaagtttggctatagaacctacatggtactgacgtagtactgtacaaaaaaatcagtcagaacctccatggtgctgctagcttttagaacaagtttgttcacaggtttccgcctgtgcacgtgcgaatgcgtgcgtgcattgtgctttttgcatgcatgcagccgcagatcaggcagcagggggagcacgagtgcctgcaccgggacatgatggtcggcttcgggaaatggagctggagcccgctgcagctggagaacccgttcgccggcgctgatgatgatggccaggagggggcggggaaggtgcacctgtggcacggcgccgaggacctcgtggtgccggtcagcctgtccaggtacatcagcgagaagctgccgtgggtcgtctaccatgagctccccaagtcgggacatctcttcctgatcggtgacgggatggctgacaccattgtcaagtccctgctgctcggagacgatcatccgtcgtcggcctcagccctcacagcctcctcctgattctccatgaatccaccagcttgtcatgtagtccgttcgcatttcgatcgcgtggtccatcgctcactgtttttgtaaagagatatatactagtgccgtgctctgatactgcagctttctctagcgtgtgtatgcttatgtgcactgaagactgaacgaataaggtttcatatgtaaagatagtaggtgtctaggtgatgtaccattctcacattcgagatgtgcctttctgggttcgctgcactttccttttaggaggagaagggtagttaaacttatgtgttttggccagctacttattacactacagttatcatggtttgcattgtgattttgaaaactctctcttattagggcactctcttactatagagccgccataacctagaaactaaatggtttctatgtgtcaaactaaggccatgcagccaaacagctaaaactttttgagaaatgaacactttttgaaagaatgtgtaagaggattgtacgctcaattctattcattcgacggtgatgggtacatgtacatggagccgatcaatgccagccaagcgaagctaactaattcctatagaaccggatcagctaactgaatgtcgtaaggcttacaacagatgacgaactagtctactgctatctaactgaaccctgaggaataggtcggtgacacccccctgcagttgtagcttagattgatcggatgcacaaaccgttcctgaactcggtgaacaatggcgccgggagtcctttcgtcatgatgtctgcaaattggtaccttgttggaacgtgcagcaccttgaactggctgagagcaaccttctcgcggacaaa

SEQ ID NO: 4666 - DNA, 5269 bp, Sorghum bicolor
aggcagagctcctgccattgttttcaaaaaaaatgctttgtgtgcaaaacctatatgatggatctgctgggcctataaaaagataggaagtttaagacatctcttgtgtagctactactaaatcatcttctgatgccagagtcgggtcaaattcaggtcgcataaaattcagggtcatcttctgatgccagatttttttttacaagtaataaatacattaaaccatcaacagcaaataactgctagtaagattacatgatgcaagtctacagattgtagagcttgtagaataaagcaatgtccagaggcatgctggttagagcagctagaaagaagctagaaagaagctctaagagcaactccaacagatatgttatccatgttatctatgctatttttatatttttaaagcaaaatttaaagtctaacaggtgtgctatctggtttgctaaaatagcaagtttgctattcctaaatttttgcttgtcatatatagcatgtcgtcctcactagctatcatatacaaagactattgtgaaactctatgctttgagtgagttttttattttacacaatggttaaatcttgtagtttagaatataatttgtctagtctcttggagatgctcttggtgagctaatccatcagccaagagattcaaatttctactaattttacacaatctagcagagctcagctgaccctggacaaatttgtaaaattttgctaagagttgatgccagacatgcgaaaccctcggctggttttaatataaagatatacgttttgcatatgtatttttgacgattgcgtatgcctttttcacctacatattattttggtgcgcccataggcgaatacttattgcgctttatccaaactctgacgggaaatcgaatgcatttgcacaaagaaagtctattttagaccggtctaagtcaaaattttattagtgtttcatttgcatttagtaagctgtcacataagagtttttgacgatgtggcgacgtttttaagaagagagagaaaaggtgagttatgaagatgaaatccttttgacacgactagatttatgaaattaaatatgtatgaaactataaaatgagctttttattgagattgggtgttttattttattttattttattttattttacatggtaatcttgaaaaaagcatcatgaactcctcttaagactgccttgcctcactgaattattgttgatagtctaatttttctttccaaacttcaaaactaggtatcttacctataaactctcaaaattattcaaattacctcactgccctagtttgagatggttttgaccctagcttgtcttctttagttaaaaatctgtttaacacttgataaaagtctttaaactacaaaaaatgtctctaagcatctaaaatttttgaaaaagtaataagatagattggcataccaataatccaaatatagtatttataactcatgaaaatatgtctataatatccaaaaatctaaaaaaaatcctagaacatatattcgatgtttcaacatgttttaaaaaacttcacgtagcaaaaatatgaacacccaacatgaatgcaacatgcattaatgctgtacatttgtatgactgtgtcttatgtttttattgtgcaaagttttcataacatttttataggtcaaatagaatgttttgggaaactttctagatatttctctcatttttctagagttaaatctaaatcttagaaacttgtagagatattttcgctagttataaatattttctttgattatttatatcccaatctatctttatgatttgttggaaagtcatagaagtttggagatatttatgtggtttaataatcttatcaagtatttactatttttaaagtaaataaaaaaataaatcacattttaaaccactctaaaacaagacacagagataatttgaatgtattttaagagttcatacgtctggagtgttcatattttgagagcccaagccgtgctttgcctgtgcgccgtctcgtctcgtgccctactacgcctcgcctcgcctggcctccgtgcttccgtctcacacgcggctccagacttccgaataaaaggggcagccatggccatggcggcgctgcgggaggcctcccgctgcctggcgtccagggggagccctgcggccgcgcgatccatgctcctcgcgcagtcgcgcggcatcacttacaagctcttcgtcggaggttggtttttggccttaattgcccatttcctccccccagttctcagtccttacgcgcgcgtccctcctacttcatgaccagtcgagtgctctgctccctctcttgcatttcgctgtcggagggaaacacatctgttgagtgcctgattcgtcgccagggcatgcgtgccgagtgttcgacgaaatgccctgccagtacaggccgggcggcttggtgccccattgataccatttttagttacactgttttttagtttttaactgaacgcagtctgcaaaaaactaatttagtcgcaacaccaaaatcaaaatcataggaaagtagcgccacattgtgaaatttactcctacaatttcgtaccacaaaatacgcaaaatcagaaacatgcagtttgaatcttgaaatgcgttgcagcacattgattgggtctctgctgcttgtgagagattagtgtatctcaaagtctctgccttctaagagcatggctaataattgaactcattgttggctacatgtacattttcgactcatctatgaaattttcatcgtataatagtgtgccaactaagcaaaatagtgatgtgacattgaatttaagaaagagagaggtagaaatggttatagtacgaaattatgtccgcatgagaaccaatgagatgtgataggtagatgataggagagagaagacatgatttgacaaaaatctatcttgagaaaaccatccattatgaatatgatttttttttgtgtagtgccaacatgactcaatatggaaactgtccaatagtttctaggttgggtctcacataaagtttcttagagattgtgcatcagctctgcattctacttctctactttctcctctctcccttccacctagcataaatcccacttatagcaagtataataatggtcttgtagccaatttaatgctgatatagaggagaagagaggagaatttggctctcatgcaagaaaccagcaagacacgatgtctaggcaatagcagccaagtagcaagtatatgtgaggagaaataggaaggaatatgagacatggtaccacatagtaatagtaataaaaaaatgtagataaataggagatactgagacagctattgtataagttgacttatgaaaaatatattctactattaattacacattgtaatttgtaagtattgtaattctttttgtgtatatttagttagacttaaactgctaacatctttgatcagaatgatcttttgtgtaacaacataggttttggtgtgggtttgtgtgtctaagggattttcccctgtttttgttctctttttaataataatgatacacagctctcctgcgtgtttgaggaaaaagaaagtatatactccaaatgtgggcacccttctagaaggtccgcctgttatctaggactgggacagttaattttagtggtttatatgcctttatgccttatagaaataaataaattacaaagagcacagtttaaagttgtcaatgtaaaaggagtatattactgagcatcggaactctagtagatcccaactaactgtttaggtttatattgcttcttctttttattaagaaaataaaactgccatccttagatattccagcaagggttcgtatattgttaatctatgctgccttactcttagctatgccaaattactaagttcacatagcacactgataccagttgctagtaatgttcttgcaagtacacattgttaatgttattcaaaatatgatactgatattgcatgagctctacctgagctaagtgggagctaaagcactaacaccgtacagaactgagaatcacggggaccattgggcaactatccacagctatttataacctcatccgagtcctctgcccttttgcaggtttatcacaatttgcaacggaggaaagcctagcagaagcattctcacgttacggacaagtaatagaaggtctatcctcgtcacttgccatttgccactttgccagagcgcatttctgttggtacctatagttattctgcctgctgttgttatgtgtcaccaaagctgggcttcttcttgcttgagtgcagctaccgtcgtcagggataaggtgaccgacataccaaaaggattcggcttcgtgaaatttgcctccccggaagaagccaataacgcgagggaagagatgaacggcaaggcaaagatttactccttaaatacatattactgtttgttgccttttttttccccttctttgtgccatctggaaatttaaagagctgagcaatgtgagctcctgacaggcattgaacggccgggtcatatacgtggacatcgcaaaggccaaaccggaccgtgctacagatgctctcccaatagcgagaggtcctcctaagccaattagcaacggctgataaaggaaggccctggtttgtagtttacatacttcctcagatatggatactcttagatgaaacgtgaagtgcaatattctgcagaatttcgaggttttgcttgaacataaataaagttcatttacacatcctgggtactcgtaacatgcttgtccggatgagatgctgtgtgtttcttgtcatgacaggtgctgctttaaatccgtaatgccagcggccacgagacatctactagtagatgtggttgcggatggtagttgcatgtcgtcttgaatctgttctattctagaacagtacgttgcccccgtttgcactgtgtttggaaccaatgctttgcagttcatctgtaccttctctatggtcggtccctggaaattcctttttcgttttgccgatccgatccatggaagttgggaatctggatagtgaataataatgctctcgactggggacgttttcttcttgtattgtcgtcacgttgtttgttataggataatataggaaaacgatgcacatcagtgctggacatgatggtgtacagttcctaactgttacacgaaagatcgctactcgatgttgtacgctaacgctaatactcctgattaaatgacacgtcttgtctgc

SEQ ID NO: 4667 - DNA, 3387 bp, Sorghum bicolor
acatttccataaattgctccgcgaacttctccatggacaaagaatagtattgccggttgcaacagacgaacggacgcacacggcatgactaaagcatggggctaattttcgttaacaccttagatcgcgccatgaatttaaagaagggcacatgggattggtcccaaaacaccgactaatcacaaattatacatgcaaaatcatttttaaactatatcctgtactaatactaacctagtgccacagttatgagcccacaccacattcaggtcaaccccccatgtctctccgtagttgggctgaagtcgcattcaactccgagccttctcctgcaatgttaaacacgtcagcatcgaatcatggcgaatgatggcaaaataatatgcgatcgggtaaagcgaaatttcaatctttgaacccaaggcgattacaatttggctctggatcccaaaaccattaattactgcttctatttgccccaaaaaagtggcattaatgctgggattagctccagcaaagacacaagagaaaagaaatggacagatggcctctctctctctctaccatgtagattagcaggcagtaccattgaccagacccaatgcaacacacaaaccaaaacaactttaagtgagttgtgtgtcatcatcattaaccaaggtgggatatggaagcaatcttgggggattacattagtgggttgctactatgatatgacttgaggaacaaattttcacccttttcttaatcgaaaggcgattaagtcgcaaacccgggatgcaaatatctccagaatactaacaagtcaaccatcgaatttaatatatacgctgtcagcatttaaacactgcaagctggaaacaatcaaaatcccagagctgcaattcatagggtgggagggagatgacattagaggaggctgctcttatgtgcatcaaacaaagtggcattaatgagtttgcttatctcttagccattgtatcaagatgcgcaccaggcaatgtatgggtgcacaggacttgccttgcgtcattcaaagacctaaatacctactccatctatattcaagagcctcatttatttaaatatctaaacaagaaaaatggctcaacattcaagcccatttagtgctcatttagcaatactgtgcatttgaaatactgtgcccaataaactccattcatggccacatcaagttgtgaaatcaattgggagccagtcaaatttcaactgcacaagctttataaataatcaattggaagccagtcaaatttcaactgtacaagctttataaataatcaaaaggaaacgaaattggtggtttcaacactcaactgcacaacaaataataattgtcataattatctgattggcccaactaactttccagtggcacataaggtatttattcctaaaatctgtgggatgtcagtcattttcaaaaaattggaacatgtttttaaatatagatagtgagtttaacctctcacccaaatgcaataaaaaaaataagcctaaatctagaaaatgttgttgagcaagtgcattgctagctggctaaaaatactgattaacaataaaaatttacttgttaagcaccaggtaaaagtttcccaggactggttaaagttgtgtaaaaagcaacaaaaactcaactgtagttatgtgtcccaggtcctgttttcctcattctgatttgttgatcttttgcatatgacccaacaagccaccacaaaacctctcacctagcacttctcttccacccaacgcatattcaatccttcctttgccactccccaaccatgaatatgataggcaataaaatgcgtacagttgtactattgctactactatgagatagtagagagtaataattaaatgggagcgtagctcttactgtcacattaaagaaaaccaattgacctcccatccttcttcccctataaataccagccatttcttctccaacaacaccaaagaaacacctctgagcattctaaagctcatagtcctctccttccggagcatttcacatcgctctcatctccggctgcttgcatccagcgcctcgtcactctgcaaaacagtaagtcccctatcatctgtatctaggcctctaatcctcgtaacagtagagcatccattctgaagtgtatctcaatcagctgattcaacgtttgatggatgcagacagcacatacctccaaaggatgagccgcagcaacaggaagagctctaggggccttgacctgaaactgaacctctcgcttcctgcaacagggggctcctccaggagggcgatggctgatgaggagtcatccccaagctcctgcctgtcgtcagagaacgagcatggccttcagtggtccaacagccctgaggccacatccatggttcttgctgcctgtcctcgctgcttcatctacgtcatgctcccacaagatgaccctcggtgcccccagtgcaagagccctgttctccttgacttcctgcaggacaacaacagcaacagtaagaacaacagtaataatagcagcaggaggagcaggaggggatgagcaatatggttccattaggccgcacaacatcaagaaaaagagctatatgaagtcctaggtccagtagttcttttttgtccagtcatttcttcagtgtaactgtgatatatccatactaaaattgcgaagctagcacccatacgctagtatcaaagttttgatatatcacagatacactgacgagggctatatctttcatccttgtttccttcctttgcggctctaaatgtaatagttttgtttagacataggaccagacttcctatcttttcgtttcaagataagaaaagttcaccctgatagagtgaaattgagaagtaacttcattctatcatacataggagcttcaaatccaagatttcctcattattctgagttggacaaggtattgacacccgacataggaagaaggggaaaaaacagaaagaacagtcaaccccaaaaatgggatgttagtatcacaggttagctggattgatcaattggcactactgcgtccacgttgcaacaaaaagatgtgtgcttcatgaactctatcacccatgaagacatcaagtattgaaatggtgatggaatttcaaattggaaagagatatgtttaaaaaaggttgaaaaaatgttggtgtgacgccatgcaataaatactgattaatttcagcatgcgtcactctgtttccatagtgcatccatctgaatatgagcattattacgcaacaaccttacacaatgctgctttggtcaactatgtcaagccaatatatttaagttcacttgataaaggcgcctcaggttactccaagtggatttgaattaaatcaaaaggagaaag

SEQ ID NO: 4668 - DNA, 3763 bp, Sorghum bicolor
ataacgcataaggtatagggcacagggcagaagggcagtcggtgagagtgggataaggaacggagggccgagcgcacgcaggggcgtcatgcgcctccccttgtttggttgcgcacccgcgcgtggcaccgccgcatgacacgacgtagcaaccgtcgacgacgcaagctgcgtgctacgccgcaccaacccctcgagagttcccgactccaccggagagcttgccgggcaaatccgcgcgcgatccatccatccatccgtcgcccgccgtagtgcgcgcacgacgcgacggcacgagggggcgcgcgcgtgcaccgacgacgccctccggaccggcgcgtcgtctggccggccctcgctcgggatcgctgtgcgccgcgcagctctaggcccccgccgcggcgctcgagaacgaaatcatccctcccgcgtgctgctgcacatgcgttcgtcaccggcgcccatccccatgctggagccatggtgtgcctcgtgtggccattttgcgcctcaggggtgacgacccgtcgcgactaccacactatggagctcaccgtgtggagtgggaccgatcaaccgtagaaaagtctcctaaaattcacttgtcaaatcttataatttctaaaacatatgctggatagcaagtaaaacatggacgcgcggtgttgacaaatatgggcgcgcggtgttgctggatggcaagttgccaaaagatggcaactcatttaccaaactcttggagtggctattttctaattttgccaagtaaacaagaaatagcaagtttatttagaaaactgttggagatttactactagcaagtgctagtgaatagtgatgcatagatgtgtgttttatagttggtcaaaacatccacgcctcgacagcaaagtccatagccaaggtggctaggtacaacatagctcgactgtttgtcatgtctatgccgtgccttttccgttcactcaacacgacaatgtagatctagctcgataagcataggctcactaaaacctatttaacaccttttatatctgaaacctaactccagtcctcaaatctcgtcccttcacatccaatcgttgccctcactctctctgcatttccttctcttcgacaaccacctttctttgcactcctgcagtttgcatctctccttttatccgtgttgtactccatcgctgactcccctccccttccttcttgacttctccccactagcacatgtggcgacgcctaggggtacaaccctatccatctcagggcggcggcctagtggcataggggcatagccgcgccattctcggcgggtagtagctgtgtagggcagcgtggtgacgccatgtcctcgtccaactcatacgacgggtgaatgacccgatcacgaaaaaaactcatacgagtatacgactgtgtaatcgcgcattgacataaatatatgagctcaacagaccgatggttgtttcttatcatgcttgggtcgaaggcacgccccatggtaggcacaacatgacacaaaagggggatgatatgggctgtgttggcttgaccattgccttcatcaagctcgttagaacaccccaattatgtgaaagttggagtatttcggcgacactggtcaagggcagaggaatatacggccgatcgagagtcaacctgtaatctcgacgtgcatatgcaaaaaggtctcgatgcaagaatcctccccagttgaccaaccgcgcgaggtggagtgaagctcaagcagcagcaagagtccccggactaaaccagtaaccaccggcccagcacggatctcagagcagatgcactagccgataggcaaacctccatgctcaaaggggcccaggaggaagcagaagaatcttctacggttgagctgtacctttcgtccatcccctgcccctataagcccaaaaacaaaagtccctttttttaaaacacgcacctcaccatacctcctcctcttcttctactagtagtttttattagtgtacccgctggagtaattaaaaggccactcccactcgcgccacactttcttccactgcccacatgcgcgcacagtgctaagctagcaaggcaagcccagccagctgagctccagtccagcaccgcagcaggtcgtcgtcggtctcgccgccatgagcaaggagaagcaccaccgcgactgggtcctccgccgctgctgcggctccatcgccgcctgcatcctcacgctcttcgccctcgtcggcttcatcgtgctcgtcatctacctcgccctccacccctccaagccttccttctacctccaggacgtgcagctccgctccatcgacctcagcgaccccgctctctccctcgacctccaggtaccacgccaattaaccgacgtgcatctgcatttggaacccccggccgatttcgtgacggagaagaagacgaactaacccacacgggtaccctctttgcaggtgacgatcgcgtcgcggaacccgaacgaccgggtgggggtgtactacaagacgctggacgcgttcacgacgtaccgggacgagccggtgacggtgccggtgtcgatgccgtccatctaccagggccacaaggacgtgtcggtgtggtcgccggtgatgtcgggcgacgcggtgcccgtggcgcagtacgtggcggacgccatgaagcaggacatcgcggcggggtacgtgctgctccacgtcaaggtggaagggcgcgtcaagtggaaggtcggcagctgggtctccggcggctaccacctcttcgtcacctgccccgcgctgctcgccaccagcgggagcgccgtcgccggcggcgcgttcgccgccagcgccgcgtccggagtgcccgccggcgtcaacaccaccgtctcgctcaagttcacccacccggccgactgtactgtcgacgtgtgagttgcgacgacgacgacgggcgttcgttcgtactactagctagtacgatgatgaggatcaacctcgctctctcgatcgcgatcgcgattacgcctagtagctatcgatcgagcaattaatcttcttttgtagcaaatgatgttgttatatatattttccctttccgaacttgtgcagaataataagttaataagctgctagctctatctagctatacaacacatgtgtcgtacatttgctacatgtattaccatatttaattttttatgcgcgcacacaaaatctcacaatttagtttcaaaaaactagtactactatatatgtagagtaaatttccactcaagtagtcaagtgtacaatgaaaattgatgccactagtcgttagttactgtacttgatacgatatcgcctcccttaattttgtgcgttcaattgagctgtgcgtaacatggccatgtccccggccttaacttacggacgagacggcagtttcgagcgcgagatatagaagcaggtacgtgtgccgttttctaaggcccgtacaatgcaaacgactctcgttgaaagggaaacagcacaggatttgagagcgacccagcaccatactacactactcgtgcatctgcgtgccaaggtcgggcacatgatcggcatatagtttggccgcgcgtcacgtcggctgtgtatgtgtgtagcaaaaggggacaattgtagttttttttttaaaaaaacccagaggcttgggtattatcaacagacggatgattgatggagcgagcgagaggctgatcggggcaatcatgcatgcatcgccccagagccagaggacgaacgaacttgggcgtccaccg

SEQ ID NO: 4669 - DNA, 4306 bp, Sorghum bicolor
atcaggtccttgccaccatgagtagaatggcgtggtcagtcaccaccctttgtcactaacatcacaacatgcttgggctgcttgtagaccttggcaaggtgccaaaagagttgtggcagcacagacaacgtcgtggcaacttgtaggttgctactcagtgtgagtaggaaaggcaatagaaacatctatcttgaagctctatggggatctttcgggaatggagaagctgcttctcaaccaagatgggcataggttgtgtttcatgataggagaggatctaccaccacccaacggcattggggtgaggctcgtccatggtggctggggtgagggcgagtagggagacaaccatagatcaactgaggtggtaggccgcacaccagctgaggatgcggtctgctttgcttcctctgcctttagtcatgtgtgtgctaatggcaccgcctcccgccattgccgccctggcagcccaccttggtaaccacgtgtgccgttgacgatgatggatcaaagtcgagctcgtgcaagcaacggtgatgtcgtctatggctatagttgtcaacgagcagcattgaggtaggggtttagggaggtagtggatgactgctctaatctaaggcagacccattgtattggggaggttgcgtgcatcgagacctaggttcgctgggatggccaggcacacattgggctggctgcatcggcactgccagcatgctagcaggtggctatgccgagctctctagcggagggaggtgggggcagcacatctacagacgctagtggtcttggaatgggcccgcaattgacggtgatggtcgggcagccatcccacgagtgccactagtgtcgtcgtccgcatcaccgtatagctagggtgtgcatagcaccggaggagggagaaaagggtcaatggctttgggtcgggagccgatggtggcggcaccgggaagggggcggctcatctgacctaggcagatctgtggccggaaatggcaccggaggcggggcttttgtgagggtcgtggagggaatggagggggaaagggagggggagggggtcgccggtgtctaggtcatagccagtggaggcgccaccgtgtgctggggacggccaccaggtggcgtcctctctatcaggcaagaggggaagacaactataataattatttgttgttatttcattctaattagtagcatgggcaccagctcgaagacgacaatcagaatcaattgcttgacttcactctttagtcatcaggcttctactcccaaaataaatatattttctagagttattcaaagttaaactattttaagtttgtccgaattcatagaaaagaacacaaatatttatgacacaaaaatcattaaatacatcataaaatatattttcattatacatatttggtgtcatagatgtttgtactcttctatacaaaattggtcaaatttaaaatagtttaacttaggaccacacttagagttgatttatttctaggatgaggaatattttttctctcacaaacatatgaaagctttgcacatcaatttttactcatagagggtctcaaagttgaccaaatttgtcacatatatagtgtatgttactcaagaagtgtaaaaaaagattgtaggagatgctctattatctaaaaagagaaggaagataggtcataacttgcaccgtacgccaacagtagttttctatttttttgagctagtcgttgcagatacgacgacagattgcttattactgcaaggctgcctatgggccttgtttagagatactgtagcactttcgtttttatttgacaggagtaactaggcttaaaaaattcatcttgcgatttataggcaaactatgcaattagtttttatgtttatctatatttaatgctccatgcatgtgtcgcaagattcgatgtaacgaaaaattttgaaaaatttttggtttttgatgggaactaaacaaggcctcaggtatatacttcacgaggatggaccacgatgggattgtcaggatgctatggaactcatctattgtgtattggtccagcacgtggaatggtagattcttcagtgcgataccagagatgtctgcaggcctaggtaccggtggtatagccaattataccttcgtcaacaacgaccaagagctttacttcacctacaacatatttgatgacagcataatcatacgcactacgcttctagtctctggtcaaaaccgagcgagcgtttggaccgggcaggcttggatgacagtgaacaaccttccagcacgtcaatgtgatgtgtatgctgtctgtggccctttcacggtctgcacttcaaatgcagatccttattgcagttgcatgaagggattctctctaagatcacctgcggattgggagacagagaacagaacaggcgggtgcatcagaaatactccactgaagaagtgtcgcgctgatgatggaaacaaaacaggtatggcagacaaattctactctatgccaggcattaggttgccccagaatggcaagatcatgccaaatgcatcaagcgccgaagaatgtgcacgagtttgtttgaatatttgctcttgcactgcatattcataaggaaaaaatggttgctctatctggcatgatgagttacttaatgtagctactgacggtaatgaagaaatgatttaccttcgccttgctgcagtagagttagagagcgggaaaggcaataggagtggcatggtcattggtgtttccgttggcacaagcattgctgctttggcctttattctcatcatattgatttggaggagaaatgggaagtggtctagacccatagtagacaatgataatggtagtgttggcataattgcattcaaatattctgacttgcaagatgcaacaaaaaaattctcagagaagctaggtgcgggtggttttggttctgtatttaagggatgcctaagtgggtcgattgtcatagcagtgaaaaggctcgatggcgctcgacaaggagagaagcaattcagggcagaagtaaattcaattggaatcattcaacatataaatttagtgaaattggtcggattttgctgtgaaagtaataagaggttacttgtgtatgagcacatgccaaatggctccctggattctcatctattcgaaagttatggtacaactttagattggaacattagatacaaaatagctattggagttgctagaggtctagcatacttgcaccatggttgtcgagactgcatcatacactgtgacatcaaaccacagaacatacttctggatgcatcatttgttccaaaaatcgcagattttgggatggcaaagtttctcgggagggatttcagccatgttgtgactacaatgcgaggaactatcggatatcttgctccagaatggatcagtggaacacctattactcccaaagttgatgtttatagctatgggatggtcttgctagagatcatatcaggaaagaggaactctatccaacattcatctagtgatattgaaggccaaggtgactatctacctgtgcaagttgcacacaagcttgtccatggagacattttgagcattgtggatgcaaacttgcatggcgaagtgaacatggcagaagttgaaagggtttgcaaaatcgcatgttggtgcatccaagatcgtgagtttgatcggcccacaatgattgaggtggtacaatttctcgagggaatatgcgaaccagaaattcctccaatgccaaagctactctatgctgttgccgtaggtggctcatatcagtcgggagagtaatctgtagcttttcagcaaattcaacaatccatgaaatgtctatcagttgttatgcaattaaatttgttttctgtaacatgtaatattttgtcttgtggtgtatagacaaatctgttttttgtgtaacatgtaatatttctacataccctaagatatgtaacatgtcgggcttcaatgtgccaatatgtcctgtcatacaaataaagttagtaactgtgtctcataaacaggcctctatgtaccccacgttgactatcaacaattattgttattaacacccaaaccttctattaggataattgtatagcctagcttcttgtaccacatgttgtccttgtagtacaagttgtactccctctatacatagatatatatacatatgaaaggcacccccccacccacacacacacacacaacgggtgcatggtgattcccccaataccttactaaatggtatcaaagacttgggcctaggtcatgtcccaccccaccctaaccct

SEQ ID NO: 4670 - DNA, 4543 bp, Sorghum bicolor
atgtatgtgtgagagtgaatactaagaacaaatccagaatcaaaccagcaacacgaatacatgatgtcctgtggacatgtaactcttgatgcaaaatatcccttagctaaattgacgatgagcacataactacgcttacaaggaaagttcagtgagaaacatggcatatatctcacagaaacagcctttgccatgctctagcacagccaatccaaaacaatgttgttaggatcagatagagttagtgatgtgaactgtggtcaaggatcaaccataaaaaagccttaaatccctcataatttatcacaagcaaatcattccaaaagtcatatgtatcaattattatataggatcggaatcctatgtaagatcttactggtatgggactatacgaaacttttatgtaggatagctggatagggtgctataaaatttcggatacatggtgggttcagtatcattttggcatggtaagattatagtataagattctaggatccagattgatatccctaacaatcttgatcataaatgaagaattaggatagcagtttatcgcctcaaataacagcactaaagtagcacactttgtcagaggattccattgacactaggtaaatcagggagttgtttttacgtatttctgtagtccctgtacaggataacaacttccaactactgaggatgatctctgtataccaccttggatgtccattagaatcctataatcctttgtaatctacttcaatatcaaacaaacaatacagtatctcatgaaatgtttgaggaatgggggaaaacatatgtctctgctattttggtgagacgatcgtctttcctcaattttacttgtttgctgacagatttgatacaaatatcaagtgtggcctgtctgttgtaggtaattacatgagaacagataacaaggccccttgcaaacggctcgaatttccatgtgatctacgacttggctagctaatattctttgagtaaaaatttaagaacacctattgacgagtccccatagaaggtatactatctttgccaaagaaaacgatgaacagacgatcagggcatgtacttggctcgattttttttgggttttatttgaacaacaccaaacaaatcgtgtacagaaaaaggattccaatgaaattgcaccatcttgtaaaaaaaaatgcaccataactcaattcattctaagccacttatggatcacctgataccaaatcattacattcacaggtagacccaaagaaaataatcaaagaagtactaggtgggagaaaaatggagactccctcctatcaatcccacaaattaagcgcggaggaatacctgaggaagccattaggacccagaagcttgggacgatttgcaccgaatcgaccaggggacggtgggaagctcgctcgcgagcactgaatagtcaatagccgttccctcttctgatcctctctcagccacgaatcacgccccaggaagaaaaaaatccggacctacgaaccaacgctcgatggtcccgagccaaccccccacccccaccccgaccccgcggcacaccgcgcgttcgccgggcaacacctacgccaccgccctcgcgcgcccgccggcaagcgagcgagccgcggcgcctgggaccgagacgtggacggccgccgagagcgcgctcgagatgtggctggggagcgacgtggggccaggggggactcgaaacgaaacgggagcacgaaacgagacggttcgaggcgcggcgcggcggtagcgacctgcctccctgccggctgccgacgttgccgtcccgcccgcctcaactatctgtggacagggtcccgccccgtgatccaacggcccgcatggcctgcgcgcgaacggacggcatccaggggttgacccttttttttttccccttttctttttatttatttattttttttctttttctgggtacattccggacagtagagtgggggggagtagaggacgatagatagggcagcatggcggcaaccttctgcgccgggcccgccgcatccgcggtagcaaaccctagctccgccggctgccgacgccagaacctacctcgggctggcgtgctgtctgcctgctggcggcccacccggccgattcccgccttcctctccctccggcgccccaatgccgagctgcggccgctacgcgtggccgccggctccggcgttgacccgaaggtgaggtacttcagacctacttttgcggttagtgggtaagtggcaacgtgggttgggtgagaggcagcgagggagtgatttgctcgcggagaatttcgcccctttggggggcacttgcaacttgcaagcttgaggagcagagagagtagggaagcactgttcttggagaagtgtgaagatttctctgtgttagttcaagattctcgtatgtttgtgtgctattaggtgtgtcttattcttcgatagtttgttccgtgactagctgccattggagtgttacaaagagtgactaatgcagacctgaactttgtgtgttaaggtgccattgctaattttgcgataaatacccatctttggtatgctcttaatatgccctggactacaagaacctgcagttaatctacactagttggggtttgccaaatacagaagaaggtgaactaaaattagattgctttgctattactatatgtgactagtcacatgggtgtctggaggacatgagaaattccttccttttttctctgagctaaatcggatagtttgaagaatagtgtgagaaaataggaagttttgtggcgctgttgtaaagttgcatttcgagctgctattgcaacttgtgagcaatgaggtgaagtaattgaaatatttatttaaatggtagcaatgaaatggggagagaaacaaaccatttgaaaaatgcccacgttctctgttggatcttcttgtcttgcatttcgttttaaccaaatgtgcttcatcaagtttcaccaaaatgagtactttgctgcaggttgtcaatggggaagattttcctcccatgaaggacctaattcaactatacaggacagcttttcaacaaggaaatgatgaggttcttggtgaagttgagaaggcaatcactgctgtggaaaaagagaagagtagggtagcttctcagtttgaaagtattacaaccgaaataacttctgggaaggagaagtttattcgcttaaatgctgatctggagaatttccggaaacagactgaaaaggatcgtgcaaagtttacatcaaatatgcgggtgcaagttgttcagagtctgttacctctggttgatagttttgagaaaacgaatttagagaacacaccagagactgagaaggagcaaaagatcagcacaagctatcaaggcatatacaagcagttagttgaaacactaagatatttgggtgtaggagtagtggaaacagttggcaagccatttgatccttcagtaagtaatatttacccttccatcacctgtttcgttctcatggtctggcgctctccccaaaacgtggatggaaacaagaaacaacatattggatccttttgaacatgcaaaaggaattccattccagtattaacagatgcatagtaatacctaggttttttatggcctggttcatactcatgggattgagcttacagcttagctttcacagagattcccgcgtctactttgcagcacatctctgttgatctaaataatcatattgggaatttgagagaaaaaatgatcatctactttcagtgcttatatacagatagaaagtatgaagatatgcatgagagttcaataatgttacttttatgttcatcatatatgcacctctgtgggggctcattctttatgttttcttacttattgtgcaggtccatgaagccatctcacgagaagcatccatgcaattcaaggcagggattgtcatgcatgaagtccgcagagggttccatttgaaggagaggctgctaaggcctgctactgttaaggtctctactggctctggcaaacaaagcgcaagctcataagaggggggcaaagatgcctttttgtgaatctgatcaaacgaccatcaggaactgatagacaaggaacctctccttttgagcaacttttctgttcataacatgacaaatgtgtttgatatcaaatgagataggtcacctatgtatggtgttgccagggagcatcagcttgaagttttgctgttatttgtaatctgctagaattttgtccaccaaaagagagtgaaacattcaacatacataccggatatattgacttcctttctccaactaagagtgttttttcatgaattaaatctccctcctggcaattgagctgttggcacctttttcacacattcacttcttgattagaaaaaggaagttcgataaaaaaaaaacactacatctattcgaagggattttcatcgattcctatccaaacaagcttacaacttacaagccacaaaccacccaacttagagtgcaacaagaacacagatataacaaataaacaattttat

SEQ ID NO: 4671 - DNA, 3646 bp, Sorghum bicolor
gcagcataataaatgaatagactctgacataaccctgaagcgtgcattggatgatgcccttcatcaacatagtaccgttagtcattactacatcgttaagtttgaactggccaattccctttgaattagttaataccatcttatgagcaaacaaacttccctagcataccactaagtcttttgaaattcgtaatggtaaattttctcacacatttcataccatttcacaacaaaccaaccactcatgtcgaatcttatttgcttgcctatatgggctacaaaagagccagctccagcatacactcattggtgtcaagtgaaaccattcactttgttgcaagcgctaattaaatctctaagcataactagggaaatcatttataaccgagcaatgacccatgttctagtagaagtggccctagtaacattttttttctggatccaccactgctcaacagtgaatagtggattacatggtaacaggcacaaaacgggcaccctgcttggtctgctcacaaaccatatgctgcagaggcatataagaatggacatcactaacagagttattaaaagtgatcactaccactatgttcaccaacagtgatcttagcatagtaagatcataatttaaagccttgcatcttctactgtagcagtgtgattgtaataagttttctactctatctttagctttgtagctcagcaaggtggctggctgtcttttttgtactcgctttggtaaactggtatccccagtgtgtaaaaccttattgctttctgaaaagcagagttaattctccttttttaaaaaaaatgtagcagtgtgatggtaagctcgcaaaggggttagtcaaatcctaaatcaccatcatgaattcataattgacgaagtttatgaataacgtaatttaaagcgcagaacaagggtcaccgtacgcaccaggatggggtggcagtgagtcgtcctgagaagctccctgatgtcctcgcgcgcggccttcacctgagccacgtcagacgccgccgccacagccgcgcacctcactgccctcgccttctgcgatcacacaacacacgtaaacacgagtcaacagcctgtatgctgctgctgctgcaccatttcgatctcaagatcaaggcgcacccgccctatcagatacgtaacggaggcggtacacggacctgcgggagcggagacggcgcggcgcggaggccaacgcgcgcgcgagctgacgacgccggcgagggcgggaagaacgcgcggctggcccgcgccgcgcggcgcgcggacggggtggcggcggcggcggccgaggcgcggagggtggcggcggatgcggcgaggcgctcggccatggcgggtttggtttggttggtgaaggtgggagcagcgcggcggcccttggagcgaggaggggctgcgggccgcggctgcttgttgcgagacaagtggttggttccaccacggcgcctcgcctgggtttcgaggggttttggggttggtgcgcggagcgtgctctgctcctgccctcgtcggcttctcgggcctgtgcggcgtgggcttctggggttggttcgttgatggttggtggtcgtttttttttttggttgttgataagatgcacggtactcagtttttttttttgaaaagggtcgctagtcagtttattacgcggcggccaatgagcgacgcgcgcgtttggggactccggcggaccggcggtgtttggtggtctggtgagtgctgagtggtgacggatgcgtcggcgtccccggcaggtggtggttttaccttaaggcccaactggtgcctacagcccacctgcccaactggtatcttaggtttccagcccaattagttccacatcctcaggctcattaacgcgcaggtagtgggcctaccagccagtgccaaggcgcgataacgagcggcaggtcagggggtcaggcagaggccacagcgctagcggcacggcatagccggcgacagaaaccaaccgatgccactcgtcggctgtccccgccgcggcccgccgctttctcccgcctgccgccaccgccgcagcctgtatcgggcccgagccgtcgcgcccaaatgcgaggcctcctcctcctctcctccgccgctcctgaccaggagactgtccgctgcctcgctgcttctcgctgtcctccccgtccccgcgtcgtcgccgcaactccccgtcgcctccgcgtcgcaggcggaggcgaaggaggcggaaggagaaagcggagcttccgaggggatagaactggagcggtacactgaccaggagcagggcttcaccctcctcaagccgacctcttggcccaaggtaaggactaatttgaatgaacctggacgacgtcaatacttcgtgacaacgtaatgtagccgtaggagcgtaggatactttggaattcgatactttgtgtacttttgggggattgtggattgcacatgtgaatttgctgtgctgaagtcgcgtggtggttggtgaaggtggagaaggcgggcgcgacggcgctgtttcagcaggagggcaaagggagtaacaatatcggggtcgtcgtcaaccccgtccggctcaattcgctgacggagttcgggacgccgcagttcgtcgcggacagacttctgcaagcagagaagaaaaaggtagaaatgcctgaacaatgttttcttggcactgcaagtattctgaatctggtcagggtcacttatgaacgcctgacacttgaagtagactatttgtatggacaactaatgtgctgatcatgattcgggaggttctcattgatacctgtattctctgtacaattggcgagatactgagatcttctgtactagtagcttcctagcatctgattgaatcattttgcttaaaaaacaggaaagtaccaagactgccgaggtgatctcagtgggagagagatcaggtcatggtggcctgacagtgtatgaaatcgagtacacactggatagcactaggggagggatgaaacggatcttctcgggtgcatttgttgcttcaaggaagctctatctgctcaacatagcctgttcagacacccaggagaagcccttggacagcgagacaagaattgttctggaaaaagttctacattcttttgattctgtatagttgatatttttttacgacagaggtatggcactttttcttgttttcggattttctctcacttgaaaatacagttgcaagtaattgtttgtttgtaaaatgagtgctaaccaaatagttgcagtgtccttttgtccaataccgtttcacctttctcagtgatgtcaggctataagtaatttcagttttcagtttagataatgaacttcgtcttccataggtaacatttgtgtcacaggcagtaaaacgttgtgatcttaattactagcctggcagtggcattactgcattcgtaatatatcttggacaaagcattgggcagtgagccagtgacagtattactccttgaaaatctgtaatgcctcatgtcctgaaatacaatcatttgagcattagataggatacaggatggcaagagttagagggagaaagacaaggccaagtagtattctgcctaaagtttatcagaatgccaggctcagttcatttaaatgctcgtctgt

SEQ ID NO: 4672 - DNA, 11152 bp, Sorghum bicolor
gtctcccagacatgggcagggatgcctcggagctcaacgtcaaggaggaatggcagaacacgtgtatgagcaccaataagacgattccaacgcttacacagcaagctgaaactgaaacttgacgaccggattggttgctacagtcccattatacgatcagctagagccatgtcggggaggatcagcagatagcttgatggcgaggcacgacgcagcactaaggagctagcatcgactgaaattctaggtgcaatcatcattgccacttcttccgccgcagccaggggctcctcctcaataacagacaccacaattgcagtagaaaagtcatcaacagcttcagcaatctggtcgctccagtcgatgatgcaaggaggtggcttttccacatcacaagttgttgggaaaggtgctgcgcaaggcggtgggatgggctcctgagcagggccctggggtccggccttaggacggtgacggaaatgaggtcgtcgtcgacgccggcgtgactttccggactgtgccccttcgtcactcatctgcaactctaaagagcgctgctccgaatcaacaccaccggccacacccgccggagaagaccgttgcaggggcacagtgttgccaactcgtcgccacacttttctgtttcccgaagccgcagccgccggagatggccgttgcgggggcctcgagtcaaccactccacgagtcggaccgatcctctgccacacggggacacgtgctgagcaagatccacgagccacctctgccggagaaggccgttgcggaggggcaacgcgatcagccgcccccgccggagaaggccgttgcgggaggacagcacgatcagcttcacagccacgatcacgatcaatccgctgccacaccgaaccgcgaaccacaacgcaggaggaggtgttgccacctctccccctaggacactcgtaggaacgatggcccagggaacgacagcggaaacagcaggtctttgaacgacagtaggcggctgtgtgcgaaggcgagaggcaattgaaacacaggccagcaaggtcactgggcactgggcggcgtggaggacgagccgcacgtagacgccgccgccgagcacctcgtgactcggccttctgccacccttccgggcctggagcagacacgcccgcacgcccctgcccagaacgggaccgatggcggagcgtaatctttggagccagaggcggggaagaagggttcgccggtgacgggagctcaaccgctgccgcctcctcctccggccagccaacgaacgccgccgaaggtgccgctggagcagagcttgaggtcgagataaccacgtcgcggtatgaaggtagcgagccaccagagcaggaggaaggcggactatctgtgttccagcgctcgcacttggagcgaccacgcgacacagaacaggccgccgaggaggacaaggaaggggtggaacctgacgtcttcacaggggaggatggggaggtggccgccggatccggagtgggtaccggcggggggctggggtggggagacgagacgtcaaggggagcgggagagacggaagccatattgcctaaccatattttctaccgtcaatccactattttcaatatattttctaccgtcaatccgcttttccggtcctttgcttttccaatactctttgttccaaataagtttctcacttcttgaggagtcaaacatatttaattttgaccaaatgtatacaagaacctatcaatctattaatatttatagtacacctgttattagatagatcattaaatctatatatatatataataaatttatttgaatttaaagatataaatggtattagtattttctataaacctgattaataatttttttaaaaaagtactacctgtcctgccttttggctttctcgtctcctcctcttcccccaatctgcgacagctcccaatttctcatccccaaacccaaaccccgacctattcgagcgaccaaactaccaaagcggaagaagaaaaaaagagttgcacgcgacgacgcgacggtgaagggaagggaagcaggagcgagacaaatccccacccggctccaaaccctagccacctccccccgtcctcccccagatctcgctggcgtctgccccgcctcgcctcgatgtgaccggaccctagggtttgagacggtttcacggtgggggtgttcgcggcgactcacgacgcgagtaggattcgaggtggcgtcggcggcgcgagcgcacatgaaggacccggcgcaccgcacgaaggtggtgctccggcggctgccgccggcgatcgcgcagcaggccgtcgtggaccaggtcgacgcgcgcttcgctgggcggtacgactgggcgtgcttccgccccggcaatgccaggtccgcgctctctgcgtctccagtgcttgtggcgttgctgtgggtgggactagtccgtaattaggacttgtgttactatcctgtttagcctatgaaccgtggtaggatgctaattaagttcggtttggtactattctcgcaagcaattagcttgctcaattagcttgctcctttgattgtggtgacctaattattttgtttggcttccaatagcctgtctggtaactttatgtgctttagcattgattgctagtttgttatgttactgaagtgttagttagaatttagaactagtgcgttgtctcattatctgtttatctctgttgactgcatcgcacaatctgtattgacagtctgacctacctgtgcttttgatatagtttaaaagggataaaatcattggttagggcagattcatttttttcactttacatttgttgtttctgggctcgttatgttttcatcgtctttagttctttagttgtagagaatgttgctgagaagaattaaaatccagctgatagctgattgctgaactacctttacacattcaactttatttgctttgcagtattactggttagtgattttctctggccgttttatatattagtttaattttacagggacttgtatctacattagaaaaatttggtgggaattgcgtatgctgatctgttttggcacttctatctctgttttcatagtgtgttatgcagtctatctctgtttttctttcttttttaattcattagcaataatttgcaatcaagttttctgtcagtgacatgtcccacatgcttaatttattatatctttgcttcttgatcttgtttggggactgtctacttcatatatagcaatttgcttttctgcttgagcatgttagtatatgcttaattttgaagctaaatgatagtgacattcttctttctcatttttttatccagccaaaagaatcataggtattctcgactttacctcaatttcaagcgcccagaggatgttgttgagtttgctgaggtcttcaatgggcacgtatttgtgaatgaaaagggtattttcttcatcttgttgaatttcgtccatgatgaaaagggtatttgatcgtattgtgccaacaccatttgttactgttacaagcactgaccattttagtttttttaatagaaaaaactatttgttcttagtgacatacccatttcattgttcacaactcctgtgatctaagtttatcatgggtgcacgccttatcaattatcatccactatgtggcatcacaaacacaaatagatgttaaatcttgatgcttgatcagttacatagccattaaattgaaagttgtatatgattgggtctagttatagttagctttctagaatgctgtctacttcacctgatggtgtataggattctgttttctcttggtgagtgtggaagaagagatccacgagaaacacactagtaaaaatttgatatgaaggaaattttgaaattgaattcaatgtacttacataaggtcgtagcattgctagcacgttaacaatgacatagtgacattaatcttatcctggacgttgttgtgcttgctgatccaacttaggccagtgctagaggtggtggctggaagcaagaacaacatatgttggcttgataatattccttgtacagtgtgtttatattgttatgctcaaacagaaataaactatttatagtgtataaaatgtttggtgcattttttttgcaactgtagaccacatgtttgtagattttttgaggggagtgtcatttatgatctgctttgtgtaaattgggtctcatggacgttcgtatggttctgtcaggtgctcaatttaaagcttttgtggaatattcaccatcacaacaggttcccaaatcaaatatcaagaaggatggccgtgaaggaactattatgaaaggtcttaggcaatcactttagctaattctttgcccaattgtatcgttctatcatatcaccattaaggagccttggtcaccattttcctaaacttgaattttttgttttggaattactagatccggagtacttggagtttcttgagcttatttcaaagcctactgagcatctgcctagtgctgaaattcagctcgaaaggaaagaagctgaaagggcaggtagagtatgccatcattactttcaatccaatatagtactccctccagtacaaattataagacattttggctttgctagatatatagcttttgctatgcacttagatatacactatgtctagatacatactaaaaacaatgtactccctctatactaaaaaaatgaagttgttttggacaaggtttaggtcagacattgggaatataaatcacgaataacttttaagttgttgatttttgaaatgtgaaaaaacatatgaatagattttccttgaaaagtactgtcataaaaatatacatatgtcactttttgataatcacttttataaaaataagaagtcaaagttgtactttgaagaccgtgtcaatgtccaaaacgactttatttttgagtatggagggagtatctagaaaagccaaagcgtcttataatttggaacggaggaagtatttgctatatcgatgtatctttccaaatatgccaaaagcataaaatggggttgtcacatttgattatttttgtcagctgctggaaaggaggcacctgttgtgacacctcttatgatgtatgtccgccagcaaagggcagctaagagtatggctcaggtacatttattccttaaccaataacatagggctcttcttggccaactgttaacttgctactgttttcttaaattgcagagacctggaagtagacttagcagaaaagttgcaggtgtcgtaactagcagttccagtcctaaaaggtcttctgagaagcgcagatcctccacggtagcatgctttatttggaacttttttttatttttttcttataagactttctattctcagtttataatttctttgacataacgggtgtaccttcacatgggtgcctatgttggcaatattcttttgttcagtaagattcgttgtgtattgtagtaactcatcattatgtttttcctcctcatatggtccctgatgtactatgcttacggtttactgtactttatgaaaaatagcacaattgctcttatttctgtatctctggtgtctgtggatagtgtgctccttattgtatagttattattatacactttaaatgaactgactaaaattgtttccttataggtgatagttgcatagttatttttccttccaactcctatagtgctatgcatgcatgtttccatgatattcaattgaggcaccaccgaacctttagttaatttgaaatttgaactatttgtggtgttattttgtaacaagacctactgatctactggaagcttaaagttccatagtgtcatgggcataaagaggggcgccgtagggcgcaagtgtcctagttgggccttaagcccattagtgttaattagtgtctctcttagttatttgtctataggaatagtaccatattgtctaggcacaagaggtgttagtcctatgtaccttttatattcagcccatggggcacaatggaaatcaagcaatgaattatgaagaaacaattctagtctccctcaatctctcaagctcttggcaaagcataaggcctagttatcccaaagctcttggcaaagcataaggcctagttatctatctccaaaaatatccacgaccataacacatagtttgttgttctgataattaccacctgttgagacaaaacaacaaatgctacccttcttttgttctatgaaataaattgtggcttgagttcatacttttgctgtttttttttctattttctcaagcagtagttaatttgaaatttgaactatttgtgtttttattttgtaacaagacctactgatctactggaagcttaaagttccatagtttgttgttctgataattactacctgttgagacaaaacaacaaatgctacccttctttttttcccgtgaaataaattgtggcctgagttcataattttgctgttctttttttctattttctcaaagcagtatgttgtacgagacagtactaaggaaaagccaacctatatcatggtgccaaagagagaggagcatacacacagggaaaaagccattgctggaaattcaggtggtatgcttgtaccaaatcaagaaattgccaatagtaatacttttattttttagtaactctctcccagtatgtctaatgttaccatgtattgctgaggattttttttttggctagtacctacccttttgcctatagtgctgctaaatgttgtatctagtgatgtatggactattgtatgctgtctgttgagggtgcataatgagccaaccgcagttttttaggttcttttgaaattgtcataatcttatttaccatgttctcctgaattgttggagacccaacttcaaaccgagcttaatgacccgagccaaagtcaaaagttactcaaaatcaactcatttttattttaaaaggaaaatgagttcaatcggagcattttttacatgagcaaccgggccagctcaatgagtgtccagcctaactgtctgtgatcccatattgtagtttcacccagggcacgccatatgggaatagtacctcaaattccgaatttagcagcgccgatcaagggcattattgatgttgctttgtgttgctgcatggtgaaattgtgtatatatgtgagcctttaccatttagagaaaaatgcttcagaagttaacgtatttcccaaattagcagaaataggcaatgtttattaagagccagtgcaacgctaaaatcatcctttaacatgctacatggaggctttttgctttttgattgggttgctggcgtgttgcagtatactaggcaaagaggttacacttttggtactgccaattcagtccaattatgggaatgataactgccttttgtattaggtgacgtcatatacgtttcctaatgttatgctacttttgtaattctagactagatgaggatgtgtcctttcatatattttttttcctgaacacggtctttcttttcgagaaagggaagctaatttgcttgtctctgtcatgtttatggctgctcgttcaatttaccagcttattacacgtgctgagtggtgcgtttttctatgttaataatcttgttttgttttgtagatgccacaagtgggggaacatctggatctggtcaggctggtgaggctaaaagggacaaaattgtcattttgaaaggaagaggaagggttgattctaatgtaagttgatatttttgcagttttattattatggaccaatgtttgatcaatttttaccacagacacctgatggagcaactcagcagtcatcaacccctgtgaagagtgtaccgccggcgacttctagactagaccagcgacctgaagccagtggaagaattattaaaactatactttcaaacaaggaaatccgcagttcaaatccatctcaacatgagcaggaaggtcatgtgtttaatactgagaaggataagcggccaccacgggctgtcaaccctcgtaccattgtgaaagatcagttagttgaaaattctgagagaagccattttgatgagaagactaatcatcttcatggctctgctccaattggtgagaaggttgaaaggcatgccagaaacagagatagacctgatcgtggtgtatgggcgcctcgccgctatgacaaatctacatctgggggtggttcacatgcctcatcgtcagatttccctcaaatacagtcacattctggagataatgtttcgcaaatagcagatggtatgtaatgtaatttactgaaatggtttcaccattggtgatgcctggagtctttaaacttgaacttgacgcaggtcatggagacagaaagacagacacaaggggtcatggtggtagccgtggtgttcctgttgaaaatggtttgtatgcaaaaataagatgcgtactttttctagatcagtttcatgacacagtttttaatccaggacataggcatgccaaccgtcgtggtcctccacgtggtccaaaggaaactgaaatatctgctagcgtgcctgatggaaagaattcaaagaggggctctgctagttatggtgctcatgaggtgcgattatgtgaaatttcttattttcccagttggttaagggcgtgggtgcacactcagaccacccaagttcaagtcctcattgaggagaatttgggtttgtatttcttcttaattaaaaagccacttagttcatcctgggttggttgagtataattttatttcttgtcccattgctgattgcacggatcattgatttatgttcaaattttttcatccaaatttaatgtcatgaatgccatgtgcagagacaagtatgggttcagaagtcaagttcaggctcgtgagtttgttcattgatggtatgctgtgctactctagtttattcattgtctttaaggccttctgcaaatagctataacactacaatgatccttgccatcggttatacattctgctgcttctttctttttttttccttttttggaacattgctggtggaatagccaaatccatccctggagtctcttcttgaaggttcatttgctacaagtttcattgttggctcaatatagtccccaggctgacatggaatggcacatgtgtgcaccaattagcacgatgttaggatggtctctgcatacatgctaatgagtcttattctaacacatagtaaaatgattcctgttagatgatacgacttactaagttgctcttgttccatacattctaccagtttgaatctaatctttactttccactttatcctctgatatgtggtaactaggtgatatacctacttatttgcacatattttgttcttgttagacacttagatggtacaactcgctaaattgctcttgctcccagcagcataccagaatactagtttaaatctttttcttttagacattgcattattccctgatatggggagactatgtgacatgcgtacttacctgttcatgatggcacaatgtttgtagcctttataaattaggggcaaattagagatttgacacatattgataccttaggccactcactgctgactaggtgcacacttggtgctccacattagctaggtgacctgattgagccaaagacaactttgtgggacttggccaaaccatttagaaccttagggaagaaagtgaacctgtggtgaaacttcagggaagaatttcccctttctttcaacattgttaatgaatgcgctttttttccctcaagtggtcttgaaatatctggaatctgtacaccagtttcccactaactcgctaactcttttgcagatactcccatcaaaacaggtattgcaagtcgtggagaagtcttggattctgcagcgcattcttctttgttagctgttgatcctgtgaagtatgttaacaaaatgtccaatggttaaatgctgccatgaagtgcaatctcagatttgtcaatcgaagtctcagctatagctgaaaagagagcttgctgatttgattcacagaaatagtgaagtaacataacccggcatgtaggtagctctcgataactttgggcaagatttgatttgggcccaaggttgatatttctggagcaatggatggagattaggttggcatcagtacctcactacctcgtgacagtggtcacatatttccaagacccctggaggctacatgcaccctcagcaatttgtcagagatggatgtaaatatctctagagaaagaagaggtctggttctgattgctgtttacaggttagaggtgcagcgtatttacaaagagatataagagttatcacttgtcagactacctggtttgctaaataaaggtgaattttagttactagattatgagaccctgtgttttgactgctgcaatcgtggtttgcggcagcagaaaggttacctagagtgtaaaagtgacatctcattttggggttatggttccgactaaatgggatgtgacgtgtgaggttgttttgacgcctgctgtgtgctttgctgtcatgttccaccagatgacccagggtttatgtcgtgttagggaacatatgctgtacagcatcaaaggtgcttactgtttcaaatcttaaaaagtgatgatgttgtctagctataatggttgatggtgtctgttctttgtgcactccgtcattgatagttaaaatatggatctcgcgatttacagatgaaactatgcaattagtttttgttttcatgtcggcctgtaatgcggctattggcccgtctggctcatcggacgcactatccttcgcagcagagcagacgaaggcttgtttagtttcaaatttttttgcaaaatatatattgtagcactttcttttgtatttgataactattatttaataatagactaattaggtttaaaagattcgtcttacaaattacagataagttatacaattagttattatttttatgtatatttaatattctatacatctgccgcaagattcaatgtgacggagaatctggaagtttttgtaaaattttttaaactaaggccttgtttagttccaaataattttgcaaaatgagcacgataacattttcgtttgtatttgacaaatattgtctaactaggcttaaaagat

SEQ ID NO: 4673 - DNA, 8947 bp, Sorghum bicolor
taatttgtaaagcattctagaacgaatatgaaatccttgaattatagggccaacagtccataaaaaattatcagacactaaggcagttgaaaatggcaatatttttattttaggtttgtatacttgttttatgtgatgaccaaactcaactcttttcaagttaaataacgatccactttctttccttctgataacagggctgccacaaagcattcccagtctgccagcaatgcattcttgagaggtgaccatgcttctgccaaggaattttctctcagagctcaggaagagcgtgcagctgctgaaaagctgaataacaaggcagcagaagaaatatttcgcctcaggaatagcagtaatgacatctggaagatagacatgcatggtcttcatgcatcagaggctgtgacagtattggagaggcatctccacatgatagagttccagcaacctgggaataagtcagcttcaactgaggacttagctaagttggagtctgcatattctgaatcaaccactggtttaaacattgagcttgccgctgagaaggtggtcttacgtcggcctaagcagtatatcttacatgtgatcacaggtaatcttttgttcctctatgcatgctttcctatcacatatggtttcatttcaaatctaaaacagtttatgtttcatcacttttcttgccacaatctttgtaattatgatatataaatgtgcaatttaacggatgtgcgcatcttggtatcattttacaagcagataatgcgttggtttggttcatttaataacagcatacatagaagaaagaatgatttcatgttcatgatgtaagcaacaccagctttggtaataactcatttctgtttgtactttacacagggatgggtaaccatagcaaagggcaggcttcactgcctgttgccgttaggggtttccttattgagaacgggtaactttcgatgcaatcaatacaactctacatctaagtgtacacacacaagtatgattgacagccttctgcttgcaggtatcgatttgatgagctgaggcctggtgtttttgcggttcgtccgaaattccgccgcaggtgaacgtgtagaagtttgtacaattgtaacatgatgtatgtatcagttgtgccgacatagccactgcctatgaaactagaatggcagggtgggtaataggaaattccagcaactttatttttccttgattaataaagcgaatttgtacatctgtggtgttctttaacctccttgaacagtaacttccttcccacttgacatgcgatttgtgattgtaacaatgaccgtaattgtgctagtttacggcaatggcatgcaatgttgtactgcagaattgggttgccattgtcaagagccagtctgtgtgattccttcagaggctctgctggtaaaaagcattcgtcacaactcataattcactggtctacttcgtatcttcttcactgtaaaccattgctttgccgacagatgtgattccagaggctccatgatttactgacatttcatttgccctccaacctccaagcattttgctttcaggcatggcattcctcgtgccctgtctgttgtgaacagaaataaatttgtaatgtcatagatcttgagctcgacttcagttgcctgagccaatggccacatcctaaaagaaggaaatcgagctaataatgggcaacttggcaagcagaagcagcagagcaacttttccatcgctgggctgcttcttcctgcttgcaacgtggccgctgtttctgcggcacaccccgccggccctccctgaccctctggcgatgtggcccctctccccgtgtgcgcgcttgcagtcttgtggttcccaagcgcagagcagttcgtggagccaggtggcctgcagcccacaccacgcatcgcgtagttggctcgcgggacccaggcgtcagcatcgcgcctccctctcccgaagctcgcgtctcggcgtctgtctcctcgcacctcggcgcccggacccggagcgagcctgaggcgcgcgacaaagcgatggcctcgccggcggcggtgacgcggcacccttcccccaccgtccttgcctccggccctcgctactgccgccgcgtgagtgctccccctctcccgctcccccggtgtagtctgcggatgtaacactgtgattccactggtggaatccacgcccagcggtgcggttagtgagctcctgagaaccgtagggtttcaacgccgcacctcgttccgaagctgccatattattcttaattcttctaggagggaatgagcggtgcgagtttttaggggaacccgtttagccatggattattctgattgacacgaaacagtacagttgagtacttgagtgagtgtgttagatttggaagcaggaggctgatgtgcacaattgtttggatgatcgttttgtactgaagggccggattgatggtttggactgtcattatatatatgccacacgcagaaatcatgatttcctcgtataatatatactgatttaggtattgttagataatggtatggcccataggccatattgatggtttgttcgagtgcttcattaagcaggagagaaatggatatattgcacactacaagttgcttgtctgagtcttgtgcacatgtaacattgaacgccgcaaactgcctgggctgttccagaataagtttggtctgaagtggccatatggtttacacccattctggcatctgtttagtttcctttgtttacctatattctgttctgtataatgtttgttcatcccgctacagaattttgttcccaaaactaagtttgttcactctggcaacgatcatttgcagggacatccaccctcaaaagttggcttccgaagcttggcgccacggctaaaggtcaatgcactttttgggtggcctaagggagacacgtcaacacgtcaactgatccctcctgctgctgaatcatatacgctctcagggtcagccttagaggtgttttgtgtttcttgagtgaactccttttccaggacttatgcacctaattcatgatttccttaatcgctcgttcgtttcaggtgggtgcaaaaccacgtgaggtgtctatttctgttgcttcttctatcatggacattcctgctgcggattgggatgcctgtgcgtgtgatccagatgatcctgaaaactttaaccctttccttacttatgcattcctctcaagcttagaagaatcacattctgcagtaaaggtaagcacataaatcaccatgtatcctcgtcagatcatacaaagacatttctgttttaatcactgttcacctactgcatacacagacgtttagcccgtttgaccgtttaattggttgtttacaccaaataatggctaaatgataggtgaccgactgtataacatttagcgtttaggtgaacactagttttaaccgttaagtgctcaagctccattataagcatgtgtaatgtcttacacattgattttgacgataaatttgctgtgtttaattgacaacagaactacaaacaagatttgtctgcaataccaccaggcatattgagacatcaaaaatgatgaattacctatgaccagggggtgttctgtgtgcttagcctgacccatcatgattgtgattctatttcttttgcgattcttaattgcacaattgctttctttatgaaaattactcccgtagattgaacaaagattagctctaacttttattcagtaccaacatgcatggatgtacacactgttatcttattgtcttccttgagaccttggtctcaactgatttcaggaaactggctggttacctttccatgttgttgcacgggatgagaatggacatattataggtgttgttccgctttaccttaaaaggtttaacatcattaacagaatatcatctcctgtcttcctacttgctatgtactatgtgctcctttcatcttgttcattggttgagtgacaacattgtgaacttgcagtcattctagaggagagtttgtgtttgatcaatcatgggcagaagcttactacaactatggccttgaatactatccaaagctccagtcctgtgtgccttttactccagtaactggtcaaagaatattacttcgaaatacatcatatcgtgatcaagtttttgatgcacttgtcaaaggtttgatgagcctgactaccaaggtatctggattagcgttcttgcaaatatttgtttaagtggtgactactaagaatgcctaaaaattattatatcaaaatcatcctatatttttagcatctatgtgctactgttcattgtttccactttccaccttttatcagctctacttcatatggcattgtgatatcctctaggactaaccattgcttaattcttgagtcatttgtcttcttttattcttgttttcttgacatttacagtgtataccaaagggcaccaagtctgtttcatttaaatagaagagtttggttgtctgcttgcagctacaaagttgctaaatcagggcttgatcgttaatgtgtgtcggtaatgagtcaatgctttttttcctcgaaaaatgcaggagagctgcgcatcattatattaagaagtgaaaaaaagggaaagaacccatacaacacgccccaggccagccaaaaggcaagcccacacactcacaccaactcacgccaactcacacaaaactcccccaaactctctgatccttaggcgtccgtttcaaagggcgaccaactaatgagtcaatgctgaagtaataaaagtttaaaatcctgtctctcttcacaactcatgtttcattatctttatggtgttaacttgtaacaccccaaagtccaaacagctcagattcactctgagcgctcacactctcaccaacccacttaacctagggttaacccggggtttggtgggcctaaaacccctacaaacttgcatcaacacacacatgggccaccatgggcctaattcaaactgggccgatgtcacattactaattattgatgtaggctcatgtatatgtgaagtagtgacaacctttttgggttgctttgtttatttatcaactacctctgtgtagctcttataagactaccctcagatgtattgaaccaagttaatatctgtcggtttctgctgcatttcagatgaacgtgtcatcattacatattacttttccgtctgaaggtgaattcagcaaattgaagaatagtgggttgttacaaagaattgggttgcaatatcactggagaaatcggaattacaagaggtgctaacgcattatgatattaatagcatttccttctggatggttcaatgcttgaagttgggacttctacgttctaaccatattatactgcaacttggggtttcaatacttggttggaacatctagttttaagaaaatcttggtggactagaagtgcaaacaagctcacagtttggatgcagctactatttccctcatatactgttaattcaaggcatttttctgttcttttcccacaacatctcatttttgttaaaaaatatgacacttggttgttgtatactctctatcatttgctgtagtaatttatttgttaatcgttgtgaatcagcttgttatagcattctagttagactttctctgtgggacatgaggtcttatacctattttggctaacttcttcctttattagtgccaaaaaagtagttatcttgaccagataattgtagctaagaggacacatttcagataaaagcatagcatgtggaccatcgttttaaagcagtgtttttttatggaatcactgccttgttgactctgtgctaaactttgcgagattacattttagttgcctagtttattgtgatttctcaatgtttgctgatattcattgctcaccatgttttttcagttttgatgagtttctgatggatttgaagcaacctaaacggaagaatatcagacaagaacgtaaaaaggtttaccttcttttggcttaattgattcaaatgtgcttgtcaattgaggataatcttttttggaaacttcccagattcctgctcaaaatttgcaaatgaagcgacttcgtggagacgaaataaaggtaattataagggagagatagttctttaatcgtactcttcagtcacttcttttacattatcatattcttcacagtatctcattagctttgttgctttctggacagcttacttataattgtttccattcacattgcagagcagccactgggatgccttctataaattctaccgtaacacaactgataatcagtttggtttcacattcttcttaacttgtattttttttattctatacctaacatcatgttcttgaaatggttgttcatcttctgtcagcattcatacatatcgcgatgccgcaccattcttgttgactcactcttcaacttgaattccggtgtccatttcttcttatttacaatgtcacatagtttcacctaggttgatctatttttttatctgcaccctttgtaaacatgtatgattttttttaaaggattaatatttaagtgtgctactgtgtattgagaactgaagttaatcaaagcaaggaaggaatagaagtttagcaaattatcaggcaaaaaggtcatttaatcgagctaaatggccacttaaacagatacatttggccattgtgtagtgtttaaacaggctaaattgccatttaggaaaaaaaggattggagtttgaactttgaagtaattactgataaatgcatgtgactgctagcacattgccttctacttgaactgaaagaggcaacaaagttttaagaaccatcaccgcgtgagtgcgtgaccccctcacctttttgcactttctttttgttacacggcatatctgtaggtatttgtggtgaccatgcctaggcacgtttttcattaacaggggcatatatgtaggtatgaattaagattgtatagaattcgctagtgcagtaatgtaggtttctgtattttcacttgtagctagggaagtagggatgcttccataggtcttttctgtcccatgtcctctgtttttgaaatccgaatctgttaattaaatgagttctgtggcgacccagtgatccagagaaagcaaaacttgcatccctactcatagcttacttttcactgcagttggggccgaccatacttgacaagggatttctttcacctcttgggcgaaaagatgggggagaatgtgatgcttattgttgctgaaaaagatgataaactagttgctggagctcttaaccttattggaggtgatacactgtttggccggttatggggatgcctgccagatgcttactttcccaatttgcattttgaagcttgctattatcaggtaatttgctcatgtttagaaccatatctttggaacaatgcaataatatggtttgtttatagaatttgatattgtccaggcgattgaagcagccatagagttaaacctgagtaatgtggaggcaggtgctcagggagagcacaagatccagcgtggttacctcccagtgacaacttacagctgccactacttttcaaatcctggttttgcggcagctattggaaattttcttacacatgagacggctcaggtattttcgtgttgatattttgaaccagtttcttgccaaaactatgtgatatcaaccttgctgtctttgttctactcacttctgtgtgctgaaaataatcttttgtggacacatatacaactctttcatctgagtgcatagtatctgtagttaatcagtgccatccacatccaatgccaaactcacctcctagattgagcaccacatctggaacccttacatctgaagcttgtcatgttttggtttcaatattttccactagattagcctcacattctgatgggctgattgggtgctctagtggacggcatcatcaccaatagttgatatactcacacaaaaaagaaattattacctcagcaataccactttttggagctaatgcgattctatgttagccagtgctgagtgtgactaagatcaggacatcttagtaaacatgcattgactttagcagtactttgttgataccatatattaacgcataaggcatgatatcttatttcacctttttctagcttattgttgagaaattctatttttcctcccggtggtaactgctgacactaccagtgtggcgtttattttatgtcagacacttattttcttaaaatccttagggaaatgcagtttattatgatggacagtttgcatacctttctgccttttcctgaaactcccaactaatattcttggtgttaataataccaggttaagcgtgctattaaggtccttcatgattcgggtccatacaaggaagacatactgaaagaatttgcagctcaacaaggcatcgacctgtagaacacagaaggagctaacactttgcatactgttttataggattagcatcttttatgtagcaacaggaatacgggtaatcccatcaactataccaaattacggatccgacatttgtacactgctaggaatgtaaatattcaacatgtaaatctaaaaccattggctccaatggtcaacatctaaacccaaacattctgcgatactatgcatctctgcgtcagaattcagaaatgctttctgggcgctattacctcagccttaaataaacctagccgtcaagttgggagctatagctatacttgtttctacttttcccaacagaaggatctgatgcttcatgtatattgcgctcttttctaatgggatctctgatgcttcatgtatattgcgctcttttctaatgggatctttcccatcagaaggatcatctgaactatagtactccttccgtcccaaaacaagtatcgttttcgcttctcgagaaataactttaactaaat

SEQ ID NO: 4674 - DNA, 4946 bp, Sorghum bicolor
aaacaaaattgttgacttggcagggtcattaaatgaaggagtttcatcagatgagagaggagtttcattcccatgaaactcatgtggcccggttacctagtttagagtcttggtaactgtgccatgaaactatgcattgagactgacctcagtcaaatactccctccatccatctattggggtcatattaccaaaaataaagtttccaaaaattgggggcatataacgtatgggccagttctccatgccccgcgctcgtcctacgaaactcggctcctcgtaccagacgcagcattgatgcagcgccgtctgccatcgcttcaactactccctccgttcaactacaccgtttccctcccattagctatcctggccgcgtggtcgagtacaagtacgctacgagaggccacgctgctgagtacgctaaagacgtttggggagggttttgcggagtaattgctcggtaatccaactgtccgcatgcggagtaaatggaaacgtcatatcaaggaaaaattctgcacgcgcagcctttacttggtcatcacgccacacccaaagacgcccccgagtagcggatgatgtctaatcattgtgggggtgtattcaatgcggtcaatcttaaggcgtttccaacggctaacatgttactagctccgagcaatagctaggccatgtttagttggtgaagaaaaaaaattttacgatattatagtactttcgtttgtttgtggtaattattaattattcaatcatggattaattaggctcaaaagatttgtctcgtaaatttcgatcaaactgtgcaattagtttttatttttgtctatatataatactccatatatatctaaagattcgatgtgacagaaaatcttgaaaaattttaggtttttaaatggaagtaaacgagaccttagctaacgagacagatagagaattagaaaatagcgagagcgcaagagcccagctcgcacatctttctaagttttatgagtttgacatgtattcgatgtctagattttttttactgtttctagctaacacattagcgggccatttaaacgcgttacttggaatgcccttgcagagtagaagaaaaagactagctaacttgtagtgtcgtcaatgggaacccaaagtgcaacatcgctaacggcagagttttgtagtgtcgatgctagacccttatatatttacggagacagaaagaaaataatgctttaatggatgttgtatataaggccttgtttagttctaaaaatttttataaaaaaatttagattttttgtcacattaaatcttgtggtgtatatgtataacattaaatatagataaaaataataattaattatataattttctttttttacgaaacagatcttttgagcctaattagcccatgattggacaatatttgtcaagtacaaatgaaagtgctacaggtttcatttaaaaaaatgtttcaaaatttttggcaaaataagcacttttagcactttcttttatatttcacaaatattgtccaatcatgttagacgtaaaaaaaattgtctcgcaaattacaaacaaactgtataattagttattgtttttaacttttaatgctctatacatatgacgcaagattagattgacctggaaaattttacatttttttttaaaactaaacaaagcccgtatgccggccggcctttgagctacgcaaacgcaaacgaagggctctctgaagcatggcgaaaggaaaaagacggaaaccaaataagggcaaataaagaaaataattgaaccgatgctataccagagatctcaacagattaattgaaccgtatcttagaaatcaataatataaataaaatacagctgaaccgtatctctagaaaaccaaataattggaaaataaagtaaaataggaaaaatacagctgtgagcaactgtcctctgtggaccaaccacctctcccccttccgtgtgtctcctcctctttccgttccaattcctgattctcacgaggacggacagaccatcgagccttgcgcgggtggaggagacgcaggccgatcccagcggcggcaccacatagtgcacccacgcggcgcgcgccctgtcgccgatcgccgacggccgacacgccggcgccgggggtttcgtctagcgcgccgctggtatcccgctcgctgccccgcgctcggcgctccggtgcattgttctgccgccggctcaaccgacgcttcctcggctgctcaatctcgcaaattcgcttggtaaattacctcccaacttcctttttttttctctgatgaaaatacctcccaacttcttttgctcttccgaagcaattttgatgcatcgctattatttattaaactgatgacctaggattcagtttgttagcattattagttgaagttcgtcgaatcgtacggttagggattctattcttcggactgtatgatcgttcggttctgctaaggaattgggtgggcgggggggtagattgtgtgccttatactggaactttgttgttagttgtacagtaattttcgagaattttgcttctatatgtggtcaagacccttaggtactttatagataataatgcagtaggtttacctctctgaatagttcagctgatcctgcatcaatctggatagtttttgcttgttggagtcttcgcgatcgtcttgtctttttccctgtcgtgttggtgttatctatgtaattaggtagtgggcaatgatcaccctaatcataacgcaatggttggtggatctggagaggagttccattcatagaagtcacccaaattttcaaagggaaagtgagacagagttttgttagacaattcaaaagggagttgtaaacttgtaataggcttgtgacgctgaacacgtccaatgtttggtgaacagagccatgtcaaagataagcatgaagtagtagattggaagcttcatttgctattgttgcccatttgaagtctgccgttgacaagtattatgtttcatctactgttgcaaataaatagctgtgttgctagcacctacttttgtatgtgttccatctgttgataaatgtcttgctccctttcccttgcaggtttcctttcttagtgttttggtttggtttctaggatgtgagaacagcctatgtgttgataataaaagtgagaatgcttggtggtctggagttgtggtgctttatgtaatgcacctgatcacatatttcaccaatatcattggtgtggtgaccattgctctcatctccgtagtctccatcttgggcctaatttgcctctgccgctcagtgtacttccaactgtggatcaaaagaagaggctaccagcgccttagctacttcaacgggccatggctgactcggataacattgatgctggttgcattctggtggggtattggcgaggtagtcaggctcacctttgtgaatggggagggaaggctaatctctaaccggacatggcaagtgaacgtgtgcaaattctacatcatctcaaatctggggtttgcagaaccaggattgttcctcttgctctctttccttcttagtgcagctttgcagaagcaagaacttggtaccttgaataggaaatggaaccggaagactatacgtgcagtattcattctctgctcgccttgtttgatctgggaagcttgtgttgttttcgttggtggtcgtgtttcctcagatgacggtcagcgatcaaaggtttcaaagtactggttttctgcttctgcaagccacaacggcaacattacatgcacgtatccactgttgagcagcgtatttattggggcgttttacatcattttgactgtctatgtcatgtttgtcggacgtcaaatgctgtctttggtgatcaacaagggactccggcgaaggatatatatgctcatttttgccaccggaatattacttccccgagcaacacttcttgggttatcggttcttccttggcctggtgaagttatccatgaggctcttgtgtttgtttccttccttgtgctgatgcttgctgccatggtcggtatcgttattctggtttattttccagtcgctgatacctttgccataggtgaccaggagcatatagagatgcaagcaagtcgtgaaatgatcctgtgatagccttttgatttgatgttccgctttttgttcaaggactaactgagggggatctcgtgctacttaccctggctctagccatatttagtcttgcaaactccggctgtcactgtatctccaaagttttgtgaagatagaacaggttaaagtagggataacattctcgtgtttacttttccccccttcatcttaactcatgtagtcatgtggcatgagaagtcctgtaaaatagttccttagacagtgaaaactttactttgtacattgaggtaaagcttcaaatatcagccttttggatgagctataagcgatgcctataccattcagcatgatattgttttctgcgcggtctgtgagaatgtttaacgatatccaattcatctataccagtttaaatgtgctctgacatcgtcaattatttggtaatagtttggcagctgaaatctgttgttagcaatactccttttgttttaagatattaaattttggaactaattagcttgttctgatgattttttttttgttatcgttaaagaagatgtactaactcgttaaacatgtttgaatttattttattttttatgtgtaactttagaatgtattcgccaagttttaatataattcaagtgtcgttgatacatcaaggcataactggatgccttgttcgtgctcctctcgccgcattgagtaagaaactagaataggtagcggtgtagctcgtttggttactttgctcgcctacctcatgcaagcaaggtttttgtttactaccttagacaagcaaagttttttcttaactgcta

SEQ ID NO: 4675 - DNA, 5911 bp, Sorghum bicolor
cgcagacaaggaccaaggtctcgttttgtagcgttatttctaaaactgtggtgtgatatgaaataaaataaaattatgatgaaacactcacaatttttaatagagagttttattctatagttttaaaagcatttcatttcaagacttagagacagttagtaactgtgctaaaagagttttaaataaaacttattttttctctcttttcttaaacacactattataacattaaaaatatctatatatggtaacctatttaatgtaaataaaacttacttgaaactcagactaacctaatatgataagtccagtccagtatgtgctttagtatgtatctacttgctcctctatagcaccctcactgcccgtatgatacatagagtctagtatgtactgtttatcagcagtatttttttatcatcagatcttgtttggatgtagtcgtattcacatcaatccacatgtgttggggtggattggagtggaacttgaactaaattccactccaatccacaccaacacacatggattgaagtaaatacgacaacgtccaaacaaggcctaataaatcatctttcaactatggtttatcagccaagccaatatatatatatatataccgcggaagaacgtacgacgacgctggccgtggtcgatgctgctggcctggttccttttacctttaactgttactcctactcgtatgtctatgatttgccgacagttgccatgcatgcatcagaagtggccatccatccggccagccgtgagatcgatctcagtagcagtagtagtaatagtactcctacatggtaacaagttggccaggtcgatatcgatcggtggcatgcatcgtccgtgcgtccacggtacggcgcacgtctccgtgtccatccaggccaccaggtctcgttgcattgcatgcaccgcgcgcgagtggtgacagctagaagccatgacgaaagagatgcacgaacagcgcgagccggccgttggatcatgattgcatggtcccatatatatatggccatatgcattatctatgtacgcattacataaacagcacggttcgacccgtcgctttggccagctgttgatgattttgattcggcgagggccgaggggctatgaccgcgattgacgagattgaaggagcctcgatcgatcgatggcagagttggtttgtgtcaggtcggtaaaagtttggttgggcatggatcggaacggacacacaaggttcagaattcagatgctggtggagtggacgtccaagaaatatcctccccgtggcaatcctacaaatttcggacttgcggggtacattacggcattacgggcgccgcggacgtgacaagccatgacagaaattattattggacagagagaaaaacactgttaaataactgatatattcggttgtttaggaagtaatcctattcgtcatcatcagcacgtccactattatcggagggatgagtcgatgacgtgattatgctggtgaagatacgatctaatgaagggcgggttaattagttcactgcgccagaccaaacagtaagtctgcattttagaggttgtgcagcatattcttgttggcctggacaaggcaaggcactgcaggtgtctggataagaggttatgcaggcaatgaacaaagccagtgtgtttaggatcgtatgtgccattattacgtgaccatgaactctgatcagctgcagcctcgcactctcgctcgcgcgcggtcgggtaatcctgggccgccgattcttatctcagcaaccaaaaagcccatcgcgctggcctgcgaggcggcaaacaacgactccgtgccccggcccacagagagcccattagatcctcagacacccagccgaaccgccagtccacctccccgtgacgaccaccacacgccggcgtcagtggtcatggtcacgtcacgcacgccgacgactcccagtcccagctccaggacacgacacctctaaccggcgctggctgccatgctgccgctcgcataccccgccggccacagccaactccatctccatctccacctccctcccgcagcgctgcagcgcgctgccgctccgggtcgagcctaccttcccagtcgccgcggcgcccgaaccttcgccggagcgcgccctcccggttccagcgcgggggcggccggaactgagaccacctctaccactagcggcagcgtcttgtcgttcctgtgtccgctcctcaaactcctcggggtaactagtttgtttgtcggatttgtcggttgcccaactccgggcttggttaggctcgggattgctaaaactggtgttgctttgtgtgagcttctgagcagggaggcgatccttcgcagcagcgcaacgacgttgtggaggtaaatctcgtggctgagcaattgcgaaccctgaactaataatactgacttggattagaatccagggttctgaacccaattggatgctcaatcagatggctagattaagtacgtacactgcgtaataaattcacaaaagggaacctctgaccagtcccatgtatttgctgcttcagacatactagtattcattacttttcatttcacgtctactctggatcaatttttgataagtactctgggtaatctactaacaatgcaaacgatgcaggtatttctgatcatgctggttgttactttataacgtaatatttctttttggtttctttccatgacttgtgtatatgtggctaccttttgttccccaggtcacgacatcttcaatttcaagtttagctagactgcaatggggatcaaaagtggctactagcagtggggagaacatagattcggcaataagcactccaactcttcaattgtatgagtttggtaaaacaataaattctgttacctatggttgaaggcttgcatttctgatttcctgcaatttactgatttaaatcccttgttattgttccaaagaggcatgtcccttctgtaggagagttcgggaggccatgaccgagcttgacctttctgcagaggtgctcaaccttgtcttacaatgttccttcagctctgcaatagaagcattgtactgctaattagtaccctctccattccaaattatagatacataacttttgctatgcacttagatatacactatgtctagacaatgacggagccagaaaaaaattatagctggggcgagttctaacatgaagataaacgaaaaagcttatggcacaaatcgcacagtattcatcaactacgattgtaaaaaatatagcaaaaaaactagaatcacaaaagttattgtgaaaaaaataaattaaataactgacaaagctgctgcccctaccaagttctgcttctcctccctccatcgttcctagcgatggcagtgagcggacgagcagtgtgccgcgctggcgcctagcagcggccggcgagggtggcggcgagcgcgtggctggttccttgcatcgggcggcgagggtggcaggtgcgtggctggttccgttggtagctggggcggccgccccaccccgccgctagggtggctccgtcattgtgtctagatacatagtaaaagtaatgtatctagaaaagccaaaacattttataatttggaatagagggagtactttggaaaaccatgcaaccgttttacctgtactggctctactagcattatagtcggtgctggctattggtgtagtattctgatgctgtcttccgaatggtaccaattcttattcctaatgtttcaggtttatccatgtccaaaagggtcactaaggcacagagatgtggtcaagaaaattggagggaaggagcagtatgtcttcacccgctaagtattactgtttactaatagatgtgacaatgcttcaagtgaatatatcttggaaagtttctgaattctatgtttgttcattaaacattgttggcattactgaaaagagacataaatcttctgatgcactgctgatagtcattgaactgtggtatctgtactcaggtttccactccttattgacgctagtactggtatctcaatgtatgaaagtggtaagttctgatcaattcttttggtttgaagagaatccaaacacagtttgttcacactgttctggtttgctatctgctacaattccatgacattgagtctctgaaactttttggcctgcagtcagaaagactgtatttaataggtataggataagagttagttcttatctgtaactgtaactctgtgtaatgaagttcaagttcactactataacggcataataaatttggacgctaatatgctcttggattggatgtgcaggagatattgtgaagtacctgttcaggcagtatggacaaggaaagagtccttctcctggacttcttgagaggtatccagctttgcttgttttgagaagcttatgttacctatcttatgtaaccgtgctgatatgcttcatacttgatgatgctgaaattattttccaaggaagtatgatagtgggatgaataaaatgaaagtactttctataacaggtctggacaattttcttttcaatgtatgcgattctcaatgcctccccatctctctgcagtacaattttcacaggatgggtgcccactcttcttagagctggaagaggaatgacactgtggaacaaagctggtgctgtacctgcagagaagttggagctgttctcatatgagaataattctgtgagaaatcgctgctctcattgttgtcatgttacaagttggttgtattatctgtctctgatgacggtgccctctccctttgtacgttatggattcagtatgcaaggatagttcgagaggctctctgtgaattggagcttccttatgttctccagaacgttggagagggatcatcaaagacagatttgcttctaaggaagtcgggctctaagcaggtaattctgctagccatatgacacaccatgagaaggaggaactgacaattttcatgataggatctgaatctctgatactcagaatcagaaatgtagcctatctacctgtatcattatagatatgctttcttaggtatatcagcatgtccattatttggttatatcaacaaattgtctttggtatcagattttttttttctagttaccggtgcattacctaacttagcaaggcaattgtttctcttccctttattttcttcattcacgaggaacatagcattgctgtttacctgcatcaattcttgacaactttacttctctaacagaaaaagggtgaagcaagggtaacttctaactcacgaataatcatggtgttgcaggtgccatatctgattgaccctaacactggattccagtcgaacgaccataagaagatactagcttacttattccagcagtactcacttagtagccagtagaaagcagacgtccacaacttcactgtatgttttatatgatcttacatatgtgctggtacagtgtatcagacgtggtttgtacatatacttggtctgctgcacttgtgttcctcacatgacacttcatttctccccagctaaaaagccccaaagcaatgttgttcgtactagtaccttttttttttgaaagtgttcgtactagtacttaagagttaggagagcagaaagctacactacgtaacaagatcgtgatagtctttggcaggccaggtgcgtgtgcacgtgccgcgagcggccggtgcggcgcgcccgtgaatccctgtcatctcataaaaaaaaaacttgagggagcactccgacgtcacgacgctgcggagttccataaaaacaaaatgcatcaccggatcggttgcttattactggccttgtttagttgctaaaaattttgcaaatttttttcacattttccgtcacatcgaatattgtggcacatgcatgga

SEQ ID NO: 4676 - DNA, 6710 bp, Sorghum bicolor
ggggacgaggaccgggatcatgtcttcttccactgcgacacaacttctgtagtgtgggagatcatccgaatgcagcacctctcgtccatgaccgatgaagaagcctggacagcacagacgccacctgacctcgaagcttccctctggcccttcgtgttcctgacaatactatggaggatctgggatgctcggaacggccacgttttctgcaacgaacaattcattgtgcgtggtgtgctgtgcaacgttcgcaatgacattgtaacttggcgaaaacgcctccccctagtcatgtaaacagcctcctgggctggcacgctttcatcagcgattgtatcaccaactcttttgcacgccgcggattaccgactgacggagctgtttgaaattcaaaaggtggggaatctctccccccgactaagtttcaaaaaaaatgaaatgggatcgaggagggaagtaagctacctcgcgacgtcggtcctccagctggtgacgtcggtcctcgcgacgtcggtcctccgctcgacgaagaagggcgtcggcgctgactctactacccaccacattggtctccgcgcgacaaagaaggtcatcctcggtccgtctactcgcgacgaagaagggcgcgagataaaggaagccgcacacggagggaaggaaaggcggggtcgcttcgcgcgcgcgggagaaggagcgtcgtcgcacgaaatagcgatgccaagcgtgcgagacccgcgcaaatatgcgcctagaaggcccgaagatgccaagtttcccaatttgccaagtccttttgccaacttgtcggagaacgtttttttatgattttagcaaaaatccaaggatgcaaaatgcttttgtcaaactgttggagttgctcttacgaggatgagagcattttatttttctacgtgtagtaacttgtgcaaacctatattatctaatatatgatcaaatctaacatactagctaatgcaacatctgatttcccttgtgctagcctatatatgagtttatttatacactgatttgtagtggatcacaaggatacaccatgtctaatatagtaatacgaaatcgtgtctgatacaagagacttggtgtattttactcgtagctggcatgtagtccagcataaaggcacacgaaaaaactagtatatccattcagataggctcataaatagccacgagtcgcgtgggtcgttgggcgttggctactccagcagtccagcagcagcatattatcagggtgatcgtccacgcgcgcggcgtggttttattttatttatcaccgctgctgctgccgagtgccatgcgctcgccgctcggggttgttacgatgaaaagccatagctgacaattcgttgatttaggccttctttagttttttttaaaaaaatttcttaaattctctatcacatcgaatcttttggcacaagtatagaatattaaatatagattaaaaatagctaattaaatctttcggcgcatatatagagcattaaatatagattaaaaataactaattatacagtttacctataatttgcgagacaaatcttttgaatctaattagttcataattgaacaatatttgtcaaatatatcatgtctattttgaaaaaaattgcaattaaataagattttattgtaagagaaaaatgctgctacctagaaaaaatacttataaaaaatacttaggccttgtttagttcaccccaaaaataaaaaactttttaagattttccatcatatcaaatcttgcggcacatgcatggagcattaaatatagataaaaacaaaaactaactacatagtttgtttgtaaatcgtgagataaatcttttaagcctagttactctataatagacaatatttattaaataaaaacgaaagtgctataatatcgaattctaaaaatttttcggatctaaacaaggccattataagacaagagaacgaagagcctcggactgaactcgatcagctggaacagccatgcggaacagtggcgggaagaggcggctgctgctgtcgcagtggtgggtcgtcctcctcggcagcctccagctcccggcggccgccggcggcagcggccacgtcgtcaggcgcatgcgcggcttcgacgggccactcccgttctacctcgaaaccgggtacgtaggtgcttgcctgcatgccgtgattctcgtccctgcaaaccccgcaagttttttttctcttctcaccgccggcgcggggggcgggctggcgggtggcgttgcgatgcaggtacgtggaggtggacgagcagcacggcgtgcagctcttctactacttcgtgcgctcggagaaggagcccggcgaggacccgctgctgctgtggctgtccggcggcccaggcagctccggcatctccggccttgcctacgagataggacccttacaatttgttgacgcccatggctacagaggtggattccccactctgcgctaccgacctgagacatggaccaaggtcacaacaatataatgccatttcaattcacggagcatatgcgccttggggcctctgaatcttggtttctttcttggtttgcgaacaatattttcgcaggtgagcaacatcatatttgtggattcgcctgtggggactgggttctcgtacgccaagaccaaggaagggcttaagaccggtgacaccaaagcagtgaagcagctactcatttttctcagaaaggttattagagctttctgcacaaatgaaaacgcagccttctgtatgtttgctctaagatcgatacttgttgtgttgcagtggctccacgaccatccccggttcctgtcgaatcctctttatattgctggagactcatacagtggtcgcatcattcctgctcttacattagaaattcacagaagtaagctctcctctgtacaccagggatctttattttacttgggtgcacatttgatgatgtacaatgagtggctactgccgctgccactgtacattgaaggcacactatagtgagcattactctatgatagagtattgaatccactcaggcattgtaaccaaagaatgctataactaagtcaatcttatagtaaaaaatgatgtctctgaatcaaaaccacaatgtttgattgacctatcatctatcacacatttgatttaaacttctcatttgatatttatactacaataacttggcaatatttttggccatccagtgatggtaatgaagaaaatagaagtcctgctaggcccagctagatggagatatattttgatgtctactaaatatttgattttttttattgtacacatgatggagctgctattaacagtagatatgcttacaatttgcaggcataaaactcggtgaaaaaacattttccaatctcaaggtttgctgaaatgtctcttatttagttattaagatatttatatcaccagagcttaccttgattaacaacatcatccatttgcacttttgaaatggttctttttttttatttccttctgttatttgttcgggaacaagtccactcacagaccataaaaataaaacgaattgtacattccctatgcaaaggatcaagatttataaatgaacataccagtttcgtgcatgttctagttctactgtactgatgtagatatttacttaacatttactttggagtttgattttaagattaactaatctacaagaagatgatgaatcttaatggatcaagaagatacaaagaaaaatgttactttccctggctgggtctatctgcacaatttaagttctgcctgggttggttatagaatacgtggacaattcgttctcttttgttttctttaactcaggggtacattgctggcaacccgctgactgacaaccagtttgatacggacggcaaaattccatactttcatggcatgggacttgtatctgatgaactttacgaggtgatccatcatctcatgaaagctaaagtgatttacagaatactttcagagtatcattctagattctctaaagataacatttaagctcattctaataacaagtaaccaagctgttcaaattcatggttttcataaaacaaagttacccttgtcatatatgtttcacacatttagaatacaaataattttacctgcagaacgctagggagaagtgtggtggaaaatatagtgctccattgcatgctatatgcgcagaggctgtccaagctatctacaatgtgagtactccttagatattttatactagtatgtgtgtaacagagagctatatttggaattcatattgatcatgtgaaatgacatatgggatataattcaaaaacagtcttgttatatacgattttagttatgcctcctgcaaacgtagtattacaaatagttatgttgaaaattacatgtcagagagaaattgatgttcaaaattacatggtttcttaactatagcctgtggtggctatgaaacaacaaagcttatgacactagctgctcacatattttgaatcagacattttagtagcctatgcatcaattggggccatatattgtgcttatgtgtccctgtataatggccgggcatgtggctctcatgatttactggcttactgcctaaatcatgaaaatgcagtgcacacgggatatcaatcagcaatacatcctggatcctgcttgcccggatgatgatctgtggagccccaagactgtagcagagacagatggaatgagtagggtgatgctagagtctgcactgcttgcctccaaatgtacagttgagttccaaagatcagtggcaaagcttttgccgtcctttctaaaaaacgttccaatgatcatatcctttaattaattaattccccttgtccattcatcattaagtccttgcctgcttatctgacccaaactttcctttggccgcaggaatctttatacagtctatcctacacttgggggaatgatgaaacagttcaggagagccttggtgtccgcaaggtgttagcagtctattagggcgcacagtatatactctttttttttttgcgagaaacaaaggacacattttgcattgacattggacatctctacgttattccagggaacaattggagagtggaaacgatttaaccatgaattgctttacaatcatgatatccagagtgcagtggggtaccattcaaggctagccacaaaaggatacagggcgctgatatacaggtaattagcccaggaaagcagtgcctttatattgcaaattgtactgcatagtcatggacgtttcaatatatgcaatgttggttgggctagctaagaagtggaaattgtttctatatctgttgacttgctgatcaaagtatttggatttgttgtttgtgtaattaatttattatgcagcggcgatcacgatgctgtcgtaccccatgttggcacacaggcatggattaggtacctcaacttgaccatcgtagatgattggagaccatggtacgttggtgggcaagttgctgggtaaggagcacgcttacacaagatatctcattccaaaacgtcaccatactcgatctgttggttcttggttgatagcaccctcgacaattaagctgttacattatattgctgttgaatgttttcctgtcaaatatatttttcttctgactgttatatatatgtcaacattgctattagtttatgactctgaaagttgtatttgggcctgttgaaaatctgttctaaagtactaccacaattttctcaaacaaatctaaaagcagtagatattacacattaatactgcctctacttttatgttcctctaactagttcatttgtttctcctagattcacaaggagttatgcgagtggactaacatatgccactgtgaaggtagttaagctttttccaaaacacaattagttgaatgatcaggatatccggtttactctgaaaatttgtagttatatgaagttatatgcactagtacattttatatcacaatcttgaaataatcttgtgtgtataatattttgcagggtgctgggcatatcgcaccaatgtataagcccttggagtgccaaaaaatgttaataagatggatttcaggggattctctttgatatatgtctaaaagaatggtccatcacttatttgagtgggtagcatgctgtacctcaaagtcaaaataaagaatatttttcatgtcatgcaatgaataacttgccaagtcagctgattgtttttttttctcgaatacgtaaaaggtttgcgcgtcgttgtattaaaacggagacgtagagtttttacatcgacgcgccactcgggtgcactagacagggcttaatgttttacaacaagctcatccccataagtacatgacgattactcacgtaatagacaacctaacttggtcgcgccagcgttgataccgtgcaagtgccaagaggcattgtagaagcatcttccgtttatctctttccataactcgcatgctacaagtacgaacagagagtctgctccccgccttttgtcaccggtccagtgcgtccgccatgagttccaccaagaaaggagggtgtctctacccacttgggaagcgtctgcgccgagcgccaccagcatgttccactaagcctgtctggagaaggaagatgatatgctacgatatggttgatcgtctcttgctcctggtcgcacaggaagcagtgatcgggcg

SEQ ID NO: 4677 - DNA, 6866 bp, Sorghum bicolor
taagattatttaagtgacttacaatttgggatggagagagtaataatttgaaacggagttagccttagttaacccctacaacaactgttgcccggtgagctacacaattgccgccacagcgtgtgtccgcagaggatggtgaggacatggcaagataaaatcctggtcccggaggatccgtttctccaaatgggatcaggtgattggctccagttcctcctccgctcagcaccaccagtcctctctcctcctcctggctcctttcacagccagacagcctcagctcaatggcaaagttccagaagcagagttgcatcgggcagcacggcataacacctccctccactgatccacttccagtcgcccaacgtcttctccttcgcaaagcaagcttcctgttcagctcgatcagctgcaggtcgccgcgcccatggcgctgctctccgccacttcacccgccaaggcgcacttctcggcgctcctcttctgccacgacgagccgcagcagcaccagcaccagcacgcgctccccggcggcggtaacagggccaggcaaaagcgggcgcggggcaggtgcgcggcggcgccatcaatgcggcctcccgacgcgtccgtcgctcccgcgcccgcggccgcggccgcggccggcgaggcgcggcggaagaagaggccccgggtgctggtggccggcggcggcatcggcgggctggtgttggcgctggcggcgcggcgcaaggggtacgacgtgacggtgttcgagcgcgacatgagcgcggtgcgcggggaagggcagtaccgcggtcccatccagatccagagcaacgcgctggccgcgctcgaggccatcgacatgtccgtcgccgaggaggtcatgcgcgtcggctgcgtcaccggcgaccgcatcaacggcctcgtcgacggcatgtccggctcctggtacgcccatccatctccttcccgcaacttgccctctactactacgtctcgggttcggatcgcttcctcgcttgctctgttttctgcgtgcgctgtgctcgctcgcgcctttgcatctgccgccctagccgccgtccgtctggtgcgcaccgctacggctacgctagtactagtacgaagtgcacgagcatgccgcgcagcaaaatcaattcacacgtttttatcactaggcatgtcatgtgagacgtcagcaccactgccgagtgccgacctcgccacgatagccgcacgtggtgcgcgcaaggccaagcaaggccaaggaggaagcgcgagcgccgtgccgcgggcgagccgagccgagccgacccgcccgacggcaccaaacgatcgagttgcctgcctccggctagtttccgtgggagtatggactactactactacctagtatggagcatccgggcatggcgtattggcgtggcctggtcggccggtaaatggtgcccgtttcgttttctaatatccggggtacccccactccgcgcggcgggcaacccgcggccgccacgtcccgtcccccaccccgaccgcccaaccgcaccgaggcaaagcttccaccaatccaccacccctccctgcctttgctgcactagagaggccgaaaagcgacaccggccgcagtttcggtctcaactgcaaattccattcttctccggcaccggccctgcctgccaccccccaccggcccaccccataaaattcgctatcttgacaggcgcatccattgaaacactcttctgatctagaccttcagagacaacggccttcctcttccagttcctaaactccccccccccgtcaggccagctcgagaaccaatgccaaatcgcaaacacagttaaaagtctccagctagcagagtcatcagctgaggtagagtcgtcagctgaggtttgactccagctactgcctccctgactgaccggcgataaaagctgttagcagtgtagcacagcagagagcagaccagctgctcactcccaaacagaggaaagcttccaaaccaccagtccaccaccatgccggccacgctgagcacaacgcgggcaccgccgagggcgacctccctcccctcgtctcgggcgtctcagacggcgatcctacgccaccccgtctcccgccgcaaccgagcgctccgccttctcgcgctcccctccccgtccgcgccgcggcagaggcgtagtaggcccggtcttcttcctcctgcccgcgcggggctcgtcgccaccgcggcaatgccaccggcggcgccggagccggagcgcaaggcgcgcgtcctggtggccggcggcggcatcggcggcctggtattcgcgctcgccgccaggcgcaaggggttcgaggtgctcgtgctggagcgggacatgagcgccgtccgcggggaagggaggtaccgcggcccgatccagctgcagagcaacgcgctcgccgcgctcgaggccgtcgacgccgctgcggccgacgagatcatggacgctgggtgcgtcacgggggaccgcgtcaacggcatcgtcgacggcgtctctggctcctggtaagggaggcagtggagcggggttcgttcccgccgcgccagaacaaaaattcttgcgcctagtcaccatgaacttattgtttttgacgctacctggagaaaattttgatttcctttggccggtgccagtggagtgtgacaagagttcattgactgcagtattggcagttagtagtacgaaccaattgatggttgggccttgtttagttctgaaaagtgaaaacctaactaggatcaaaagattcgtcttgtgatttacagctaaactgtgtaattagtttttgttttcgtctacatttaatgtttcatgcaagtgccacaagattcgatgtgacggggaatcttgaaaactttttggttttcagggtgaactaaacaaggccttggctagtcgttatgcccagtttcagttgaccgtagatactattgttaactcttatattactactagatctaaagatatatatagctgccgaaatttttttggtgcttattttacaggttttgtttgcaaatttccatgttgtgtctctttgctggttagctttaagatagatattcctctgctggaggcagccatttgacagtgccaagttggattcaggtacatcaagtttgatacgtttactcctgcagctgagcgggggctcccagtcacaagggtcattagccgcatgacactgcaacaaatccttgctcgagcagttggcgatgatgctatattgaatggaagccatgtagtcgattttatagatgatggcagtaaggtgaatgagcaaatctgtttttgtggccatgtctacaacttaaatctggctgcaagagttgccattgcctgtctctaaacttgcagtatttgttggttgagtgtaggttactgccatattggaggacggtagaaaatttgaaggcgaccttttggttggtgccgatggaatatggtcaaaggtaatgcaattaattctccttttggtcaggaacaagcacaaacagaacctgatttgaagtttccttttctggataggtgaggaagacactattcgggcattcagacgccacctattcaggttacacttgctacacagggattgcagattttgtgccacctgatatcgatacagttgggtatgttacatggattatggaatgatgggtgtgattttcagattgcctgaaatttcgttgtgccataaccatgtcctccattttcctctgttgaaggtaccgagtatttcttggtcacaaacaatacttcgtctcttcagatgtcggtgctggtaaaatgcaatggtatgcttttcacaatgaagaggccggtggcactgaccctgaaaatggtgagtccttacagaacttttcatgcttaattcgtgaaatagatactgccacatgaagttgtgatcaaaatgagaacaatacttctgatatgccccccacaagcttatcatctgcttaatgttaacaggcaaaaagaaaagattgcttgagatatttgacggatggtgtgataatgtcgttgatttgataaacgcaactgatgaagaagcggttcttcgccgggatatatacgaccgcccacctactattaattgggggaaaggtcgtgtcaccttgcttggtgattctgtccatgctatgcagccaaatctgggtcaaggtggctgcatggctattgaggtatgcaatttcttagcctgccatggatatgttctggtgttgatttatatcgcgtaacacaataacaaccttgtatttgtttccgtaggatggttaccagctggctgtagagctagagaatgcctggcaagagagtgtcaagactgaaactcctatggacatagtttcctccttgaggcggtaagtttttctagcatgtttactagtataaagatagtgtttcttgaaacatccactggattttatttgaatgcttgagttggctccaacttcaaagaaatcctgttcttgcatggatttttaactctggtccatactatatagtaagttggctgacaagcaagatattcatttgcatattcggcctgcagttatgagaaagagagaaggctgcgtgttgctgttatacatggactggcaagaatggccgcaatcatggctaccacctatagaccttatttgggtgttggtctaggacctttatcggtatgtaataaacacacacacaactcaatgcacagatctcattatcttttcagcaagatttaaaatttgttataaagtatatcaccatcaattttattggatttctgaaataaggttcagaaattggaactatattatctcataaccatcctcctaagagcattactgaagaactctatactgaaacaacctgaactgcatactaaaattatttacctgtagtttttgaccaagttgcggataccacaccctggaagagttggtggcagattcttcatcaaatatggaatgcctgcgatgctgagctgggtgcttggtggcaacaggtgcataccaaaattattaattactgtcatgtgttcccatttcaagcacatgtgcaatagtaataggattccattagtttaaatgtctcacgcaaagaaataaaccacccaggctttcttcttagttcccaattaccatatccgtactcatcatgcaaatggaacttttcattgtgcacagctcaaagctagagggaaggcctttaagctgccgactttctgacaaggtacgttgtgaatttgatttagtaccagcattttatatttactgacatctagcatcattctgaaggcaaatgaccagctttatcgatggtttgaggatgatgatgcgctggaacaagctatgggtggagagtacgttctttgtttcttctttaatttcatttcattttgttaaacaagtggttgatttattactttatttcagcaactttgaacaaaaataatcattcataatacgatttgcagatggtacctcttcccaacaagtgaaggaaacagcaatagcttccagcccattcgtttaattagggacgagcagaggtcactctctgttgggtatgtctaaatagcaaattcatttctgccctaattgcactcaatcaaggctttatggaactaaacaaatgaattttcttttgcagaagccagtcagatcctaatgacacagattcttccctatcattgccgtttccacaggttagttaatcgaaatgatgacagggttttaacgaacttctcatttgttgcattgtacaaggccttctatagttttatccataaactgcttgtaccagtcttcagttttctgaacttcattgcagatatcagaaaggcatgctacaatcacatgcaagaataaggctttctatctgactgatcatgggagtgaacatggtacctggattaccgagtaagccctgaaagaaccatggttctatgcccttcgttgagaattttcagtaacaagattttactcactgaccttcatgtgtttgtccagcaatgaaggtagacgttaccgtgtgccaccaaacttcccagttcgtttccatccctccgatgtcattgagtttggttctgataagaaggtagctataccgtcctttgccttttttttttatttcttcttcacattaggtttgttcctctaatttacccaatttttcatccgatggagttcatccctgaatttctgtgaaaccttttcttctgaattatgatcaacttgtgcaaaacctacaggctatgttccgggtgaaggtgctgaacacgctcccatatgaatccgcaagaagtgggaagcagcaggggcagcagcaacagcaagtccttcaggcggcatgaatggagacaccggccaccactcctatcatcagcccacactgtactattgtacagcatccggtaaagacgtgactctgcaccacagaaaggatatagaagatacgtcaaagcagatgtgatttttgcatccatcgatgccaaacaggattttgaatactagcacctaacggattgaaaatgatgagattgcagttctacgagaggaactgatgagttgtacaatagggataggcaattcagctattgtcggactgtgtacattattgtatcatcaccaaaaaatgctgtacacctgatcatgtaatatagtgtatagttatttaactctgagtcagataagatatgatttgttcttccaccagcgccagctcctcgaactgctaaaatttcttagaaatttatgcaggaattgaaaaaaaattgttggccttgtttagttcacaaaaattttcaagattctccgtcacatcgaatcttcggttgcatgcatggagcattaa

SEQ ID NO: 4678 - DNA, 4226 bp, Sorghum bicolor
aaatactacatggtaattggtacctaaaactcgttttatgaaaatctggaaatacattccaactcaccttggttgtgtcggcaagaagagaggagcaacagcagcagcgtggcaacaggcagagagcagcaccacgccactacccttgagtctcgtcttgttttcatgtatgatcatatccatgcaattgaaactatatccataaaaaatgtttcttcttaacttcaaaaaccaacaatgcattattaaaataatatgaatcccataaaaggctggtctgatattgcccaatcaagaaaaaaataagccacgtttcaactaaaaaacaatagatcgatgaccatttccagtataaagcacaattttcttcgcaaaattcacatctagctgtacacttcaggttagaaattttcttcccaataagtaaaatagtcatgtgccataatcagtatttattaggaagctaatgtgctggagatataggttataattagctagatatttttaagcattatggttattttaatttgcaaccactacgcataaaattggacacctagggatagtttttctgttgttcatccgaaagaaaaaaaataaaaataaagcagggtgggtgctcagcctcgttgaggaaagtggtggggcggctcggcttggcgtcgtcggaggggtcgtcgtcggcgaggagcgacatcgtcacactgggaccggcacagcgcggatgcaccaagggacgtggccgagccagttcaggattgcggcgtgccctataagttgtggcagcagcggcggcgagatcgatcaacgagtgttcgtgccctgatggtacgtcaccgaccacgatgctcacagaggcgggagagcacctcgcggtgctgcggaggcacgacgttgggtgccacagccggacccttggcgccgtcgacttacccctcggcggcgtcgggcggtttatttccttttttctacatcggcggcgtcgggcggcggtggcgggcgatggtcggacagcgcgctgcgaggacgggcgggcgagcggactgccgcagctccggcgggcgcggcgggcggcacagcaccggggcgggcagcggcggccgagcagcggcggccgcgctcgcggcgggcgacggagccgcacgcgtggtggaggttttctgcgatacggagttttcacggagagtagagatgacgcgaggctgagggtgtgtaaggtcgtgatcatacttctaatccgggccgtctaatctataggatatgtgctgtgagtcgttgattttgtaggtgggatttgcctagagaaaatttcaattatagtagagatagacgattgtgggtgtaagggtgttgcattttgttctaacatgaagccttggatcacctgcgttgaactcggcacaaatcgacttacatttacctatcgaaagattgggcatagtatcattagatgaaaagacatactaacgcaatcagtaaatcaaaccaactgtatatagataacaaaataatgcttatacaagtattctatttttagagcatgaataaattagagagtgtgcaaacatgaacaattttagcataggcctcacagttaccataaatttcaaacctacgggttgatggattatagtttatttagatggtaggaccatgctaacgtggagatacatttctcataatttgttatcctaagttaattttaggtcgtttcacttttctgccagcatttgtactctgccatgtggtggatgaacacaaccatcaattggtgatcaagtgcaaagatggagtttaaataattccaacgaaacaaaaagtctgctctgttggtaccgtgggaatacataaacagagacctgcgctattcaacgccttgtattcgttccagctcagaacacgaaaaaaaaaaaaaaagaacacgctgagctatatatgcagtgcgcgctggtgaccttctcactgtactgtgcgtcttctgaaacagagctgaacatacaatggccggaggaggatcctccgtcggtgtgccggactacggcggtggcgtgacgttctccgtcgtggtgaccagcctcatggctgcctcctgcggcatcatctttggctacgactccggcgtctcaggtgcgcactcctccgcggcgtgatttagagctcagattgcatatcaactgtatttgttaacaatgcgcaggtggcgtgactcagatggattcattcctgagcaaattcttcccggacgtgatcgacgggaggaagagcgcaaaggtggacgcctactgcaagtacgacaaccaatggctcaccgccttcacgtcgtcgctatggatcgccggcgcgctgtcctcgctggtggcgagccgcgtgacccgaagggtgggccgccaggccatcatgctcatcggcggcgtgctgttcctcgccggctccgtcatcaacgccgccgcggtgaacatcgccatgctcatcgtcggccggatgctgctaggcttcggcctcggcttcaccttgcaggccgctccggtgtacctctccgagacggcgccggcgaggtggcgcggtgcgttcacgtcagcctacaacgcgttcgtcgtcgtcggcatactgtcggcgaccgtcaccaactacttcaccaaccgcatccccggctgggggtggcgcgtctccctgggcctggcagccgtgccgggcgccgccgtcgtcctgggagccttcttcgtctcggacacccccatcagcctggtgatgcgaggccagcacgagaaggctcgggccgcgctgcagcgcgtccgcgggggcgacgccgacgtcgacgccgagttcaaggacatcgtccgcgccgtggacgtggcgcgccagaacgacgacggcgcgttccggcggctgttcagcaaggagtaccggcactacctggcgataggggtggccataccggtgttctacgagttcaccggcatgatcgtcatctccatcttcttgccggtgctgttccggaccgtcgggttcagcagccagagggctatccttgggtccgtgatcaacagcatgaccaatctggcctcgacgctgctgtcctccgtcgtcatggaccgcgttggacgcagatttctgttcgtcgttggtggattaggcatgatgctttgcgaggtaataagcatcctagctaacaataatgtcgtcagagtgtgctggctgtgctatgctatgctatcgttgactttgctcatcaagctgacaacatgcatccatataatatactgtattaaggtggccatctcatggatcatggcggatcacctcgggaagcacggaggggtgacgacggcgatgccgcggagctacgcgacgggcgtgctggtgctgatctgcatgtgcacgttcagcttcggcctgtcgtgggcaccgctcaggtgggtggtgccgagcgagatctaccccgtggaggtgaggtcggccgggcaggcactgagcatctccatcacgctctgcatctccttcgtggagctgcaggtgttcatcgcgctgctctgcgccatgaagtacgccgtcttcgtgctctacgccgcgtggctgctggccatgaccgtcttcgtggtgatgttcctgccggagacgaaaggggtgccgctggaggccatgcagtccgtgtgggcgcggcattggtactggaggaggttcgtcaaggttgatgccaggcagcacaacgaagtcaattgtttgtaaatgaattcgagggacacatcggttcaccagtttaaagtttaagcagcgtttgttacagtatatatggtgaaagagccctttggccctgtttggaagcttggtagtatttgtccaaaacacttgtaacttataggctcgattagtttcctgacacaaaaaatttacatgtgaaataagccaaaaatggcgtgaacatatcctcagttccggaaaacaaaatgagggttatcgagtgtaggtcatcttagagcgtgattagctcctctcctctaaacattagagcactttagcttattattttagtaaagctttaatgtgaggtgggctaaatcttaggtttaactttagattatttgaagactttagctctaaagtttagagcagaggattcaaacaggccctcagcgcttggtgcttgccacttcccttctctcgtagtcccgaggcatggagtagtataaaataagtcaagaagctcataactcaatctcacatccggt

SEQ ID NO: 4679 - DNA, 5988 bp, Sorghum bicolor
cttaggggtgtttaggactgcttcactctagtttttgcagctctgctccacgaactccactgtggagtttgtggagtatgaggtactgtttggcatatagctctgttctagctttagaaatgagttgtttctatgcaaatagtccattatacccctgattaaaattgtttttgatattttctaaccaaatagaaataaaatgatagggcattaacaaaggtcataattaaaatataaataattaacagggatgacgggaaggtgaagagaagaggggcgtaaaggaagaaatgaggtaaaggggagcatttacgagaattaattcatgtttaatgagtggcaaggtgggtaattatctcacaactccatgtgggagtaccatactccaaaaactagagtaccccttgagatactccatgaaaaacatggagctgacctctagctccactttttgcaaagcagagttcgtgaagctagacgtgtttggtaatgcagagctgaagtggaactgaaaaaactagagcagagcagttctaaacatccctttagattagcctgcaagagaatattagaagagctaatagcagtgtctctgactcctccaacacttgcagcgttaatagcaatgttcattaaaatcttttttctttctcttctccaaatgaattaggagctgggggaagctaatatttttttgttcctcctcctctagcacagagaagtcaggaggagcttggtcaaatagtccctgcataactcacaaaattaaatctttttatcgggtttatggacaaatccatttgcacactaatctgagagtatatctaagagtctttcttaaattcgttccctaaatcatcgcttggagaggtatttggataaaatcattttctatatttttctagagagccaatttcattctccacttgtggctagcaagaaatctgaaatataggatgacaaaatttagagatctaataaaaaaacttgttggagggcattttatcatcaaaatctctatatttgtcaatgaggaggcatgtaaagagactcttagagttactctaacacatgcttagcgagagtatttctaaaatttactctctaaattattatttgtagatttcttttgaagaaaaatgattttctatatctttctatcctcaaacagtttttgtatatctggtacacgctagagaattgttctcatcttttatctttagctagtgagaaatacagatcagaggatgttaacttttttttttcaatcaaaatctccatttgtgtgaattaaggccttgtttatttccacctcaaaactcaaaatttttcaagattccctatcacatcgaatctttagacgcatgtatggaatattaaaaataaacgaaaataaaaactaattgcacagtttattcgaaattcacgagataaatcttttgaagcctagttagtctatgattgaataataattaccacagacaaactaaagtgatacagtgtcgcgaaatttttcactttgtcgactaaacacggcctaagaacagtcctctgaaaatgctcctttgtgttgtgctaacagcctggccccacgtgggcccaagctgtcaatggttgagcgtagtttctgtacgaagatggccgcagcccgcagcgcaccgtctggagcggcgagccaacgtgcccaccggcacatggtcaggatcctctacattagcattggaatctattggtccatcacacccactcatcatcgaccacgactccaaagaaacgctaaaacctttcgaacacacggatctgggatccgctgctccccgcccgacgccttcccagtccaacctgctcctaggaaccaataccctacacccaccgacaggtggctccagtactaggtggtcccacatttcagtagcttcagcgtcactgtttcgtgaggggaacaggcatggatgggtaccagtacaaaccaggggcaggcagcggtgtcaccggcaaaaattttcgaaaccgagaggtgtgtgtcagcctatcactgccatttcgcccccgaagaaatcgcgagaggggagcgtgccgagctgagcaggcaggcggtagtggccgagcgaaagcatcctcgatctcgtagcagccgccgccgctcgggtaggaaggaaggagagcaatggagagggcggtgccggttcggaagccgcacaccaacacggccgaccttctctcctggtcggccacgggccctgacgcatctgcctcgccggcggcggcctcgcgccccagcctcaaggtctgtcgttgcctattgataccctaccggcgtcggtgtgttgtgaattgattgttcatctgtttatgcgctatgcggctgacttggggggtgatgatgtgtgagcagccggccgcggggattacgccggcgatgttcggcgcgccggtcaccgatcaggaggccgaggatctgagcaagaggtgagatctggggcgtcccccttccgcattccgtgttgatccgctcgatctgtgtcgtttactgcattctactacttattaatccggttccgatctgatctagcgatgcgtatctatgtgtgtgcgcgtgcgtgcgtgctctgttcggatgtgtgctccgaccgatccagtcgatgtctcatttcaaacatagcaagcctggttgctctggttttggcgagaaggccattctataatggtggggtttagctagtagtggcagctacacgtttcaatgctcgcgacaccttcccatggtggttgctggggagcagtcgcttgcaggcggttggttcatgtgaaggctgggccgtgagcgtggggtacggtgcaagtaggtgacgctgctagtgtccaacttcatgggtatcagtagtgtattgtagatggggctagactccaagtttttagcactgactgaaagtgatttcaaggatgcagaacacaagcccccaatttgaaatttggatatttccgactccttgatgtaggctgtagtggtgtcactgcctgtttaacatgttgtttctttttgtatttttgaaagtatacacttctgttttgcattggagaatgttgaaaattttcaggcaactgtgacaaaccttgtgtatgttccttttcgaaattcgtgttttaaatgaaaatgtgtacctgacaattctgtgatggactgcttgcgttggacaatggtagacaaacagctggggatgttctagtctatgcaatttttagcattgcttccaattctatctttggcacttcttcagagataaaatatactgaacactaaccttcctgttgacatattgtagtgaaagaaaattttgctctggctcgaagttgaaagagatgagtgggagtgggatttttgctgagaagagtgaaattggtgattcagaggcttcaaatcctgctaacaagacttccttgaggatgtaccaggtactggtcttattcagatccttctactgaaacctattctccccttctaagcattactgtgccagcacatattactatatgtttatgtggatggcatgccaagttgatgcttacgtttctcttaaggaagtgcgctataactgatatttcaaaggaaccacatccattgtcaaaaaaaaaaggaaccacatcttccagagcttatatttctcacattttgctaagtttaggtttatgtaacttttatgtatgactatagattttgtatctctagttatcttgcatcgattgattctatgtcacagaagaattgttttcttactatgtgagtcgacttttcatgacagcaaactgtgactggaataagccagatttcattcagcgctgacggaagtgtttcgccgaagaagccatcgtcgatacctgaggtggctaagcagcgagagcttagtggtaccctggaagatgctgatgctaaaattaataagcagctttctgaagccaagaccaaggagcttagtggcagtgacatctttggtccgcctcctgagattcctgccaggccattggctgctcgtaacatggagctacaaggaaatgtcgatttttcacttccacagcgaagcgtccacacatcagttaaagtatctaatgtaagtgacattagaagataactttcctattgatgttttgatgcacattttatttagttcttggctgtatatgcctacccagccaaatgcataatgtagagaatttggctcttcttatcttggaatatgtcgtggaaaccgatttcagctccaactttatatggtttgtacatggctgaacattggcaggctagtattccatatttgcacagttatttgtatggatttaatttgttttatgttcaaatgatgcaaatatttgagttgcttgctattttaatacaatttgtactgtactgtataagtagtgatccctatttgatgtgtttgcatgaatatggtactgtgcttttgcatacctacttgctaatactacgctagcttaccagtgcatgctggtgctttttttatactaacaatcaaatctgtctatggtaaaatgtctcctagaaatcaagaattcaaagatgtcactgttgcttgaatcttgtcctctagcatgataatgtcctaatttgaaatgcttaatagttatttgtaccataattctataggataatatgaaaaggaaattttggtgtttatgttacaaagaatgtgtttgtaagcctttcatatgaaatacactagctaggctaacatcagtgcatagaacaatccctcatgttttacttgatgttattctcatatgacttgatattcttggaaaaccatcgtattcacccctttgaacagaagctagatgtttttcatcatgttagcatgaatatcttaccctctaaatctatgtaaacttatgctgcagcctgccggaggtccaagcaacatctcattcagtgaagatcctgtagtgaagacagcaaagaaaatccacaaccagaagttccaggagctgacaggtaacaacatcttcaaggaggatgtccctacctcggctgagaagtctctgagctctgcgaagctgaaggagatgagcggcagtgacatctttgctgatggaacgccagctccccgagaatacctcggcggcatccggaagccccctggtggtgagagcagcattgctctgatctgattgctgtcgagggctctaattcggactggctatagctcccctcgtcactgaagcgcgccgagagtgcatctgttgacctcttggctcttgaattgtgccggggatcataatttatgttgggtatcgttagtctaatataatgtagagtcaggagaatctgactcggttgctcgtgtcatctgatacgccggtgtgtgatctcgtctttgattcatgctacattattttgttatgtattagtgcatccgaactagaacttgtgcaataattattttggactcatttccgggcttatggtattataggatgttttgcttgtgctgttgttgacccaaaagatccatattcgtcttctatttgccctcttaacatttgattgcaaagtgtgggccgaatttgtatcatttggtaacaaaaaccatggaaacgaagattaaagtatccagagttgtttttctatagctgtctttgcgccgcgcctaaaaaatttatacatcccaattgatgtcaagtgtaaaatagtatatatatatatatatatatatatatatgtaagccagaaagaagggtgaaatatagtatgcgaaagtgttgtttttctatatttgtcttagctctggacctaaacatcccagttgatgttaaaggtaaaatagggatactagtagcctgccaatgttcagccatgtacaaactcttaaaaagggcgaaatagtaaaacatcaacaaaaatatagggtgaaatagaaaaacattccagttgatgttgagggtaaaattggacaaaaaaattaagagagaaacgac

SEQ ID NO: 4680 - DNA, 5225 bp, Sorghum bicolor
tttccccttccctcatcgcttcatttttgtttgtatcgtttagataaataatgtatttttctagataaatatctttgcataataaaaattgtcataaaaattttagctctgccacttggcttaaagtactcataatgcagactctatcataaagtctacagttatttttttacctcgaacaatatggacttagagtctaaataagatttggagtattattttttctatctctttcttcaataaatatgctaccacatcagcaaaaaccataaataatatataattaattgtcttagactatgtgataaagtcttgcattatgaggtcacttatgcatgcattttatgtgctcagttcacctaaccttgtttagttccaaaatttttagcaaaatgaccactctagcacttttgtttgtatttgataaatattgtccaatcatggaataactaggctcaaaagattcgtctcccagattataggcaaattgtataattagttattgtttttatctatatttaatgctctatgcatataccgcaagattcgatgtgacgggaaatgtgaaaaattttgtaaaattttttgggaactaaggccctgtttagttactccctcaaaaatttttcatccatcccatcaaatctttggacaaatgcatggaacattaaatgtagataaaaaattaaactaattacacagtttggttaaaaatcacgagacgaattttttaagcctaattactccatgattagctttaagtgctacagtaacccacatatgctaatgatagattaattatacttaatagatttgtcttgcagtttcctgacgagctatgcaatttgtttttttattaatttctaaaaaccctttccgacatccttccgacatatccgatgtgacacctaaaaatttttcctccattatctaaacagggcctaactaaaaacaagattccccgtcacatcgaatcttgcggcacatgcatgaagcattaaatatagatgaaaataaaaactaattacacagtttgtctgtaaattgcgagacaaatcttttgatcctagttagtctataattggacaatatttgtcacaaacaaacgaaagtgacacagtagcaaaatccaaaatattttcacatctaaacaggccttgtttagttcaaaaaaatttgggaaatcgacactgtagcacttttgtttgtatttgaccaatattgtccaatcatgaactaacttaggctcaaaagattcgtctcatcaatttcgaccgaactgtgtaattagtttttattttcgtctatatttaatactccatgcatgcgtctaaagattcgatatgacggggaatttgaaaaattttacaatttttttggggaactaaacaaggcttataattacacgaatgagatatatatatatgactctataaaacaacgtacagcagtagttaaaatcaacacctatgactttgaaaaccgatcatgatcgtaattcgtacggtgcagacaagtcgcccagttgagagagttggcttttgttctagtttttgcgtctgtctgggacacgcttttccccgatgcctggtccaagctgcattcggcgcgccgctttcaccggtggcccctcgctgtcctcgccgcccgcatcgacgccgttcgccggcaacggccgcggcgctcatgtcatgctggtagtgacggcgcgtcggcgccagcaagtgccacagttttagtgttttaccgcggctcagagctgggggcgctactacacaattgatggtcacgggacgctatcggacgaggatgaaactcgtagagaagggacacaacctgcagcgcgcgcgtgcactgcaccatggcccagcccaaccattcgactagcctactacacatccggagaggaccgaccgcttcaagcacatccaaaaccatcgccatcgccatcgcccagctgatcgatagccgcctatattaggtgctcggtgttcataacttgcggcagagctcggcggcagcagcatgcctgcaactgcaactgcaactcctcccctctctccctcctcctccccagtgtgctgatttgctcctgtcacctgtgtgcttgtgtgtgctagctaccatcgctggccgccaatggcgaggcgtgagctgttcctcgcgctgctgtggctcgcggccttggcgctggccaccggccccgctgacgcgacgaggaagatggtcggggtgtacgtgctcaggaagggggatttctccgtcaggctcaccaactggggcgccagagtcatgtccgtcgtcctcccagactgcaaaggtaccttacctgcagtgttcttgcttcatgtcttctcttcaccccctttgtttcccttccttttaatttggtaccaagcttgatgatttgaggcgtgtctttctgcagggaatttggctgatgtcgtccttggcagagacaccatcgctgaatacgtcgtaagatgcccaaaaaccactctgaatgttccttttcttttatcttgtgttcttccatcattcttcagcagtatatatatgcctgcatttgccgtccgttcgatgaccatgaactgatttggacgaaaacatcagaacaatgcacggtgcgggcacacaacttcatctgttctagctgcagttcaataaatccagtacatctagtacacgctaaaagttgatccttaatcggcatgaccagatgccctattattaagtatattaaaaatacccacccacccagtaaggttgtcctaaagcgagattcaataactcaaatagtaccttcgaatcgatttgtcatctgctttgtagtttcactagtacttttctttgcctgaacagctgaaccacgacaacatgtttaattaagacaatctacttgcacgtcatgctcgctttttcatgcaaaggagtataataatatattcaagacatcaagatgttaatgtaaggaaagtgtactatccatgaagaaccgacagttgacagatcatctgtagctatcctccgctttagttctgtttggatgttgtggtttttcagaaactgtagtatcaataataaacttcagtttcgatttttaaaacaagagatacgtaaaaccataatttagaaaagaaggaaagttaagtaaagtttctgctaataaaactccaaaaagactagagttttagctaccatggttttcaaaactacaaaaatcattacacactaaagttttcaaaaacaaaagtattttacaaaagcatgatcttttttgaaacaataaaatacttagtatccaaacaggctagttcacacaaaacctctgcatcatatgcaattattgtagtccttttcctgaggtcatactggtcaaagttgcatcactcaaggagaactttctaagaacgagctgatccttcgccaccaaccaaatttcagaaacgtttatccacgagtcatcatctcatcaagctttaagctcgctgaaagtgacatgcatgtttgctgtattgtttcttctgcgttatatatatcaaataatatggcaatatcctcatttcgagtttatttctgcaacttgttctgttcatccagaacgatgacgtgtacttcgggccgataacgggccgcatagcgcagagagtagcccgcggccggttcgtcctcgatggcaaggtctaccacatgcacaggaacgatggcaggaacacgattcacggtacatccagattgaggccatggttgatcctgccaaggattctttcagatgcttatatgcatatcagtatatgttcttgttgttcatcaggtggtgacagaggattcagcagaagcatttggacggtgaaggagtacgtagccggcggcgagtcaccctacatcaccttctactaccgtagcttcgacggagagcaaggtacaagcagtacaaccgcagctagatagaaacgtagattgcagtccaaattgactagattttggacggcattctgaaccgttttgcctcttcgaatgagtaggtttgccggggaacgtggacgcgtacgtgacgtaccgtatgtcggggccctacacgctgggcgtgcacatgaacgcgacggcgctggacaaggcgacgccggtaaacttcctgctgcacgtgtactggaacctgcgcggcgaggggaacggcgacgtgctgggccacacgctccggctgcacgcgtcgcggtacgccgtgctggatgatgagctcctcccgtcgtcggggcgcatcgagcccgtggccggcacgccgctggacttccggacgccgacgccgatcggctcgcgcatccgccaggtcgtcgtcatgggcggccgcgccgtcgggtacgacaccaactacatcgtcgacggcggggaagggatgatgcggcccgtggcgcaggtccgggaccccgcgtccggcagggcgttggagctgtgggcaaaccagccgaccatgcagctctacacggggaactttctcaaccacaccaagggaaagcgcggcaaggtgtacgacaggtacgctgggttctgcctggagacgatggggtacgtggacgccgtgaaccaccctgagtttccgtctcagacactcaggcccggccaggtgtacaagcacgatatggtctacaagttctcgttctaggtgatgcacgatgtaaaacacagttcaccattggtatttggagggcaatcaataataatatttggatcacaagcagagccggccctatgggaggggcagcaggtgcgccggccatgggcccttgcagcttgggggcctaaatatgtatagtactagtatatctctattctctgtatatgtattgagttacaggtaacgagcagccgcaacgcctgtcgcaaagagccagagacacggactcgcggtgtctcgccaaattcccgattgacggcactgcacgcagacgtaggcacgcagccattgctctggccacaaacctgcagtcatcgaggcctcgagggacttcaaacaaatcagccaatcaggcaatcaccaatcagatctttattgaatattgatttgattcagtttcatattttcagtttatatgatcatgccaaattttatatgccctagttttttttcttgttcaatttttgtctattactttgcacaggtactcatgtagtcatatttttattttaatttaggtaaagtgttagaatttgagaatgttacctaaaaa

SEQ ID NO: 4681 - DNA, 6385 bp, Sorghum bicolor
atataaaactaaaaaaccaaatattttttctgctctgaggtaggaacttcacctttttggaaaggtgtcatttgggctatgcaagcagcacatatgggtgtgagatgggtgattgggaatggaggtaaaattcgattttgggaagaccagtggctttgtaatacttgccttgctatcctttttcgggctctatatgttattaatgaacaacatggaaaaactgttaggaaagtttggaatggtgaagagttgcaactctcctttaggaggggtgtctctgagagaatcatggatatgtgggaagagttaaaagcagctgtggagaatattgaactcaataatgaggaggatcatatcctttggacttatagctcctctggaaaatattctgtacaatccttatatgctatagttaatcataggggtgtggtaccgatctttgtacatgttgtttggaagctgaacattccttcgcgagtacaattctttctcttacttttatctaataataaagtgctcactagagataacctagctaaaagaagagagttgaatgatcctacttgcttgttctgtaatgataaagagtcttttacacacttattctttcagtgctatgttgcaagtaatgtctggaaatatatttctggttggttgaacaaaggagtgggggttgattttgaatctgtggcgtctttgtggatagccaataaaaagtatatggtgtgcaatattgttacttcaacagtcatctgggtaatttggaaattgcgtaattcattatgttttcagggagtaccatggagtggaatgaaaaaggtgtttgttatggtgggaaggttgctgagaaactggttgccgatgttcaaactagagcttcaggaaaaagtggagccggtgatctgtctggtaaagaacgaagcaagcttagccctgcggatcaagtggactgtggattcatcaggatcggatcaatcaattgctcagcctttggtggtctcaagagatgtgtcaactctacaatataataggaattagagtatggttgagagtgttttgttttttgacggccgtttcttggattgccttgtgctctttgagtagggttttggagtttttttgaaatgcttttgagctgttgaatgctataaacttgttagctttatattaataaagctggggagaccttttattaaaaaaaagagagggctgtccggccagcctaaatcgtaataaaggcaaagaaaaactgaggcgccatgagcagtaggggtgcaaatgagtgatgattaagtgcacctctaaacatctttagttcaaatatttatactagttctccaaaaaaattaagaagtagtacaaatatttgaactaaagaggtttggaggtgcacctaaaggttacccctttgcaccactaatgagcagataatagaaatgcttcaaaacagggacacttagaaatcaaaaaaaatattgtcaagtatgatatagatatggttcaaaatcaaaatgaaaaaaattgaaaaacttcaaaaaccattagcagataataaaaatgcttcaaagtggaaacaatttgaaataaaaaatattgtcacttcaaaatggagacacttagaaataaaaaaatgtcaagaatggtatagaaatgattcaagtcgaaatgaaaaaaatagaaaggcttcaaaaccattaacagataatatcaatgcttcaaaatggaaacacttagaaatcaaaaaatattgttaagagtgctttaaaatcaaaatggaaaaatagaaaaacttcaaaaatattgtcaagaatgggattcgaacccatgccctttcggaccagtacctgaaactggcgccttagaccaactcggccatcttgacttatgttcatgtcttaaaacatgattttatataacctatgtgcgtaagacaagcctgggccattccaactaaaagccaacacaccgagaagggcagcagaacccagcgccgaaccaaaatggcggcgctcctaaaacctatgtaccggcgactcgccgtcgtgggctaccgccggatctctacaccggcggtagagaagcccctgctgcccctcgtgtttcactggagcttccagggtttgtcctcttgtcaatccatttctcatttagctggaagctaatgcgtgcgaattttcgggtgctttaaccagctttttcatttggcgatttgtagtcagtgatcgttgctaattcatgttctgttcatgttttattgtgctggaatgttctaaatcttagattttgagggatcccaacaatctcgctgcccccgatactcctgcttcataattaatatttgattacacagaacctgagatgctcccctgaagtagaaagggaaacgctgactattctcttactgaaatgttgtacagaaagacacaattccagtttggtggatgcgggtggaggattcggcaagatgcttgcctctccacagaggtactatgtctttggaggcaaaggtggtgtggggaaaacaagcatggcggcgtcgcttgctgtgaagtttgccaaccatggtgaaccaacacttattgcatcgacagagccatctcggtcactgggtgatttatttgaacaagtatctgaaagcctctgtcaccttctcggaaaaaactgtctctttagtacctttgttgaatgtcttgcttgtgctgtttataggacacgagtgatggcaaaactgtacgcgtcgatggatttgactctctttttgcagttgaggtaggatatgctatactagagcttttgccattctacttcaaattttgttctgtgctatcatgattaagcaggttctgcccggttgggaaatgaaagccttggattgcctttggtggtagataacatgataaaaacaaacgcttggttttgtaagaaatggttaaagatcatccaaatcatttcgctcctggctggacagctcccaagggcgatgattcattgtgttttcttatgttacagacctctttcttgtcctgctggcttggctttaactatctgttatattgtccgcaacacattcttttgcagattggccatatgaagttaaagggaaaacctcaagatgttggatcttatatcaacaatttacttggaaagatggggcttggaacacatcctgatattatggtatacaccacctagaaatttccattttccttcttcattttcttttgaatggtcctccaataaattattagtctccacactaagtgaatgcagaaactataaagttcaagctatatttctttgttggctcagtgtatattgattgttgcattgatcttctttttattggtatcatgacctgagataaatggagatgcttgaattttcctcggggcaattagtttcatatcattgtttttgttctttagcacgtctccttatcagttcttcagcattgtagtttagtggtcagttgatccagcatggcacttacacgtttggtttgatgctgtctaatgccaaggggattgtcccaaataaagtatttatttgctgctgctcaagaatagaagttttctttctttataattcattatagatcacattacctgtgcttgcatttgtcctttcatggttgcaaagtctatgcttaatgagatgctgactataataccacctggacttgatgaagcagttttactatcagaggtaccaatcgaaatttacgtgctttattgtttccttatgcattttccaaaattactcatcacttgatgtgtatcctttgcagctgataaaatctattgaagtacaagggcttgataaacttaggcgtatagtgctggatgctccatccactgtttgtccccttctcaccacaatgtttccaatctgattatgttcttcatttcatccactgacagttatttgactacgtgcgtcttgtatagggacatacacttaagcttctgtcagcttctgattggtttcaaaagttcctcgttttgagcattaaggtgagagctttaatatatctagtgagcttacttctatgctaccttcgtgaatttcatttgcatgagtatatgtttaagcttgatacttatttttccttgtgatattaggtgatgtagactagggattataaattattatgacatagtggcaaggacaactggtatcgctaacgtgattagggactttctacaattatgtgcagatgcacttgagatactgtcagtgcgaaaattgtcgcatggtttcaatttggagtttcggagagtgcacctctttgagactgtagactgtaacacctaactgtttgtctagggtcccctgttttgactccttttggctctgtcgtgttatggagttaatgcctttaattgtgcttcactgaatccctttatccgcatgctagaggccgggcagtaaattccatgcagcatgtgctcactgctcagagtaaaaaatcacagtatgcttcaatatagcatttgtagtatacttgtgttgcaaatgcagttggggatatttaattgttgaagagaaacaaaacagatagagtgtactaggcattaaaggctacaagttacatgtacaacaaaacttctgcaagcttggaaatttgtcttgctgcattcttccctttgagtttttctagaaccttggaatctgtcttttggttatgcaaatgtgtgatgcatggtgctgcacattgttatttcaggtcattaatgtcgcttcgtccatgccaacctctaatatgtctcttaagaatgtccaagtaatcgtaagtgtgcaacattttctagttgatttgttttaatgtgggctgaaaagaaaactgtgagcttatcatcctccttgtttcatcaagtctgccaagctagaggaactaaggaagcagattgccagaatgcgtgagattctatttgatccacaatcaacagaattcatcattgtgacaattccaacggtaaaagctaccaccattttgcaatggcggcaacatttactagttttaactgtagttttaccctgttgatatctggaggtgtgtttattattctatccatagacttccatgggcaatagaaattatgctgcttggtatattaacaatctgattcagaagaaagaaagaaagaaaaatccttcaacaggtcatgaaagtcatataaggctagctgcagattaggagccagtttaatcttgtggatgctttgtttgctcagatgatggcagttagtgagtcatcaagatttcacgcgtcattaatgaaggatggtgtggacgcaagaaggctcatcgtaaatcaggtgttgccaccatctgcatccgactgcagattctgtgctgcaaagaggagggtaagcaaacttctgctgttctggctactctaactttgcccatgacttgtagcacttggtttggacaggacagctccatccatgcacaagtctgctgtctactgcctttcaatggatattagtgtggcatatattcaattatttattatcgaaggcttattcacatcccttgtagctagccttgctttctgaatttgcatcaggatgcagctgtctgagtgcaaaccttacaatttcaggaagaagcacgtgccttccgtgcgatactggaggaccatcaacttggcggcctgaagctgatccaggctcagctccttgacatggaggtgaaaggcgtccctgcactccgattcctcagcgattcagtgtggaagtagcaacgtagtacaaacctttgcccgtgtctcacaagcaaacctgccctgcataattcattgcgtggttacttggatctgtccgagctaattgtaatgagttagctagctttattagatttaattagacgtggttaagcatatttcaattagagttgaataagctctaaggcccataagaaatgttaggtcaaatagaagattaatctctgagaaatcaagtggaaattgagtactcaaggtggctattatgtgtatctcttgtgaggttaagaaaggtggagcgtgagtcctcctgtgtgccgagctatgtggaagtgtggaactaatgaaggttttgaagcttcttcgaatggagagatggaataagataattggaagtaagagatggacaggatgggtcgatgggagagaaagtgatgacgaaatagacagatatttgatattatcagtaccaatagcacaccaaaggataaccctggcttgacacttctgttagtatatttcttttccaaaatgtgaagggataaggtggaatggactcagcctcacttatcagctatggtacattgtttttctctcacaataaataaaacttttcaaccacgctccgtcgttcttttgaaaaaaaagaatgtggga

SEQ ID NO: 4682 - DNA, 5599 bp, Sorghum bicolor
acaatgagagagccaacaagcaacatcatacaatggcttaatatacaaagtataaagagaggagacatataactatcccgtagcacatgacatatcattcggttcaccatgtattaactatgaagaatcaactactgtataggtgagcattgagaaggttacaagaaaccttatggctagcaagccgactatattattagccttgttcttagttgatgagctagcatcgaccaattccattgctgctcccatctagtgctcatcctgcacgcctccatcttgtgtgtcgacacgatgcagctcgtgcaccgccatgccatagcatgtctgtggctccattctctcgtgccgtcgtggtcagcgcacatgctgtcgcccatctaggtggctccgtaggttagcaaggattcactagtgctctagtgtcaatcttaatggggacggacccgatggctcgagccgccaccatgcatgcctgcaccttgcctaagctatcgccacctccgcacacaccttttccccacgcgagccaccgtcgtcttcatgcacacgtaggagctgccgcaacatgccgctcccatgtgtggccgctcgcccacctctaccgcactacctgtgccttgacatcctccaaaacacctagcatttggagaaggtagcccgcacctagtgctggtgtctcctcctttcccgcctgctgatggttggcgctcacgacggcaagaggaaacaaggagatggcgacgagcgtagcgtcatgactcgcgagagaggagcagagcggagcaaaggatttgtggaggcttaatgatcaatggctcgatgtacgtcggcatgtggaacaggtgcttttgtttggctgatgctgctgttgatttgtagtgagagaaaaacaccattttatgtttgaaaaaatagagccacctctatttgatcatccctcatagccaagattgggcttagccctgtcccatatagagaaggtagagggaggagcagaacggagtagaggattcacggaggctaaatgatcaatggctcaatatatgttggcacgtggatgagacgactaaaaaaaaaagtaggcgacgtggcccattgagatgctcttgtttggttgacgttgatttaggccttgtttagtttccaaaaagtttttctaaaaattttagattttttatcataccgaatcttgcggtgcatacataaagtattaaatataaacgaaaataaaaaactaattatacaatttacctgtaatttgtgagacgaatcttttaagtctagttagtctatgattgaagaatatttgtcaaatacaaataaaaatgctacagtacccgaaaacctgaaattttaccaattgaacaagaccttattgtaagagaaaaaatattttatgaatgaaaaataagactaattttggctaataagctatagagataatgtttgtttttaatctttgtagatgtagaaatttttgaaccaattctaacgccttgtttagttcgtgattttttttgttttgactactataatatttttatttatatttgataaatattgttaaataatggactaaagagactcaaaagattcgtctcacaaattacaggtaaactctataattaatttttgtttttgtttatatttaatgctttatgtatatatctaaagatttaatgtgacgaggaatcttaaaaagttttttttttgtttttggaagaatctaaaaaggtctaagaactgatgccaattattgacgtgccactacaacctgattagaaattaaaccctaaacccatctaaagtgcacgtggtgcatgtgcaggcgcaaaggtgccagcgattcaaatcgagttgggcccacatgtgcctcgaaaattttgagctctgggttcccaaaaatttccgcgtcccgcccatctccccgtttcaattcggctttcttcctatttgaactagaacccccgccaccacagcctgaaacacccaaacccatgagattcgcatcaggggttccaggcgccaagattggatatccaggcgagctaatccgtgtccgtgaggaagttttaggattcggcccctttcccacccatttcttggtgtttgatgcgattcagggtcttatttttttctttgcagatctggtgaacctctacgatcagtggtcggagactcgaagcagtagtaggatttggaccaggcaagtcaagactgcgagaaattttggggtttctgccttgctggtcgactcatttgtgtttattgggtgctcaccaatctgtatctgccgcgtgctttctgcagagccccgagatgcctgactccagggacggcaggagggcggccctcgctgacctctcaagcggggttggtggcggagggttctttatcaggagggtggcctcgccgcgagccctggcggtgaggggtgctgggaagccgttggcgcggcgttatatgtcaccatcgaggaacaaggagaacctgctgccaatttgggcgttgagggccacaccggcaaagaggagcccgcttcctggatggtaccccaggacgccgctccgcgatattacggccattgcaaaggtatgcctagtatttcagtgtgagcaatttttaacttattgaaggtttaattgttactgtgcttacatgctttatgatgtgtgaatgtgtgattggtagttggaaacttaaagcatctcgtgattgtagttgacctgctgatttctagttggagtacaatttgtggcaaagcaaagcggttttgttggatttcatcagaatcagaaaattacccgttggtcttagtggaccacagtgatgtgcttttagttgctagttttactggaacattttgctcaaacaacaatgttgaaaagaacttgtggcattcttcttctgccagtccttacataaatctaatcagagttagtcacctattaattttacatatctggactcattatctgtgtttagtgccaagtagagtaaaaagcatgccagtggtatacaattttaagttattatacttggctgtctggcacagccagatgtaccaatttcagttgatgaatgctgaccttttcttttctgtagtatggtctaactttatagtactgtcagtagcattctgagtgaggtagattataaattagcagcacaattctgaatttctggtgtcctttttgggattgtgtaacgaatccaatgaaaatatttgattcaacaagcttgctaaattgcagtaacattcaaaatggaattcaagctttacttcaccatcttgaacttctattattgcacaaaactgaatttcttctaaagtattgctcaaataataagatgtttttacttccaatattatgtatggtcattttctggtggacatgtttacttttgaattttttatgtgtgcttatatccaccatgttattctattgcaaaatcaatgcacaatatgtttatagatgaaaatattaatttgtctgctttatgtcacgagtccaaccgtgtagtactgttggtgccaagtaggagtagctgattgagattgatgataaatctgctgtgcagtttcctactttttagtgtccataaaattttgctaatatttttatggatccaatgagaatatttaactcaacaagctggttgaacaacagtaacattaaaacaaagagtacaagttatacttcaccatctcgtgcttcactgctttgtgtctcattgacatgccttgtagaatatgtatgactgaaattaaaattcttctgaagttctgaggcatttgtggggtggaccattttacttttcatagttgttcatatccaccatgatattctgtttataaaattaatttgtagtatgtttattagtgcatctgcattttaagtccatgccatccgtgtttagtaattcctctgctgcacttgccttagttgcatactctatctgtcccaaattataaggcactttggctttgttctaaatcaaacttctcaaactttgaccaagtctagtaaaatgtactgacatttacagcaccatccaatccactatggagtagtcttgagagtgaacttatttggtattgtagatgccaatttatatttatataaacttagtcaaagttagagaagtttgattatggccatagtagtgatttataatttggaacgtagggtgtagattgtttgtctatgtcatcacgaaagtacgaaattcacttagccacaattaatgtttgccaatatttgagttcatctgctgtcctaaagtttatccccacatcattagttcattacaaaagctgaactacacattcagtatatttttgttcccttgctaatatcctattctgactggcttgcatgcaggccattcagagaagccgtgcaaggattgctgcggctcaacagcaaagccaaaggatcgagcagtcaccgcagtctgtgaacgtgactactccagcacaagcagagcaggatgctcctcacattgctgaagcctcccatgctgttgcatctggctccggttcaactgaaagagaaactgtagcaaaccctgctactgtcttggctgatgacaatttgaatgtgtcttcctcgccagcagaaagctcactgaatactccatccaaaccaatggatcctgcccttgctgacattgttgagaagaaactttccagttcaatagagaagatagagaagttggtgaggaaaaacatgaaacgaacaccgaaggctgcccgggcctccaggagggccacccagaggcgcaatctcatgtccatgcgatgaatttactgctgtactttgctgggggaagagaagaaagtccacctcaggcttgtcctccttcctcttgtctgctgtttccttagtcgctagcctaagtgccaatgccccgggtgtgctgctcttcttccaacacttgccatggaatgatgcccgcggccattcctggttcccttctcgagaaccaaagaatatggggctattggctctctgcttgaggctctaggactgcagctactagtgtgaggcgtgatctggttcatgctattgctgatgtatgcatacttttctgtgtatcccagtgggccgttgaacaaatgaaatcttgaatttacttttgtgctgcactattaccataaccactagtgtgaatattttcttttgtggctgcttgtatgaacttcaatatgtaggtcagtaggtactatgagaaatttagcatagtacctatgcagcacaaggtgtttggtcatgatttctaagctcctagtgttggatgctttctacaaccttgttcttcaggagtaaggcccataatcgaactacaaacatggtgctcagttgagcttatgttcttctgtctctgtcctttggcattataataaatctttcttcacatttcccctttagcttcatatatttttccttgtcttcctgcagtggattatagtctggtagcccttgtacaacaaaagctcaatagcaccagcgactcagcgaggactgagaatactgaccaattcaccttcctgtcgtggacaggataactcaggtcatgatctagccatgtg

SEQ ID NO: 4683 - DNA, 7595 bp, Sorghum bicolor
aaattcaaacgaacatgacattacccatctgctggactacggcatcaacaggtcgtcgagtctcctggaaccacaaagcccacgacacgctggatcggctgcacttcctctctgaatctcagattagcctgattactttagtttatccattgaattaccagccatctaatactatttttctttcacaataaaatcaactaataatactttctatcattatttatcagttaaacgaagaagacaaatagacaatctgactacagaagtgccttaaagctgcaaccgcaccggctgttgagctgtcggtgacgagtgacctgtatagctgtataggccttgtttagtttcaaaaaaaatgtaattttttttcaaatctcagtcacatcgaatatttatatacatacatgaagcattaaatatagataaaaataaaaattaattacacagttcatcaataatttgcgagacgaatcttttaagcttagttaatctataattgaacaatatttgttaaatacaattaaaagtgccaccatattcatttttttaaaaaaatcggaagtaaacaaggccatagactctgccggaccttgattcaggtgggaatgtttcaggactgccgtggcacggtttgggaatatccattccacatttccacacgggggcacggcggtggtcgggatcgcccctgcgtcggcgacttgcggaggacagggatggtcggatggagtgggtgcacacagcacgcggcgacacatgatcccactagactgctagagcaacaattgtcacgatagagatgctcaaaacacgatcctcctcgcaaaatcgcaaggcaatagtagggttgacgtgcaggagtatattcatgccagagaaagagctgtatggtgtgccggcgtccattattgcagcacactttcggttaatgaagagaagctattaaaaagcgactaaagcgtgagagatcgtacaaaaccagtagcgaacagattaactttggaaacgaagtgcatctgttcacattgcacttatgtaagatttgggtttaaatcttttggattccgattttgtacagcttgatatcggcttctactccgaacctcagcaaattgtctatggtttcaaacgctgaaatccagacaccacacataaaaggctttttttagcagtcatatataaggcactgttttttttagcaagcataaggcacttgtttttttttttgaaaatggtggatgtggtagcgttggatcggtgatacgggacagttcaggaggatttctagcagccactcatagctttgtcaggcacttagtcgatgcaccaatggcagaggcttatgctcttaagaaaggattgatgttagctcaaagaattggatgcaacaaaatcatcattcaatcggattgcatggaagtggtgcagattatgcaggaaggagggttttcagcgaactctgcggctccaatttataatgaatgcaacatattgtggagtggttttcaggagatttcaattgagcactgcaatagagaagctaatcaggttgctcatagtttagcgcagcgagctcgatcgcttagacaaaattgtatttgggacgatgatcccccctagctgcatcatagatgttttggcaaacgatgtaactattttgcatgaataaaatcagtcccatgtttaaaaaaaaggcacttgttgctaccgaatgtggtaggcctcttgggccaggctagattggatgattttcgtctgggcttgaaactagcccaataataattgtatacacgcggaagccaccgacccaagccctatttcacacgaaagcctatctcgcttcacgacttctcaagggcgggaaaccccaaatccgctcaaaaaccacctccactccccactccccactccacattccacaaccttctccattccccacccaattcccccaaaaccctagaaaaatctcgcgcgcggagcttgggccgctcaccatgagcgcccctatggaggtctccttctccgcgcccccacccgctccggacgccgcgtgtgccgccaccgctgccccgttgatgccacctgccgccgccgcccagacgctgccgccccctgtcgccgcggtctcctcctcgccgccgcagcagcagcaggcggctgcggctgcggccgtggtcgctccttccccggccgacgacaaggtcctcgtgtcaggtgggtggtgccgcggcgccctcggctgggcatcatcatcctagcaatttcgaattcgagtgctgttgacacgccggtttcgtgtgttttccgttttttcattttgtgcttgctgcagttgaggtactgttgcacgccgcgagcgcggctcgccacgaggacgtccaggtggcggtcgagaggtttgtgcttgatctagctagactttgttcggagaaatactcttatcgttgttttgtgatttggtgagtagtatgagcagttcacgtgagttggtttagagatgatgcgtgggggttctgaaaatgtgggattaaggttgacgggcttattgctattttgcactgagcgcttagaatgtctgataagtaacttgtatttctggaggaagtggcagaaagcaaagatgaaacaatgtagcaaatcaggactgagttttcaagattttctaataggttcccagtgtgcacccaaatgctaaacagtcaaatcacctgacaaatagctaatatgaagtagtctacaaagttttgtatggtagtatggtactaacaataaggtccgagtcaccagttcagctgcagagggcgtgcagactgcagaacacaggcaccagtcaccagtttgccactgaagcagatcccagagcccagactagtactatgtcagtaatccacactgctgccattgccattcacaaattagtaatcagagcccagactatggagtaggagcaaatttggaaagaaaaatgtcatacaatttataagtcctgtgattgattagtggttaggtgcagattattggtttgtgaaatgcctataagccagtcattggcttaatgaaattatgaagaaatcaagtattctctaaatactgtcgttggtagtgatatgctaagaaaatagtgccaaaaggctcgtctctttctttcaacatgtgaactggtggtgtaaagccatggacctagcatagttttctgaagaaactttccgcatttgaattctagcttaagtgctctattaatctttttcacactaactgccatcttctcttctgagatattaaaatttactgatgctcatgcttatagttttgtactcacttgctcaatcaggatgctagaagctcgatgcttaagctatgttgatgggcctgtgccaattcctgctgataattcttttcttcttgaaaatgtcaaaaggatacgaatatgcgacactggtattgtcattcacttaggctgggaattgtggttacttgtgctctgttactcataacatccttattctgagtgctaaacatttatgcagatgagtgggttgggaatcgcaaagttcttttattttggcaagttaagcctgttgtgcatgtgttccaggtatgagattcttaatgttttttatgtttacttcctaatcacttgcagttctatccaaaactgatgtcatttttttatgtcaacatgattccatgtgaccatgttggttatcttgcttcttcactcagtaaaatgttatagctgttttatctggacatgcttccacaactgctgaattttagctgttggtttgagttcaagttacagttgttttctctggggacattttacatcctaatattaatccagttcaacttcactagtatccatattttgtatccattcaatatactagctgctgtccagtttattcacctctagcgcatttggttatgctgtagctgagtgaagatggtcctggtgaggaaccaagcgaggatgatacactctctagctttaacgagtgggccttacctgccaaagaatttgatggtttgtgggaaaggtaaatactgtttatccttaaccacttcaatctccatttttgttctgtggatgatctcattagtgtttgcagtttactatatgaagttggtctcaagcagaggttgctgagatatgctgccagtgctttgctttttactgagagaggtgtggatacatgtctggtttcatggaaccggtaagcatctataacactgttatacacatttgcagtcactatttattttacaaaaaacaaagtaaaaaattgtgtactctatagagtgaaatgattcttcaagcttttagtttttataaattacaggattgtacttttgcatggtccacctggaacaggaaagacttccttgtgtaaagcactagcacagaaactttccattcgcttcaagtcaaggtccgtgctatatgagatatactttattttaccagatgtgttattcttcactgacacttttacatactaggtattctatgtgtcagttgattgaagtgaatgctcattcattgttcagcaagtggttttctgaaagtggaaaattggtatgcctttttgtgctaaagctgttatcatatgttctaatgttcatattctgagatcactttaggtatttagtgtctaatcggatttttttatggctgcacctttttgcatgagctccctaatttaatagttcctgaaccacttttatcttttctgtacggtggattgtcaaaataagaaaaacaatatttctacataaaacacccacaaagggtatttcaattgtaatacccaaacaggaaattagctcttttctcttgtttgatgatattgtaatggaatgacaaccatttcttctccttttttcaccaaaaaatccgaatatattctggaaatattgtcttactcacccatagttacatctgacaatccacattctatccattgtcctttaggttgccaaacttttccagaagatccaggagatggtggaggaagaaagcaacctggtatttgtattgataggtatgttcttgagtcgtgacaggtgaactgaatgagtctgctttgtttggtacgttgatctgaattagatatgagttcacccccctgatcatatcctgtatgtgcataggcgcatggaccctgaatccagcacagtttcacttaacctcagcattgtctcctagttgaagcaagcaaacacataacacaagcagtagtcctatagactatagagtgctacctaaggcttgagaaaatagagtacttgatttgctgcatgctatatatttgaaacctcaatcttacatatgatatgtatatatattgtagatgaagttgaaagccttgctgctgccagacaagctgccatatctggctctgaaccttcagactccattagagtaaagttttcattctactttttttccccccaatcatgtattatttcctggctaatgtttacactatattcttctcttgtgcaacttcaggttgtgaatgcgctgctaacacaaatggacaaattgaagtcttggccaaatgttatcattttgacaacatcaaatatcactacagcaataggtactagatttcctgccatttgactctttaaccatagggctatgaataatcatcttgacagtcacacattattagttggttgagtgaatccctttattatgagaaagcagttctgcagtcacaccactaaacataataatattctttagggtttgctcaaaaaaaaagaatttctttagggttgatgaactatccatttccatggaagcaattttcctaatttttatgattaaaataatataatagctaacttataaatatcttcttgccatcaaaatagaaatcatgtgtgctctgtagaatttctttctcttggatcgactacagtcatgttttttttatgggcgctcatgatttgatctcacagtttgtttctgagaacactctgtataaggacttctgtaattacctaatgcttactgtctactggcagatattgcatttgttgacagggcagacattaaggcatatgtcggaccccctacgcttcaagcacgatacgagatcttgaggtcatgtatacaggaactcttaagagttggcattcttacatatcctcaggtatgtcctgctttggcaacttggtgcctaacttgccaacttttcatagtgttactgtcactgtatcagcctactctcatgatggttgctttgatcatgcagaactatgagcaaatcttttttcttgaatcaatggtagcactttgcttttcaattttatttattgcaactattggtaaacttgaaattctccaattgtagggtagtagtgtgccatgtattctgaactattcgaccctggaggagaagaagcactgtcctgaggctgcagaaccccatggcgtgtttcaattatccagtctactctatgaagccgcaaaactgtgtgaggtaaataatgaagctgaaccacgtgctgtttgctgtaaccaaggcttctccatccctcgttaaatggtggtggttcatctctctttgcagggacttagtggccggtcattgaggaaactccctttcctggcacatgcctctgtcaccaacccttgctgtgatgcttctactttcttgcatacattgataaagactgcgcaaagagaagtattggagtcgcgtggttagttcaaccttgagaccttggaatcttttggaagagcaaaatgttcacagttctttccaaatgccatgttccggttgtccccgatattatggtcaattgccaggtcgctacaaggataagaaagtccatcccatctctagggttagaggttagtgtttaaatgtaaagagacaagaacaaagaatgaatgaactgtcttgacgccccttcgagatgtccgtgctctacacagatgaatagtaatcaggattagatctatgattaatactaagcctagtcactacgtgtgaagatcatgagatgagatcaccggcttgtgtttggttgatctgattcttaacagttacgagctcagaatggatgtaaggtgcctctctgactgtcagcttcagcacatttgatcttctgtagatctttacgcggtacgaatcggaatcgtctccgtcactgcatcggaatcgtctccgtcactgcaacttggaaccagatcgttgtttagtgcgtacaggtcatgttccttttctatcatcattgtaaacagtcgtaattgtatacagcctctaaactagacacgtgaacacgcttaaagtttcccttatagttcctgatagacgattgcacacatgtgctttgacaacttcgagctgtaccccaaacatgtcttacgcgtctcacagggataaagaattgaagacaacttcacaaaagcagatgagaaaattggaaatttgcaccaatggcaagtggatattgccaaaatgtcgatcaaatttgtgggtttcaagcgccatcaagattggagacgttgggttctcagtcttcggagctggtcttaaacgctgtgactctatatgatcctgtgacgttgctga

SEQ ID NO: 4684 - DNA, 2959 bp, Sorghum bicolor
ttaaactagtttcacatggtcccatcaacatttttgatgcaaaactcaaccttctttccaacacctttgtttgtgctaaaggctccctgccctttacctattcggagatttctgtagaaattaccaaggtaaagattgaagactaactcctccttgtttcaaagtgtcaaagaaggcttccttctactactatttttttttaaaaaaaacgtgatcagagggagagaggccccctaccgtatttcattaaaaagaaagcgattcttcccgatcacgaaaaaaccctcgaacccttagctacgccaacgaggagatttctatttacccccagcctgaaattcgctcccatgaggattcgtactcaggacttgaggatgccgctagaaagctctaaccgcttgagctagagtcctttggctctactactatttttctctcttaggttggtaagttagaaatcaccaatgctattctgacaacttttcacttgagtgctcttgcccttccaaaaggtgtcctcaagcaaatagataagtttagaaagcactgcctttggagggaggctaacataaattctaaaaaggtcccatgggaaatggtttgtgttccaaaaggactaggagttattgatttaacgaagcacaatgaagcccttcctcaaattcttctatcacaaagatattccctgggtaagcattagcaaatggaaagttgccaagtcacattaaaaaagactccttttgatggagagatatcctaaagctacttgattgcttcaaatctttcacctcgattcaggtacagaatggaggatcatgtctcttttggtcagacaactggattcagcaacctttgaagattgagtaccctgaactcttttcctttgctaagaataaagctatcactatatccaaattcctctctcagcagtcactctctgacctcttttcactgccactgtcctcagaaacatttcaacagcttcaagtattacaatctttcagagaacatttttctttaactaagcaataagacatctggactcctcggtggggaagagcaaaagcatcaataatctacaagcacgtcattggtcataggcagatccctcaagtttacaagtggtcgtgggaatgtttttgtcagttggactcatacaattgtgtgctttgtcaagaatcaattaaggaaataactgaacatttgttccttcagtgtcagtttgctaaagatcgctggagcatattggcattgtaatttaggcagatcaaaacatcattgcagcagttgctcagatcaaagatcaatctcaccctaccttctttatgatggtctcaattttaatgtgctgggcaatttggacagttcggaatgacagatgttgagtcaaccatcaactcagctaaagcagtatacacaaaggaaataaagatcctttccctaatggctaggacaagattattctttgtggattcaaagtccgttgtaatcgctcttctttttagttttttttttgtttctttctttgtttcttaaacttgtagtttatctgcgctgctctactgctcctttgcttctttgtaccagtgttctattcaataaattcctatggaggctctttgcccctccaatttcttaaaaaaaaaaaagctatcagctcgacttgagacgggaaataataaatgaaaaaatatgcacatcagaacgggcatgcagaggcagagctatggaactcgtatcgtgccaaccccggagcttaccatatgagaaagaacaaagcggtgacggtgtcgtcatctcccctggcgttgctggatagcctctaacacatggctgcccatgtgtcagcttgcatgcacaccttgcatttagtcggagttcgacgaccatgtattctatcgtcccataaaaaccatgaacatatctcccaatctggcagtctctctccctatctgcgctcgcaccttgtctcacacgcacaagcggagcagagcagagccatggcgcttctcttgctcctcgccttcctgctggcaacggctgcagccccggccgccgcagtcgccatggacaacggaacacacgacggcagcaaaaccgccacgtccgcggtccagtcgtgcatcggcgaggggtgcgagcaaccggcgcaggcgctgccaatctacgggtacccgccaccggcggcaccgtcgctgccatccgcaccgccggcgccaccatcggtcccgggctcactgacgccgtgcccgccggtgaccgtcgtctgctgcggcggcggcggcggtgccggggggcagttcccacagcaaccgaacaactacgggcctcctgccggtggttacgtgccctattacagcaacgcctctgcctcgcctcctgtgctgcttgttcccgttactgctggctactacgtcatggctgcagcttgcatctttttactgtggactgtggtgtagttactctggcatgtactaaaacggtagcttctatctcgggttaatatatactcctgaggctgagaagtcgaaattaaaggggggtggggggtgggtgggggccggggggcgcatgtatactatgagtaaataataaaaatatagatgagggagatgtgtatactcgacgtgttgggttcaacgtaatggggttcaagggtaaatactgtcgtgtgtaaatgtgcttcacggcgtctccattctcctctgatattacacaacaagcctataatctgttgtaaaaaaaaaaacctgtaatcgatctcgacgagctttgtagctcgataaagctagcgattttgattaaactttagatgttttgactcttcaaaactcttaaatgttttataatttgagatggagggagtagttgtgaaagatcattttcaatatgtacttgtaggaccacattgatcaaaagttccttttttcaatcctgaaaggggaagaaggaacatgac

SEQ ID NO: 4685 - DNA, 17885 bp, Sorghum bicolor
gtcactaactttagcacattaccgccgatacattccacgggttaaataaatcatatataaatctatcagggaaaaagtctacataaccccccaaactatctaaggtggaatacttcacccctcaaactataaaaccggatattctaccccctgaactttcaaaaccggtcaaataaccccctagagtggttttagagggtggttttgttttttgttttttatttatttccgctgaatctttgaaaaatcataataaatcacagaaaaatcataaaataaaaaattcaattttgttagactcctgatgagtagatctacatagtgaatatataatatgatatactttagtataaagttttttctgtagctttaaatctatgtttttctgtaattaattagaataattcatatatgtagttcctatggtccaattgtggtaaaatttttatggcaggctcattattgtatgcttgaactacgctaaaaatttcatactcattggatcacatataacttagttatagataaagcatagatttaacaagaataaagctaaataaatctataactaaattttacttgatccaatggatacgaaacttttaccatagttcaagcatacaataatgagtccaccataaaaaatttaccacaattgaaccattggaactacacatatgaattattatttttaattatagaaaaacatagatttaaatctacaaccaaaactttgtactaaagtataccatattatatattcattgtgtagatctactcatcaaaagtccaacaaatttgaaatttttattttgtgatttttctatgatttattatgatttttcaaagattcagcggaaataaataaaaaagaaaaagacaaaaccaccctctaaaaccacattaggaggttatttgaccggttttgaaagtttagggggtagaatatccagttttatactttagaggatgaagtattccaccttagatagtttggggggttacgtagacttttttcaatctatcagtgatataatttcaaaaacgaacaaactgcatgctaaataaatttagtataataaaattaaaaggcattggatgtttttcatgatttacttccaatacatgttttacttccaatacaatttcttcttgttagattatccttcatgaggacaccttttgtcacatacaacataaaaaagtttattgtttaccacaaaatgttccaaatcaagaaaaaaatgttctagcaacgtgaaaaaaatatttgttctagtttgacagccaaaacgtgccatgtttatgagaaacttattccatcaatcatgagaaaaaaatgttcccatatcatgtgaaaaatgttcatgatgtttatataaataaaatattataaacgtaattagaatccaaaagatctataacaatttttaccctacactaatgaacaaaaatgggagaaaatacttagggcttgtttggttcctgggatccatcccgaggaacaattcctacccggattgctaggctaatttatataatttattgatcagctggaactattcctcatgcaactggaagaaccaaatggccggtaatggccactcttgtatttttattaaaacttctaccttcttaatataatgatacacaatgcttttgcatatttgagaaaaagaagaaaaacgaaccaaaggtgtcatggtacaacaagaaaggagaaaaaggaaaatagaaatgggagccgagaaagaatggaccattttgatgggccgcactccctgcaccgctgctacctctgcgaacgccacaccgtcggcctcacatccacggatccagcggccaccctccgccggctcaatgcgttccaacaggagtccagcacgcgcacggtgctaggggctagggcgcgccggcttggctcggcagcacagcagcagccagcgagcccagccgggagcccggcagtgcagcggtgcggaagcccacacccggagccccagaggccgcgacgcaagacgccgcgtccgactccgaccgcgagcgccgccgccccgagcggcgagtgccgaggtctagccgctcgcccgcccgcccgagaggcaccccgccggccgccaccccgtgcccccgcctgggcctgggcccctggcgcttgtcgccgagccgggctgcgcgcgtggccgaggtgccgagcagccgagcaagcagagcagcgcgccagcgccctagaacggtaagtgtgcttctgaatttctgatttctgaagttctgagctaatctcataccctagggtttggacagtgagcgctgggtagtaaatttgggctaggggattgtgtatgtgaatttggtgtgtgattcattgttattaggcagtaaatttattgaatgaaatttcttgtcatttttcaggaacaattcaaaagcctactacagtctcttatttatgtaaagaccttatttgatgtatgaatctatgtaagtttcggacctatttatgcaagttttgaaccttttaaatgtattattgcaatttggttaatttatactgaactttttttttggcttttgccataatgtgttaaatttttttgattaggactacccttattttaaatcctgggtcggccactaggagttgtggcattgatgttatgtttctcaccagcatactacctattacaaattatcaagatctgccactgactaatggaaccaatttatagggtgtcttagactgaagatctcagcaaagcttgaaaaggtctgagagatgtcattgggctatgctgagaagctgtcctaccgggaggatgtgggtactgtgggaatgcctgagatctttgagccccctgagctagtccagaataaggttaatctctctggcctatttacttggatttattattggatgcaaatgcttcaatatcccttgatgccagcaaaatacttgtgagatgtttgcacttaattatgatattaactttgaagcatttgttttcttaggctgtaaatgagctacacaagtgttttggttgtgttaggtcgtggtttaatcacgtatttaagtgcttgcttaagattatgtgatgtttttttttggatcaagcatgtgcatgttgcttggaatatatttgaaaaatgatgacgctcgtaacacaatgctaggttgtttgccccccctcctctttagagttgctgccctttttataaaattagttttgtgaggtatggtgagtttagatatgttctatcaaagaatgtcctaagctgagaagattaagaacgatgctacaaagggagatttactgtgttactgttatattggctttgggaaagattacatggagcaagacaatttttgggacgttcatcatgagattttgttggcccacggtttgaccagtgtgacatccagtccaatttgaattaggcacttggtggcccatgtgtgtgttgatgtgagattagctgcggggaagattaaatgaagcaaagacaatttttgggatgtatcattggtgctttcatgagattttgttggcccagggtttgatcagtgtgacatctcgtccaatttgaattagacatttggtggcccatgtgtgtgttgatgtgagattgtgggggtttagttccaccttgctagttgagggtgggttagaccatcatataaggttgagaggtttctagaacacatatcactaacctgggatttacccttttatgcgaagcgagaatgaaggcttcagtgggttgatggacactcatttgagctgtttggactctagggcattatagttggtgtggctgacttctagcttgaccctcagtttgatggcacatggggcataaattacgtccttcgcgccaagtaattccttatatgtagaaacctggttcagaggctgatctgctagctgttaaagggaactgaaatttgcaaagaacagtagagaacttaagttctcttttgtgggaatttctggtaaggtagttgatcatgcaccagggtgctgggggaacatatattgccatcagtgatcagtggtggatccagaaatgggatgcgaggggggctaacaacagaagactataaattttactgtagttaaactaaatggtgcaataagtataacaagaaaaataactaataaataataataataataatctaaaatgcatgtaggcctctatactagtagtgtttcatgtgtgaaactttagcttgcttcgtctgactcgcatctacaacattgtaaacatctgagtacagaacatgtttcgtcatttgaaatggcagaaacacttatttttgatggttgaaggcttataacaatattttctctagtactaaaacacatatgctgggactaaatcttcaagacataatattgctcatagagtcacaatagtttagaaagagagaacacaacactaatacttgaggcatatgagtatgaagtatcactagtttctacaaggcttctggccggaagcagaagcaccgcctgtgcgatgaacaggagtgagtctggtgcctctatgcctacagaccgccagctgcagctgcgcctgcgccagacggattgggatggaggaccagtggctgcatgcctgggacctgggcttggtcggctggttggccatctggctggctagcggcagatctactggaggcgctggctgtctgtggttgggtgcaaggatgctgggagcagcaggacggccaagtcgtgatggggattggttgaacgccgactgcaagcctgctaggacgaagcagagcatgggagtcttggaatggtgtgagtttactgtgttaacctgggctggaccttgttggcttcttctatgggctggtattgctacatggggtcttggcttatacttgggctggaccagggctgcagccgcccagcctgggccctggatccacccttgtcagtgatcataatgtcatggtgacgaccagaacacttctgttcatgtgccatattatggcacctttttggaaaatgtactaaaatgaaacttatagctgtgcaaatccatgttgtggttaatgttttttttgaagcaacatgttgtggttaatattttatagaccaatataggcacattaaataatctctgtattgacattctattttttttttccttcctggattgttgatgcagatagaagagcttgctgccatggtgcaaaaggttgtgctacatgttggtactcatttcaactcataatcatgatttcctcatactgatggtattaattggcctttgcaatgcagagtaagcatttagtggtgtttactggggcagggatatcaacttcatcaggcatacctgattttcgagggcccaagggtgtctggaccttgcaggtagtactgttgtctgtgttacttgccttgagtatggacccctttagcatgtgaatgtatttattttaagtgatttttgatgcttggttgcaagccagacatccttgcatggcatgcaatctacatttgagtgtatgtttgatagaaaggagatagaatgacagaaatgtgttcctattgtaatattagactttggtgcccaccaaaaagttattttccttcacaaatacttgatgtttggataagacctagtcaaacttaagaaacttttttcagtaactaccaactatttagtttagaaaccaaaaatttacatacattcatagattttactatcataatttaatttttttggattttataactatatcctaacagaaagtagtgatcaatttttcacatttgagactatgtcatgtccaagtgtcaggtattttttactgtagaatgatattatgaaattcttccattttttcttattttaaataaacaaagttttcaataatcaaaacctgctattcctcataggaagaaactactttcctgatgaacagttatttgaataaacactttcagttttataattttaaatgttatagcgtgcaggaaaaggtgttcctaatgcatcacttcccttccatcgtgctgttccaagcttgactcatatggcactagtcgaactggaaagaggagggtttctaaagttcgtcataagccaggtatgctctaggtgcagtacctgctgatattcttcattctattcatcttactgctaaggagtttaacatatcaaaatatgaaacaacttatcaaagtagaaaatattaaatatgtaaaattaaaatatacataatgcaatattttatttattattagttattacagtattcttctgtgtgattaatggattgcttctgacacccatttaatttgagtattctgtattttccagaatgttgacagcctacatctccgttctggtttcccaagggagaagctggctgaattacatggcaattctttcaaggagatctgcccatgctgtaaaactgagtatgatttacttatattacatcttattcaggagtatatatcagttatccatatagttcctttttcccgtcttggtttattcaagagactgttctctgtttgaaggtaccttcgtgattttgagattgagacaataggactgaaggatactccaaggcgttgttctgataagaattgtggagctagattaaaagatacagttcttgactgggatgtaagtatctgcatcttctacatgttaagctacaaaattctttatcgacatatttcatttggcagtaggaagtactgtgaaatattacctttggcaaatggaagttctatgaaacactacagattttcatgttccatagtgttgtgggcatgtttgttgaagagccaagcagagtcgcctgccaggcagctttcccaggccatcggatttggtcgcctggtggtcaggattgctgcctggcagctgacctgccagccaggtatcaaaccaaacacgcctattagtccctgctacagaaattttatattcttttttttgtgtaccttatggtatagttggattaatgcccatttaggaccctagttatcgctgaagtcattagtacctcagaagttattttaataatccatagccaacacaatatttgaagaggtcatttgaattcttgacatactagctattctgtcttgcaaaccttttgtgttgtaacagaatttttttattagtgcttctataattttttgtctttaaaaggtgttggttgcttaatttgcaacagaacactgcaccaattttcataagtactgtttttgtggttgtattttcggttttcaggtatgcatagcagtgatgcagcattacttgagtgtttttcctgtgacaaaagattatgcatcactgttaagttctacttgtcgttgactgattgactccattgcttcttaaggatcagaaccctagattagtggcatgcttagcaaaatatttattgacaagtgtcagtggttttcagggatgagtagcagcattacttgagtgtatttcctgtggcttaagattatgcataagttctgtttgtagttgattatgttgctccttaaggatcagaacctagaataccatgcgcttagtaaatatttttttgaaagtgtcaatctattttatgaggacactgtatatgttcccttttaagaagtgatgttttttgtgagaactgtatgttgcgcctagtagtagatggacttctatcagtttagtgatggttgctgaatgccatcttgtatattatttgaagttatgcaagtgtcatcaatgacatcagattattaaacacatttttgcaggatgctttaccccctgaggagatgaattcggccaaggagcattgtcgatcagctgatcttgtcctttgtctaggaactaggtatcagccatattattcttttgttatagcaggaattgtttttgcaagttcctttgctggaattatagtatcttaaaaaaacttttttgaccttcaatactttggtgatacattaatatatgttgtgggttctgtttcgcatatctgtctaaaccagaagcaaacaaagagtggtgggtgctgtatctctctagttgctttcgtcaatggacattgaactagtttagtaattttcttattctttaataaagttacacaggccacctgcagattcgtgaaagaagttcttcatttacaactcagtttgagccatttgcaaacctactgctcaaactttgggtccacaatcatgaaacattgtagtgtgctcaactgcccattgccatatttctgagactgcatgctggcaagaaagaaaacctctgtggacctctctgatgctatatggattcaatgctgcctttctgaacccccataacatcacacacttagtttcctcaaccattagatacagctggtgtttcccttcttgaatgtcctttccctcaacctgttcccttctctgcctagcctcctacattcgtagtcccagtgcctactcttttgttctgcagttctgcactaactgaactaaagtcttaattctgtgtctcttggtgatttgtgttgcatgattgtgtgttatcattgccaagctactgtcttggtatctctaccaccggcttgctaaccctaggaaaatgggtacagagcggatttcggatggtggcactggcagcgagtagggttggcaaaatttggttatgagctgtgggtgtgtgaggttctcagtgctgttctgtggattattgagattgctggagttatggtaggaagttgtggacggtgagatatcttttttgtttttttaaaaaacaaaggcaggaaccctgccgctcaattaagatgaaagaataatatgtacaagtggacggtgagatatctggagttgtagttgccattgtcgaggcaatggttgatggtaacaaagctgtaattatgtattttctttactgattttggacatatcgtcaggaaggtgaccagtggacaatataaattctttttgaaagaaagacaacagaaattcccagtgtagaatagaaatattttatatgcaagatttaaagctagtcaagctggtacaagatctgagggacaatagtacatgcatgcatgtccatttccagatagcatagtaactaagaaatttctgaaaacatgagatgttcagcccgtttattattttcaagagaatagttgtaccatctctatagttatcctaaaggtaaacagtccgtcacggtgtttgaacggagttgaatcggcctaaacggttttgtatacgtgaaagtcaaatatgctagaaagtaaacatatttatgcatggagtgttcattattctagcaaataattttttttgggatggaaaccaaatcccactccacatatatatttaagatgttactaattagttgggtgctaatgtggtagttgtaatcctcctatgaactaaatggtgaattaaatggcagtttagcctttttaatcacatttaactccattctgtttatgccgtctttgatggtttaaatggttcaatcatttaaaatgtaccgtttagggcctaaacaacatcagtggccttcgtttattgtttaagtgctgtataaatggtctaaacaggaccatagtttgcttgttctggttgtttttcttgcagtccttatttttcagttctgttctagtcttctagagtgctgtgggtgtttgtgtgtgtgagagcgttgttgggaatatctttccctgtgtttcagactttcttcttataatgaaatgatacacaactctcctgtgtgttggagaaaaaaaaaggcaaacagtgtccaatgtttttttttggtctgaacagccatttaggcgaacagtgaccatttccctggtcagtggcaagtcagttaattgtacctggcaacgttacattttcccaaaatgttatggtgtcgctttattaaatataagtgacatcttgacaagataagtaaggagagtacagcgacccaatcagcatgatcctagctggttatgaaggagaatagaattggtgtaattggatggattgtgttgagccctggcagtttatatagagtacaagacttgggaggcaaggcaacgcacggatgcatatggctgtctacgatacgcagtatctaaactaccaaatatactctaacaggttacatgagaggcattgtaaaggggttgcctatagggcggatgtggattttgcaattctggtactagttacggtctcctagccttctacggaaactgcaagcagctgaacccatgctaagtcttttcttaggtaacatgaaaaggatgataactgaaagcttctgttggacttctgcttggtaccaatttcatcatcctaattctattgcttgaggtttcagaaaatatataagttttttataaaagttttggcccctagccaggagcaaatgaccatctttttcatgtgatatttctcttttttactccactttttgattattcaactgtaaacaactatgccaaaaacagcccaaaaatgacaagttctcactgggagctacactgctcttgttaacttactaggttccacttttttctcgaacacataggagagctgcatatcattgtattaaggggaaaacttaagaatacaacccacacacactatgtaactacaaaaggactgatttggaaacagttaaaatttccattatgagtaagagaactgtttgtttccactaaaaagttcacgggctcacgtcaagttgtcaattcattatgttactttagcttcgtaaatatctgatttacttttatttgttgaatgacttcatgtcaatatgccccttgttctcgttttcattcctaatatcgaatacttcacagcttgcagattactcctgcatgtaatatgcctctgatgtcaatcaagaatggggggagggtggctattgtaaatcttcaggtacatgctgcttaatagaagtgtattctttcttatcttgcagtaaatggatattgtaaatacacactagattacatatctaactaaatataatatgtattgtactcaaatttaaacttgccttaaagtaagataatttctttgtatcactcttagattcccctatttaccattgatcaattgtgatcattaaaactgtttgtttcagaattctgattgttgctcctttggctgtctctttatgtattaagaaagccttggcaatctaatgcttaaatctgtaattttccccttcactttcaggcaactccaaaggataaaaaggcaagccttgtcatccatggacttgttgataaggtagctagtattacttagtcattgaggacctgggtttccattgttcctgttatctttgtttttcttctatgactctatgagggtaatcaccacactgaggaccaagggatgcaccattaagagagtagtgaggccatagatgatataacctttgcatcgagaaaatgactaacccttgttttactttatgataatagcctaccacccctcagcattataggtgtattgcctcagaaatctggaccaaattttattcttgactaaccctaatatctcaaatgctgttataatcatacccatatatctgacagcgatctatttgacaatgtgttaaaacaggtcattgctggagtcatgagcaagttgagtctgcgaattcctccatatatacgtactgactttgttcagctcactctcaggcactctgtgaaaagtgagctcattttacaatttgtcataacattgtgcttatcaagcttttgaaatttcttgtacttttgcatggaagaaatcagttaagttcatgagtgcgtttgggaggaggagctttagcatcccctttttgtattttttcttgtttaaatgaaatggcgtgctgctctcctgtgttgtttgagaaaaagaaatcaatttagtgaatcagccagtcattcaacagtgtttttctcttacaacgaatcagccagcagtactttctgccatggcttatcagccaaacgaacagcatggtcaaagctacctatcgatatgattttatcaggaaaagatttttagaattctgcaaacattgtgacatggtcacatttatgtttaaaagcagtaataagttaataacttgtataatttattctactatggtttggaaatgatttttgtttcaccaactgttcatgtaacaaatgtcttctgaataatgtattgtgagaattaaatatttgtttcctttatgtttatgtaaatgtgtagagtcacccttatattgtattatcacttttgttttttcagagaaatgtgttagatggactcttcgagtaacaagtattcatggcctccgagcaccgttgccatttcttcagtctgtcaaggttgtgccattatgacacatacaatttgtcaacattcttatgttaccttgttctttttgcactttgttgtcatttaaaagactgagtccttgcttacaatgttatatgaagcaaaaaattgaatatgaactagtgactaatagtgtcactgcactgcggtagctttctatgcaatgtcagggagatgctacttttttttttcctcgtacagacgaacacacaggagaggtacatgtcatttcattaaaaagagggaactagggagacgctactggtcaaaccacttgaaagttttttttttctcgaacagcgcaggagaactgcgcgtcatttcattaaggtagaagaaacaaagtccaagggtcaacagacccacacacaaacacaacacacacacaaaaacccacaaacacacaaatacaacgccacacacacacacacacccatcacctcacaggccacccaggccaagggtcgaccaacatccttcaagccttaaacttcggaggacagcgacctgatgaaaagttcctggagcttagaagcaccagctgagcaccaaaggctcccctctgcgctaatagaccttagaacatcctggacacttggttgcccattatcgaagacacatgagtttcgatgcttccaaatttcccaagccactaggattatcaaggaattgaagccttttctcacttcttttggggcagcagcagaggacctcttccaccaacccaaaaaacggtcaacagcaggttgtggagccaaatgaagcaggccaaattgctgcagaacctgggcccagacctggcgagcaaaaacacaacccacaagcaaatggtttatggtttcatcctcttgatcacaaagggggcaggattcaggatgtggcagattcctcttcgcaagacgatcggcagtccaaacacgtttgtgagacacaagccaaaggaagaacttgcaacgaggaggagcccatgttttccagattcttctccaagacccaaatttgatggatcctacaaagaaagctgcataagcagatttgctgctataggacccatcctgcgtgaatctccaaacatatctatctgggttctcaggctgtaatatgattccatgaaccaaatcccaaatgcggaaaaaatcaagccagacctccaccgtgagagctcctttaatatcctggacccaactcatattatgcagggcctgcgccacggtccttctttttgttgtacgttttggcacagcactgaacaagttaggagctaactcattcactgtgtgcccctccagccacctgtcagaccaaaataaaatatcttctccatttccaacaatagcattgacagcaatattgaagagggcttgagcctttggaggaacagaaatagcgaggccagcccaaggtcgatcagagtttgttttttgcgcccacagccaccggattctaagagcccatccaaggagctcaagatttaccacttgaaagttatactttaaatgaagtttcttgaaacgttgtcctataggatttgtcaacatatctttatgtgctctaatgaaatacttgttcacagtcacagatatctgattaaaaaattctaataatctattaacaggtttcctttccagaaagacctgacatgaagtctgtagtgcttaaagagcaaccattctcattgcagaggtaaagtagaagggaaagatctccaatctatttattgatctagtattgtttatattatagttttcctggcatggttcttccccttttatcttattaatatagtgatacacaactctctcatgtgtttgaggaaaaaatgtgattaacagaggcaaattgtctccttttgtagggaaacatcaatgaataaaccatttttcatgctgttgacattaaatttcagtgatggttgcagctgcttgagctcatcaatcggatggcctgttgattttcaggtgagtacctgatactcttccagatttcattggccatagttaacattgtaattatagtgtatgatttacctgcatccagccttaccagtaggatccaagatttttgaacactaagccgtaaaatccctctcccagtctccaaatcttgcctataaagcttatttttttggtgctgtgaccttcgagccttggcgtcgattgtggaagacctgggccccagctaaatgcaaaatgtttctgtggttggcaatccgaaacagatgttggacagcagatagggttgctaagaggggcctccctcatccggataaatgccctctatgtgatcaagaagatgagacgatacaacacctattaacgacgtgcgtggtggcaagacaagtgtggttcagattgctcagcctttggagctaacagatttagtcctccgtcaaaatgaaagcagctttgcagattggtggcgtaagacgttgagaagagtaaagaaggatcacaaaaaaggagtgaacactctaattattcttggcgcctggactatttagaaacatagaaatgcttgtgcgtttaagggggcttctccttcagttaacacaattttgtgtgaactgaaggatgagcacgacttatgttgcttggctggtgcgaagaaactgccggggttaggacttactattgcaacctagggcagtgtgtcgtgtgtgagctatgtggaaacgttttgagtatgtgtaatttgcctcactcatatttggtccccgtatgagtgaggatcatgttgaggaccaccctttctctttaatacaatgaaacacagctctcctgcgttttaaaaaaaaagtctcctgaagttcctttctgttcagttgttgctgtgtggccctctgatgtatattaagactcaaggccattatggtccagcttttattgaaagcttaacttagtcttatgactggggagaccagtttacagttcaagcactctgctgcagcaagcttgctgagcaactcagcctccaccgtgagtcctcgactgaagtctgacagccaaccaaaaaaggctagaaaagacaaaagaggatcaacgaaactcaaaagctaactccagcatagctaaacacttgaactttggtggaagaggtcaactgcagctatccccaaagaagcgcgtaaaggcctcaactccttgataattttggtggcatgggacatttggaagcatccaacactgtgtcttttttataataagaggccaaacgttcaggaggtccttagggtattagctcggagggagggctctggttctcggcaggggcctccaaactccaggaacttgtattcaggtcgctgccatagaaaagattgatcatatattcatatgcctagaagcatttctattaattatgaacagatgcggagatgccagaaagtagactaactaacaggaacacggttcaaactaaaaggaagctgctaaaaaggaccaaacaaatatagctattggacaaggaaaaaggatatgatctgttggttccctccttgccacacagtttgcacagtatttcccctttccacttcttaagttgttgtgctgattgaaatctattgtgggcagccattcaaagatttttttaggcactttacttttccatatttctaccatctgctgatcaatagctcctccaaactttaaagccctgtacaaagatctcattgagaaattgccttatctttctaaggcccatactactttatcttgcccatctgcaagctgaaccgtacatgacctctcaatcagttcttccagtattctgcaagtgaaccctaccaccctctaaggcatcctcaatggagatttcaggattggtgcagagtttgtatagctcatagaagctgactttcagtggacaacctaggtacccaaggtttctgcttactagcattaactggaaatctaggtaccccaagtgcttgccgttgacgatgtgtgcgcgctttgacatcttatatatgtgctggcaccattatttcatttgataaacctaaagtgcctaagttcctgtgcggctagtgaaacccctgtccggattggaaggaccagtatgtagactacacagcaaaacaaataactgtattgtagtgcaaatttaatgacccaacttgcattgcataagaatagacgaagtaaaatagactgggcgctttcatgtggattacatatcttagttattctggcacatgtgcaaactatggtggacttgtagtgtgccatgcatttgtcatatatgaatggcaacttatgtgggtagcaattctgttattccttccatccttgatagtatggtaccttcttcggtttaccttctagattcgttctttgtgactcttttgaaggtgttgattatcaccatgtcgatctgttgttttacatcacatatatttaatgagaaatcttatcaatgcagaagcaaaaagacagtttcgtcagagatagagctctagtcctaaaggagttgcagtctgctgccgagcatgagacttgcggtgggcaacaagaagttctggaaagagagatcctgccaagagctgagacatctattcatggaattgtaacaaacgtcgtcaggtatgacattgaagctgaaaagttggctccacccaaggatgatttgatgaatcacagccgcagcaaccctgcaaaacggcacatggaaggcactgattgccactcgccactgccaaagaaactgaaatactttttgaaagacgagaggctgaactgctaaaagggtaagagagtagaaggtagatagagaatgttgtaggtttgtttattttggttattagatgagttacatagcatagatgcatgggaggttcgcatgctaaagttgaactcgtctggtgcataggaaagttcgctgactttttgtatgactagttactgccgcgcgcgtatcgaacatggttctcattctcatttctcaacatgtaaaactgaggttggtttgtaaagatttttttgagcggctatatatcaagagtatggactttacatgggcgtgcgcgtgcaggaaacgcaattttcggctgcaaactaatttgggaaaagaattgttttggttgccaaaaaagaaaaaaaaactgaccagatctagggttcgccggccacccctctacccatggcggctgcccttttcccttcccctcttccccactgccaccatcttcttcagcttgagcaagcttgtctgttgtcatcttctctagccttggtgagccttcttcgtcctgatttgattgcctttgcagtcgttaactcccttaagccgccgttcaagcatccccattgctcggctaccttcctcccttaggctagtcattctacaccccaccgaggttggagaagaaagggaagagctcgtccgaaccctagcataatctaggaggagagaagaggaggcctacctggcctcgtcaccgttagatccagtggatctgccaccgccgaagccgacagatctgtcgctgccgccatgtcttagtgtgaggga

SEQ ID NO: 4686 - DNA, 2884 bp, Sorghum bicolor
cctgcgtctgcctgtgagccagggtgaaaatagtatagatattttccaaccgtattcaagatcgaatttgtttagaggagttcagatctgtctgtatctgagttcgagtattcaacattcgataccatattcgtatctgaatacttaaatcatatatttataatgtcgatatccaatcgtatcttatccgttgaggttgacattatccgtattcaaatccgaatctgacaaaaaaatatgaaaacaaatatgatatcggtgatatccgtctatatccgatctgttttagtgtgagccagcaccggctcccctctcttcctccagccaagtgccatatcatattaacatgcttctttaaggccttgtccaatcccctggatttggggattatgaacaagcccttctgatgactttccattgagcccatgtaatggttcgctgacgtttcttttatttctttgtttttttttcttattattatattcacacatgtttctaattatgaatatttttctgttctatctagcttttgtcaccaccagaacagatgattccaatggtcaagcatagagaaccactaaggttattggaatttctagcttcagatgcatgcatgccttttccagttaaacagttgcctaattgaattcagtctgctgtggtaggcagttgcttcatttctgaacgaagcgtctggagctgagctccggtgctccattaagaacagctcgacagcccaaaccgcgtctaacaagctgagtgatctagcgaggcttgaaccgcatgatgcaagttatcctgaaaatgtacatgcaacctatgtatatatatatatatctgtattgttgatccaactcaagctaactgcctaactggatggtatctgaagctggagatcctgatatggtaagtggcgacagtatcatgtttatacatatgtaccccacaatctttggcgatatcaccaatcaactttcacaaagtattagggcactaagatattgttgtatgttcccgctaaagacaactcaaaatagcatggtacagcatatgaagctacatgtacactagtcatcactagctacaaaatgatgctacattcatctatatgtatgcaggttgcaggctgatctcgatgggctccaaaatattgtgtacacaaaagagatcttgttctgtttgttctgacggaaaaaaaagcaccaacaaagattcaaagtatgatcatcccgacgatcactagcaggctatctactttcacaaactatcaaggtacttaaagtgacactaggactgccatcctagcgctgctgcctccttttcagcttaaaaatagtcccgacgataactaatcttcagagaccactaacaaaacaatcaaccaatgcccaatggcactgcaaattgttcattattctagcactttttgcacaacaatagcatgtgaatattactagtactaataagcaaatccaggctacgctcagagaccatgagcctaccgaagaacctagaaacaatttaacaaaaaaaaacatacttagtggcaccttttgtgaattcaaaaccacactgttttactactaatatcggcctcggtatttgcgtgcgtggttcgctcgggcgagtggagctcacatgagccgccattaaactagctcatcagctctcgtccccaaaaagccatggcagggccgcgggcttaaacaaaaggcgcgagctccagaaactatagattcttctcatgggatgcgtccctcttccgaaggccgaggccggggagggggacaggacggaggtattaaaactcggaaccctgcaccgcctagagccaaatctcctgtgtctttgacttgcgagctgcgtgcccaactgtctttgacgagccctttgcctctatatatgcacacacgtacgctcgcagatgcaaggaggtaggtgagagtagcagcgagaccgtgagaacgaaacgaacacaggtgaggtggtgagagagcagcatggtgtcgcttgggattgtgaggctggtcgctctggtgctcttggtagtcttcagttcgtcgctgcatcaacaagcaggcgttggtgagtcatcttgttgttatatggctttgttcatatatttgctgcaaatgctgctgctgctactactatattattagtctctcatctttcactgctgcaacctcatccgtctgaatgttcactgtttagtgatgatgactgagtcctgaaagttttttcttttcggttctgaaggtgctattaggctgcatgacagaaggcaacacgcgcagcagtgggtggaggagaggaatcagctgagatcatacatgaccatggactacgctccatggcaccgccgcgtgcccaagcacaactgattcagctagtagtatagggcccaggcagatttcagaaagccgacaagatgctttgagctcaaagtcgagtattcaggctccagcaccaacatcatatcaacaccagcaacatacatccatcgaagcatgaagacattgagaactcaagcactgatgctctcagctctctgtcagtacgttcttcaaggctctagcattagcagcatctgcatctgccgaagcatgatgacagacaggacacaaggaagttgatagtaggtgcgattcttttcgttgtagccgtatgtgtatctacgtgtccacagcgtgcagatatatgcacgcaaattttgcccccctgacctaatggtatctctaggataaatatatacgcagttatagtactactagttactgatcagtgtctacttagtttctgtaataaggtgtggtgaggtcttgtagtttggttaggtaaagtttctgcttcttctgtaagtgcaataggaggtactagagtg

SEQ ID NO: 4687 - DNA, 4387 bp, Sorghum bicolor
cctgattgcttgcaagaaggccacctggcaaaaatgcaggtagcttcctcagttgatccaccattaaggagagcagggggcttaccaccagtgttagtccaggcaaaatcatagcaggcacctagaacatagcattactgtcacttcagaactgaccttaacaacatcaatatctcaaagttctcaccacacgtccacacctgatagcatagtgacttgcccgcaccagtagggagcacaagcatagttgactctcctgcaacaaccttctggattgcctcaagctgccccacacggaaagagttgtacccatagacaactctgagcaagctctcgagattctgctcagatgggtcctctcttgctgcttcgacggcctcgaggacaccattgtcacctactgcccccttcttctcccgctctatcagagcttcagccacaagatccccttcctcgtcgccgcagctttgaggtttcgctccgccatgtcgctgccgccgccaggagcggtatttcgtcggccgcctagcctgggcgttcttgaacgtcctcctccgaccgtagccattgatgttgagccgcacaaagtttccttcggcgccccctctcggccgcttcggttgctccgcctccgccgccgcgggtgccacctccgacaccgaattgggatgcacccgcttgggcctcgtctgcggcggggcgtccggcgcagggcactgcgctgccgctgcggttgctatctcggtgggcgccggagtgggcgcgggggtcggggcgctgaaggcgacagctggatcgaaggaggggttgcgcgactggacgagacggcggaaggaggaggaagagacggtgctggtggcggcgacaagcgcgggagcagcggcgatgcgcgagacgagaccgtgcgggtcggagagcgcggcggaggggaggggaggcggcgaagcggcggcggtgcaggcggatgctgcaggcttgggcttcgccttggacttgggcgctctgggcttgggcttgggtttcacggcggcggtgtgcttggggttgggacggggttcgggcggcggccggggcgggggcgagcggacgcgggtcggggaggcggagacatcggagatcagggacccctcggagtcggagtccccggcggggaggtgggagtacatcggcgtgggtgggggggctgggggcggtgctcgtcgccgtagtcgtggacggagccggagcggggagtagcgggggatttgggggaagaattggaggcttcccgccaaggcagtgtggtggcatctgtgtagaacggagctgggaatcggatcgcgatctgcgcggcctgcccggaacgaatggagcggctctcctggccggcccagcccatcgcatttcccgcttttcttgccccgtcgaggacggtttcttgccggcacgtattcattttcttcgccgttgagtgaaaaaacatttcgaacatttgtatatggccttcaatggagtacaagtagttcctattttgagttttaggaaatggtatgcttcttttagaggagaaatgtgaaactatgtaactattcttggccatttgatgaataagagattacataaatacttagatactttagaaatttagttaaagttttttaaaaaaattaggataactctaaaagttaaatctttcgtaaacaaagaaagtatatgcatttctagcgactaccaagagagagtatatgctcaaaatgaatcgataaacgagtggtatggtaatgtgaaagctcgaaggctagtggtacaagaagagagtacatgctcataaattaaagaaaaatggacaatgcagttaataaaaagaaaggaccaaaaagaaaaacacttcggccgagtcgcgacatcggagtccagtgcgtgtggcccacacccacacgaccgttgggcgcgccggtccggcccactttaaaaacccccgtacccgtccaccaccgtgcgaacacatccgatccacccaccagagccggtcgatccgttcgaaaacgctccgaaaagaccccacgagttcttctcccacacccaccacccacaccgcactgctccgccgccgccgcactagccgttgccttctccccttcccttccccgttcccattcccaaggagttatcctcaccggcggatccggggcgccgcagcaagagggaggaaggaggaggagaggatactacccgaatggcgtcgcggacggcgtccaaggatatcatcacgctgcgaggctccgccgccatcgtcagcgagttcttcggtacgcacgcgccgcccctccccctctcctgattagttgcttgcgcccatcggggtgtttgatgaaatgcttcggttcgcatcgcaggatacgcggcgaataggtacggtacagtctacagtgtccggcacacgacggcggcgccggcggcatcggtgccgatccatcagggattagatcagtgaggagggttcggggttttgtattgactgattgattgatccggttccgttttggatttttggtggatttgcagcatcctctacaaccgcgcggtgtatcctgaggagagcttcaccaaggtgaagaagtatgggctcaccatgctgctcacgcaggacgagggggtgaaggacttcatcgccaacctcacctcccagctctcaagtcggtttcctcccactcacctgagatcgatggctctctccttcctggatcgctcgcgaatgtggtctttcactttttggttttgtgtctctgaaactgaatgttgcatgcagagtggctggaggccgggaagctgcagcggattgtgctggtgataatgagcaaggccaccagcgaggttctcgagcgatggaacttcaatatcgtcactgacgccgaggtcgtcgagaaggggtgcgccacactattttatccccccatcttcatctttcttcctacgaacctaaccgatccaaagtagccggtgcccattgtgtcagtcatggcttgattgtgagtcttcttctgatgctcgtcagggctatcaaggagaagagcgacaaggagatcatgagggagattcaggccatcatgcgccagatcacctcctgcatcacctacctcccctgcctcgacgagccatgtaaggacagcaaccggcatccagtcgcctaattgaccttcctctcctgcatttcgccttccttttggagggctgcaagtctggtggctgactctctcgtctcctgctcccgtgccctgactgatcaggcgtgttcgacgtgctggcctacacggacaccgacgtcgacgctccgggcacctgggtcgagagcgacgccaagctcatcgacaacccgcagatggttaagctccactcgttcgacaccaaggtatgtccacgcagcagacccgtttatgagtttgtctgttcggtatcagtatcaccgatatggttctcgattggattgctactaattcactgttcctgtgctggagtggcagattcataaggtggacacgctggtgtcgtacaagaaggatgagtgggacgaggagtagggtttgcaccaagtaccctgctatcgctagagcttggcgtgaaggcagtgtgaatcgttcattcacgtctagcgcgtactcccactcctaccaaaccattcttgcgtattcccctgtctggagccctggaagctatgtaattctgggattgaaatgcaaccttttgcgatctttttagatgctgtttttacttttataatatgacatgtcgctgacaagcgcctgtgcgatgtaacaattatcttgcccgtttagattccctggacacaatgtgctggaaactttcagatttactgcaagtaatcgtagaacaatctagttctctggaggatcatttgctgcacactccaactgcacatctatattctagttaccaatgtcactattcagctacattttacatatatcagagaataaaggatggcctggcaattacactaaatggtagtactagcagtagcactttgacacgatgccttgccaaggcagatgttgcaaaatcaatcaccaagtgaccgcagcccctgatacatcacacctggtcggagatcatcaaggctatcgacgtttctatagcctccatactccctgagaaatgtccaaccacgccgtaagaggaaatctcgaaagtcctcttcagtgtaaaatgtcttgtcttctggcgtctgcatgcggtttccatcacagagtttgattgttatccctgaaaaaaaggataaccacaaacttcagtagttaaatgaaaagcctctcaagtgataaagccctatggattttctgtctggccaaactacagttggagaaagtactgtcaataacattgtactttt

SEQ ID NO: 4688 - DNA, 3887 bp, Sorghum bicolor
tccctgtcgtactcatttggttgagcttcaaccaagttattgagggcctccctcacacaacaccaacatcaactccacaactaaggttggtgcatgcaagcacactggcaagcaatatttgtgcaaacatcgccttactttaggcacctaaagctcttcttgttaaccgacataaactagcattaattgccttattcttcaagatcactccttggatgttgaagctttcaaatatgtgtgtttacaccttaagaagcttcaaaaacaccaaatagttgagtggggcatacatattcatattccaacactccaaactagctatcgcaaactctgctatgatatatacaagaaacaaatgttctccatggtagaaatggacctcaccttaaacttacaatggcgcaggtcttgaccacacaataggatctttctggtgcattcgttgtgtccttgatttttttataatgcaaaggtccaatgctatcatctggagtcacctgatgagtaattccttaaactccccaacctagtaccaaacttaaaatgttcaatgaaccatctagtgcttaccagagcatctgttttggactagtacttgatcacctttggacattgatctagtacacgtatcaagtgaacttcatcgtggcactctaggtcatccagtgaataacaacccactgggtcttggccctattgtggttctcttcaatggatttgttcatgccctattgtggcaagtattgtagtgttacttgccatttatcaaccaaaatcaccatcaatttcttgatgatagcgtctaattaataaataaagtgagacacatatgtcttttgtagtttcttctaatctattctaaaatatttagaatgcactgtcatactggacataaatttttgtcatttatagacgaggcaacttattgatttagctcaagccccacgaaagtgactccctctcaaagaaatcttctaaattgctcacgagaacaatcttctactgtaataaatactctaaaaataaaactcttctattctaaatccacgcataaaggccaaagagccttctagagactaaacaaaaatataaaaagctatcttgtagacttcgttagtaagatgcatgacgtagctattagtggaagataatatggatagctagtaaagggtgatgtgaatggcttgtatgttgatcagtttgaacttgcagtgtggatgaactttataagaaacgtagacaaagaagaaaaattctaaaaagctttatagagaaaccgaaggcggaacaccgatattattaaccatggcagaatgcactctagagaaaccacaggcaaaacacggattgggccatatgcgtctactctagttttttttggattttttcctccttatctataatcttttataaaaataatccacgttgcaagttttatctcaacgtggatatggcctaatccatcaccggtatataggtagcttggaagtcttccgttcttgcttgaccatttctggtaggctttatttgttgggacactcagaccaaggccaccagcccaccaataaatcctcacatgcgaggtacgtggaattgaagcaacaatatacggctgcccgcggcggccgggaagatgacgccgattgtcttcgcatacgagaaaagtcacaggaaagcaaatgactttctatcaggtagcatgatgtgcggattttccaccgagcattcagccattcaaggggtgggcggtggcaatccaaatcttattatatctcctacgtaagactagtgcttgtcgatacatgctgacccatgtgtcgaaacttcatcataaaacgtggaaacagtcgtacgtgccagtgcaatgcgtggaacagtcgtacgtgccagtgcaatggtacttttggaccgggacagccactccatctccatcttccacgtcgcgtgccatgtattgacaaatgatacctatataaagcggcacccttatatgacatctcaaatcacacctcacaacaagctgcaccgcagcaaccttagtgagaagctgaagtactgatccgatcgatccagtatggcaaacgcgccgccgaggatcttggcagtcctgggggctctcgggctagcactcctctgcgctgccgccgtcccggccgccgcgcagaactgcggctgccaggcaggttactgctgcagcaagttcggttactgcggcacgacggacgactactgtggcgacgggtgccagtcgggcccgtgccgctcgagcggcagcagcagtagtggtggtgggaacgtgggtagcgttgtcaccgacgcattcttcaacggcatcaagaaccaggccgcgagcgggtgcgagggcaagaacttctacaccaggagtgcgttcctgagcgccgccaactcgtacaaaagcttcggtggcgggtcggtggcgggcaagcgcgagatcgccgctttcttcgcccatgtcacccacgagaccgggcgtaagttcactgaccacaggctctaattaatctctcttccacagtatcgtctttgatttgacccatcatgcatgctgatcaaagtttcgtaattctgctgtgtggacgtacgtatggctcgataccgaccgacgacagatttctgctacatcagcgagatcaacaagaacaacgcctactgcgactcgagcaacaagcagtggccgtgcgccgcgggacagaagtactacgggcgcggcccgctgcaaatctcgtggaactacaactacgggcctgccgggaaggccatcggcttcaacgggctcgcgaacccgaacaaggtggcgcaggacgccgtgatcgcgttcaagacggcgctctggtactggacgaacaacgtgcacggggtgatgtcgcaggggttcggcgccaccatcagggccatcaacggcgccctcgagtgcaacggcaagaatactgcccagatgaacgcgcgggtgggctactacaagcagtactgccggcagctcggcgtcgaccccgggcccaacctcacttgctaggcgagtggcgtcggcagtccttggatggctcgtccagaaaatgcatgctcggcgtcgcaccctcgcgaaacacagagtttagcgagtacgagctagctagtagtaacaataaaacgctggggctgagcctgtttgttgcaccttactaataatgaagcaactataccctcgaaacattagtgtgtacactcgcgcttgtactttactacgattgcatcaagggtttaaagactaaatcaataaacagtgtctgtgtctaggcgagcttcaacaaatgtgcagatgagtccgccgcagttctctcgtctccgcacacacgtatttaggataactctatgtcagatctaccattttatctccatctatcttctaccttctacttgttgttgtcgaccgctggacgggaaggctcttaggctcggccaacttgttactagcctcgaccaattaaaaccatcttcgggtgcgtgggtggtgattaggtgaagcttgcggtttcatccgttgccgctggtggctgctctcttggctgaatcggccccttccagccatacctgtgcctatgttgatttgttgaagaaataagaggaaggagatgatttgtgagacacacaccttgtcgctctccgccaaacgcatggaaatatgagagattttgcaaacacaaagaaggccatataccaataaccaatcatgatgaaaagtggttcttgtgcaacatagtacctgaatggttgagctatgcaatgaaaaacaaatttcttagagcatctccaaccattatgcaattggactttgcattcttgaaatttgccaaaaaccttaaaaattgctctccaacaattttacattt

SEQ ID NO: 4689 - DNA, 8390 bp, Sorghum bicolor
ctataaaaaacaattaaaaatataccatacaaatattgaggttgcaattgacagtacgtcttgaaacatcccatggtcactatgccaacaatccaaaatacgccatgggtctaaaaaggaatgcacatcgtttttgagatggagggaatacaacatgaaacatctcatggatatatgagaaaataaaaatataatataccctctgaacatccatggatacacatgaacaatctaaggaacaatatttctcacgagaaagatgctacacgttaaaacaacatgacccttctttccataagatattgtcatttttatactatcatttatgaataatacttacctcagcttggaatttcattctcctaaatcaagttttttttatgaaagccggatatggtttgctaaatctaaggccagtctcaatgcatagtttcacagcacagttaccaagactataaactaggtaaccgagccatatgagtttcatggggatgaaactcctctctcatctgatgaaactcctttatttaatgaccctgccaagtcagcaattttgcttatgtggcaccctatttaatgtgcatgacactctcatgaaacatgcattaagactggcctaagcattgtattacttaacaaaaaggaagatattatatcttcatgataatttttaatgaaattgtatctagatatacctaagtggaacattttttaaggatttataacctatttaagctataaccttttaagtttaatgcaaatgaaaatgtaagtaatcttgtttttccagatgcctcacgtggcccaaaagaaaaaacagcccacgagaaaaatctctcaccggcggcccacatcgcacatgcagagagcattgtggtctcaagaaaataataatgcagagcagacactagtgtagccaacgcgttaagaaggtatatgtatggatatattggaactaaaacatagtagcagctaaagttaatactaaagacacttacaatgcaagactatatcacagagtataagacaattaattatatattatttatggtattttgctgatgtgacagcatatttattaaagaaagaggtattaaatataagactccaagtcttatttagactctaagtccacattgttcgaagtaataaataactttagactctatgatagagtctgtattgtgagtgccctaagggaagctgatgtgttattaatcccaaaaaaaactttttttttccgagaggtattgctccaaatgaacttgcagggaagcgaagtaaagtatatctcagctaaatgagtttgttgtggtggaatatatccactcatattcaagttctcaacttgacatgagtgcttgtattttatggattttattttataacttaatgatgctatttttcagtaattgcaagatcggtctaacttcgaaggtgctcagaggtacggtgtgtctacgtcgttctttaattcagttcttcgcatgtgtttatagggtaaggttaattctttagagatgcttggtaactttgttcggtcatagtggtgagtttgcgtttgtgtatataagccaaagaataacttgcagttgcagtgaaaattcccagaggcgagatctggtgaaagaaaaaaaaaacttgaaaggaaaattcccaaatgcactagagtcgcctccgagaagctgctgtcccacaggcccacgggccaaaagcgatgacaacagtgcctggttcgggcatgtctacgtgcacctgcagattgtgaggctttgttcagttcgcaaaaacttgtgaaaaacggcactgtagcactttcgtttttatttgacaaacattgtacaattatagagtaactaggctcaaaagattcatctcgcggtttacagatgaactgtgcaaataatttttgtttttatgtatatttaatgctccatgtatgtgccgcaagattcgatgtgacggagaatcttgaaaaattttgggaactaaacaaggcctgagtgctttgacctagcggcgtgtcacgtctgagtctgacgtcagaaaccgtcgtgtgtcacagccggattcacccataggcccaccgattcccaaacggagcccacccccatttgcctgatccccgagggcggaggcggcagcggaaaggcaaagagaggagcggcgatggtataatagtagatttcaaactgaaactgagcaccgaagagagagatatagagagagagagatagagggaagggggaagagagaaatcggggaggaaggacattgggagcaggcggctattgcggccgccgtcttcctgattcgggccccctccccggatcgctccagattcgcaggatttggggatcgtgcgcgtctgcggcgtttcgccatcagattcggaggaaaaacgaaatcaaggtaatctccgtcgatgtcgtcagattactgcgtgctagggttcttcgctggttctagacacgctgatgggttcccgactgtgatttccatgagtcttgggctgtgcggccgcatttcgcgccccgccagagcgtttcctctacctccacgccgcggccctcctccgcggcttttgcgctccttcccatctccatccgatacggggcgatggggccgccgttgttcttcgccactctgtcgcggcgcccttctactcgtggcgtagacgaatctcaaccctagtgcgctgaaggcaggtctgcacaggcctggtagcaccgtctcgttgagctctctctagaggggataagcaggtgaggcaaagccgccaaattttacatatgacaaatcgtacttttgtacgccgcagatatgctggtgggcaagttattgtagaccagtaggggtaatagggccttctggccatccctggagttgtcactgagagtaaacctcagcttaagagttgatgagattaataatttgatgttatagcaccatgcaggtatttacctattattctgggatgtgtgaaatgtgttctgagtaaatcaattgcattgcttgatgttaccagtacaacatggtggctgatttgggaacacttgaaagataggttatgttaatttgaattgttttaagtgaagtacataaggcatttgtagcaactatatagtacattgcacctcaaaattaggcaagctgctacatgcttaatatgctcaatgctaactgtttttgtcttcctcaatcctatttggttaggattaacttttctgaaaagcattatttttaaagaaagcactctcctagttcagttgaatgtcctgcttctgttgttttttggtatctgactagctttatccagtccaacttgcgatcttgtcctacacccatactcctaatcacaccatcccctagtctacctgcttccaagtcccaaccttccttttttcctctgctttcacctgttattctattcatgactatattgccatgagctgcctcgccatccctggtgtcactacaatgctatcatcatcaaagtcccgtgtccacattgttagatccatgccagtttttaagttctcttgatgtgtaacggtcgtgcttcccaaatcccaatcaagcttttgcatgttcttattgcttattggttttactttcttgtttatataggtaatgttctcattatagtgttaatgcttgttttgtaaagtaaccattggaaaaaatgttgaatcttaagtttccatgcacaggtgaaggggcaagtttctgcaacttaaataacgagagtgaatatgtctgacatcaattttgatgagattcttgaggttcctgacactcctgaccaacatcagtcaaaataccatgtttccagctctattgttgggagggattatacaatggcagctgctaatccatcaccacggcgcaaacttagaattagattcaagaacaattccctggatggttcatcaagtcagaataatgcttgtagtgtattgcctgcagcttcagatattgatcatattttcaaacaagctaaagcagcacaggttctggaactgtcaaaagattataatgcaaaattttccctaaagaaatctgacaggacagggatatctgttgacaatgaaaagagggctgaaaaacatggcttggatcagagcagaagcatttcgaacaacataagttgtagtgtgacggtaggaaggaaccctaccttccaagttaaagatggagaggttgttcagcaagatgcaggtcatcagaatgcaaactttcttggcataggatcaggtcttcctactatcccagtgggaaaaccaggaaacaggacatgcactagcactacgaaaggtgtaacaggtgctgatgtttgtctaggatcaagttctggagaggtcaaaggggaagtgatcactgacaaggtcattacaggacctacaagccctctgtgtgttgttcctcgaaggcatgttggccaaaaaaggctggtccacaatggatgtatttctccctctaacatagccaagacaaatgtaaaagtggatgcaaaacgggaaatgtgctcttcaagtgaacatttgcaccatccacatcctcagcttgatgcatttgacagaagcagtgtgattgacctcactgataattcaccaataatgacaaggcagagatctaaagtgaacaataaatttatccctggacacaatatggacacaagggccacaaaaaaactgagaacagagacaactggcaggacttcggttccactgtccaaatatcatgcaaacagcagcaattgttctgaagctaatttatcaggccacaacaacaaaggaaaaggaattagcattgatatcttggatagtgatcagattggagaagctgacttgagggggtatgttctatctgttctcataaaagctgtcttacttcatctcttttatgactggaataactagttcatttcatgctatacgagttcatttgagtatggtcttctcttgtaaaaggctaaaacatggcaatatggcttatgtaagaaatggtagttgaatgaactgatataattacagtacagttagcttgatggacatggattatgttgaaacccaactgattgctttagaaggcatttttctgtccactcgactttgtttagcaagataccttatatttcatatgaaatgactactttgttttttctggtcactatactgttggagcagcaaaatgtggtatgtcttacttctacctctctgttgcagggttgatcttagtactgctggaacttgtgtaaacaaaaacagttctgatataaacacagagcaaggttggagaacaacacacaaccacacaagtaaattacccatttcgtttatgggtaacacaactactagttccagacgagaacctggatcttccacgcgatctaatcaaaaccatggatctgctggaggcaatcatacctcagttagtggagcaaccatgatggttcctgataggttggggaataaaacaataatgaatcataaaggatggagaaaagaaacctcaacttcttgtcatactggtgaaagctctagtgctgttgacgaacctagaggttctcttcaatcatcaaaaatatcagccggcagaaatcataccagtcatcagcataatattcctgtaataaccatagatgacatatcccctgaagctagacctagttcgagtggattcactaatggaacctctgttgatcctaacatagaagcacaattggagtcggatgagttattggctcgccaactccaggagcaactttacaatgaatctcctcgttttgccccaacagaagaggtaatttctcatcatctctctcttgagtactccattcaacatcttgatgattagaaaacagtcagattctcagttttccataaaacagattgatgcaatcgtagcaatgtcacttcaacatgaagaagatgcacatcggacatctaggcctgtaaggaggttccaaaacaatattgtgagagcacttaactcattttatgttttgcatatgtgtgagctactgactagtagctcttatagattttcttgcaatacaagatctgaatatgaagttaatatttttttaatattaaaaacaagaaatatgctaaccaaaatcttgcagaaaaagtattctttatgacaaaattcctttgctgtgttgtctctattgaaattgacatgtttaatctttttttttattagagagatgcccgggctgctcgttcgagttcttatcgaaatgctcttagggctcgattggcgacagcagacgatatgatttcccgtctgcggaatactgctccaagaacactgggattggtatttattctcccttgcccttttttatttttactatgaataattgaatatcaatatattagcatctcagtaaaagaactttttctgggtttctttagaccaaccaacatgttattcagcttcaatgcattcaaatcatatgcaacattatacagctattttaggcttccagttgtattactagattatgttttgaaaggccatattactacattattaatgtacattggaatttgattggttaaatactggatcagttatatgttcgtctatggacaagcactatcataccttgccttctgtttgtacttttctggtatatgctttggactcctaactttagcacaggggtgttctcagctgctctctgtactcagttgtgatgatagtcgtcattgagttagcagttttttttgttaccttagatagaagattattaacagcttctattttgctacttttagggagctgctttagcaagatattctggtgctttgcacattcaaccaaacattgacttgtaagtggtcattctactattcatctattatagtttcactggacttcaagttgcttgattgacttgagaattcaaaacagtctacatgttcaattcattatattgcttaaaatgaaagctttatgtatctatcatctatgtcattcttcgtgtgcatatgtcatctttttgttatgattttatcttccgcctattcatttgtttaaaatcttgtactgggtggtttattttatctgcatttatgctacagcaattctcacttcaacacccccatctctaaaaaaagactgaaaatttaaacgtcctaaaagagcacttgttggtttgtcgcagaaatgactatgacgcactgcttgcactggatgaaaataaccaccagcacactggtgcttcagaaagccagatcaataatttgccgcagtcagtagttcaggtatcttccaaactggtataagtttttgcctatccttcttgactgaaaaatcctaactactttcccatgatttcctgtttccgacagtccaatagcattgaagatccatgttctgtctgccttgaaaatccttctgtgggagatactatccgccatctgccatgctttcacaagttccataaagaggtatccctcctatttgttatgtttcagtcacttccgctgaagcttgtcgtgtttctgatgtcaaactgtttgcacgttgcagtgtattgacgagtggcttaaaagaaagaaactgtgcccagtctgcaagtttgggattaattgaagtttgccatgtctacaagttggagttctacttggtagtggtagcgactgagacgctgcaatttctcgtactggatgcttccctgccgaattttttttttttttgtccaagataaaataatttgttgctgtgatcagtgcttttgggcatcattttgtatgtgcgctttttttgctaattttgttgtcacatgatccaccaattggcatgaaatggttaaccagcatcttgtgaatcatatatgtcgttgcatatatttggagaaaaggggaaagtgaagctcttccgcatggcctctataaatgctcgaaggttttgtatgttttgggggtgctccacgtccggtgaatttaccttttattatcatcagaaaaatacctaagacaggcaagtattattttacgttgttgcaccacgtaacaaacacaaacgtgtttgcatcatggattcgtccccacgctaattaggttgtgatgaaatttcatgttacttaactccgggcgttaatatatggcggaaaaattactttacccatcaggttggcctggtgtcattatatggcagacaactataacaaattagttcactcatcagcttggccgtttggaatgttaagcatttgttacgcactcagtggtaataaaagaatgtaaaaattttaaaaatcattcgagcaccagtggtctagtggtagaatagtaccctgccacggtacagacccgggttcgattcccggctggtgcattattgttttgattttttcatgaacgtaattactt

SEQ ID NO: 4690 - DNA, 6934 bp, Sorghum bicolor
gaaaatatttgttggttatctcattgaacaaatgtgatttgctccaggagaacttcgttatgctgtgttctacacattcttcaaaaaagttgccttgtgaaagatcaaagtcaaaaaagaaggccaagttacagcagtatgccattgtgcctgttatacataactgcattttgctacacctgattgtgtcttcttatgacccctcattgaattttgcagaccatcttctgacactgatggtctgaattcaccctctccaatgcaaagggatgaactttggactgcctcaccttttctgactagtggatgggtgatatgtggatctgccctcattggccatgagaaggtaattgcttttttgatatgatcttcataactaaaaagtactttatagcttattcaaatatgtaatgtgccctgaaatattcataaacttcacaggaaatcttggatcaatttgagtgtcacactggcatcactgtaactaacacttggagttcggatgtgactcatgtgattgctaatacggatgaacgtggggcatgtgctaggacactcaaggttctcatggcaattttagctgggaagtgggttctcaatgtgaactgtaagtccattttctctgaagatcaataaaaaacagtcagggctaaccaaattatgtatgttgtggtatgtctttgtcaattgtgattttgtagccatcacaacttagggaggatagttcaatcaagtgctgtatctagtatattgcttgcatctgctaggttgcttttgcttagactgccctgttctgcaaggaagttattctaatgcaaattcacatttgatatttagggctgaaagactgtattgaggctaggaaaccaatcccagaagagccctatgagataagctgtgatgttcatggctctgttaatgggcctcgctcaggaaggcttcgagcaatgcagcaggtttgcaaatgaattctgggaatgaataaggcaaatcattacttcaatgtaacaatctttttggtatactgactgcacacatttttgcttctgtaggcaccaaacctgtttgctgggttgaccttctatttcagtggccatttcatgccgggatacaaggccaaccttgaagatttgattgccgcaggagggggttccattttggagaagactcagctctcttgtgcatccttgattctttacagcatggagccaccacaaggaaacagtcccaacacccttgagaccatcaataagagaatagctgaggctcaagaactggcagccacggttggctgcaaagccattcctcatacatggcttctggattctattgcatcctgcaatttgagcgtgtgatgctgtactgcctaggttcaaactcaaacataggaatgtgatatctgttctgcttttttttcttttcaaaaaggagattaggatgtgattgacatgttgtcttgatccaaaatatctttaaatgttgtagcatgaaagcgcaattcaattggaataaacttgtgtacctcagtcagcgttactgtcggtgatgtcattcacatgtttcacctactgacaggtgcagttggtctgattttttttttaatttctaataaacagaaaaaggttggacctgtttggttaggcttactccaacatcttgaattggtgtggaaaaaaaatttaccaggttggtgtcatctgcactgtctgttccagatccaacactcaacaccattcgggactttccatatttgcctgtggagttattcggaaaagccctgaaatgattgtggagtgcattggaaacaaagcaaacgggatggctgagctcaggaggttgcttcagaagtagttcaccagcagcagcagcagcagccaggagaggtccccctcacgtctcaccagtcaggcagccaccgcccaccggcgtcctctccctggtgtcccgagaatttgtttttttcatccaccagaccatgatcctgatagcaaagcaacacttgtacctctcttctctcctttccccttctatttgatccctggtcctggtcctgggtgtcgaactgtgccaacgccatggcgttcttcagcagtggatcccgggttctggtcgaaatcctgacgaggatgcagaggtgagtttgcaggttgttgcccttctgtagtttgcttataaataaaaacatggagtctgtaatccgtatgcgcgatggtaaacggagtagctctctccgggcatgatgattctgcactctgttcgctcccaagtggtgtagtaaaaactgacactgtaatatttgaatgtggggcgagcaaaattttgaaacccctggaccgaaattcaattgtgtgtttgttgcagcgccgaaagaccaatgcctgttgaccacaccttcttcgagtttggatcgattcgatatcatgtggaggtatgtaataccatttccaagcaccttgtgtgctgcagcagctcctgcttggcgagcaaacagacgaagaatgatcatcatgtgtataatacatccgcggaaaccatgcatatatatgttgcaggcttcagtgtcggatcctgagaacgtgttcctgtcgatatcgacgccgtcgctctcccacgaggcggctgcaccctcgtcgtcgtcggcggcgagccgcctgcctgaactgaccctgcaggagacgaggaagacgtatggcaggttcgcggagatcgtggagccgccgagggaaggatacgccctgacgctcaagctcaacttctccggcctcgcccggccgaaaggtaccctacgaagaacccatcaacgctagctgcaattgaaatttgaaacacatttgagcccaacgatgacagccggttgatcgcgctctgaatatatatacatacatacatatatagatcgcgtgaaggccattaaccaggtgtcgctgctgcaatccgtggtgctgagctcgcagctgaaggagatgctggggagcctcggctcgtcgccgggcaccatgaggctcgtgtacaaccagagggagcccttcttcgtcagcaggacggtgcgtttattcaattctcgtgcgcacaacaaactaactgaaactagtaaactactacgtatatatcttcagtctgtcagagaaatataaccaagggaacgcacaagcctgaactgaccaccaacgtatatatgcaatgcagctcgatcgctaacaatgcgtacgttctgcatgcaggctgatgagacgataaacgccatcttccccatgcgcttcagggacgacacggacctggccatcgccacctccttcttccaggtccccacctccttctcgtatgcacatgcatggcgggcggccgggcggcggatgaacttttgtcattgcaggagctacaggacgtcgggaactcgttcgcgtgggcgcccaagtgcagctggtcgccgatcccgccgccggagctgcgcggggagaaggtgcaccacctcaccaccaacggcggcttcgtctccttcggtacgtgctagctgctcctgtcgaatcgtacacgcgacggggtccacggggccggccgtgtcgctccagttaacagcgggggcttctagtaggtgggccgggcttcatgactaacaacctgtctcatgggccacctgggcaggcgtcctgtcgcgccacgtgagggggaagcgggccgccaagaccgcgtggatcctgctcaacttccagtcctacgtcaagtaccacatcaaggttcttcctctgctagtggaggcgctgtgtgtttttttttgcccttttttctcgaaagattttcataaccatgtcactgttagtttgattttaaaaatctagactcaaggtttggtattattgctactgacgctaagctacactgctttggcgctagtggtaatgacgccaaacccacaaactacgtgcactcttgacatcattggcagtggcgccaagtttgacgtcatggtagatgccaccaaacaatgttaacttagtccaaagtaacgttactattacgccaagccctgaatccagattccaaaattaaagatgtaattatgagaatttttaaaaaaagcctaaaaaaaagacggcggcggcggcagtgccagcgcccagcggtcaccgctcacccacccatccgtcctcgtcgtccgtttccgtttcaattacagagaggcacaaaggccttgtttagtttcaaaattttttgcaaaataagcattgtagcaatttcgtttgtatttgacaaatattgttcaatcatggagtaactaggctcaaaagattcgtctcgtcaattccgactaaactgtacaattagtttttatttttatctatatttaatactccatacatacgtctaaagattcgatgtgacggggaatctgaaaaattttacaaaatttttggcaactaaacaaggccaaagaaacaccgtggctgacgacggcgccggcggttacgctgatgatgtgatgcatatattgcagtgcacccggagccacgtccagagccggatgcgggagcggctggagacgctgacggaggccgtccagaacgcgaggctacgcgggacgaatagccacgacaagaagcgggcgtcacaaggtacgtctcgccgccagctccctcgcagccacggcccatgccgccatgcgtgcatcttgcagtttgctccccagagtgtacgtttttctcaaaggtcttgtttggttggtaccggtaaaatttaacttctatcccatcaaatatttagacatatgtataaagtactaaatatatattatttatacaaaatttaaaatatagctagagagtaatttataagacaaatctttaagcctaattaatccatgattggacactaattgtcaaataagacgaaaatactataaaattttaacattttcaaccaaacacccccctaaatcaggaagacctagtgaatataatattaatatttatatgtccaaactagatctattacaaaaatatatctcatgatcaatttaataatatttattttgtatcatgaatattaatatatttgtttatataattttggttaaacctcaaattatttgatatcgaatatcacgtgatcagtcatatgtatagcgtgttatacagttgtagtacgacaaagaagccgacgcgatcgatagcgataaaaacccatccgccaccgtacccaggtggaaatgccatttagtctcaagttaatcatgcatgaaaaagggaagcataactgctgcagctttgcaccatatgtataaacagtgaaacatatttggcgatgcaacctactgtcctctggatctccttagtcagtagggagatggatagcagaggacaaccaacctctttttttcttctctctaataacgtgcacatgctaaccacatcatcaagacatctatgatctgttcgtttggctccatggcagcactactgttggtgctgaacttcactgtttttctgtaaaaaaaaaaaaaatcaacgaacaatactttcagctgactcttcagacaagcgaataattgcagcagtctgagcggctggctttaagaccgtgatagcaatcagatcaaatgtaacgacgacatgccacacggcatcacaaatgcatccatattgctcaacaatatttgacgtttgtctaagctgatgatatgcgatatgtccgtcttcaacatgcccaatcttttaataattcctgaggaaagaaaatatatatcatctcatcagaatctgtcgtacgtatactacgagaaacgaacgaagtggctaatgacccaaccacaattaatcctgatgcagttgtgaagaagaggagcagcaagagacggctcgttagcctggcgaaagcgagcaagaagctgcacaagggtttcagggccgtcctggacaagatcatgaagcggctgcggcagaggatcagggtgaaaggcctggaccggctccggcggcagttccggtgccggtgcttcgcggtgcctaggctcccggccgcgccacctcgcgctcacagtcgcagcaggaaggcgcacagataccacaagctggccgagtaatctatcaaaccttggtcgtcgtcgatgtcgactctattaattgggagcatctagctagcatctgcgctccgctaatataccaagcatcagagcgcaccaaagagtttagctcttttcctcacattggctcaaaagttttagtccctctcttcttcacgtgacaccacctaatgctaagcttagagccgacaagttttaagtatccatgtttgagtgttgttacatttgcactaatttctagttgtacctttagaatgtgaccggtacaaatgtattctctatgtatactacttttgtggctatatggtacaaggctacaagctctaaagtagcataaaatcattcgggaaactgagtgctacacttatactatatatagtttcagtcgaaagtccttttttaggtcactcaaggttagctaacacgtggacaggtctaacaaatattctgttacatcctatttgaatttcagtttgtggatattaacacttttttgtacattttctgtgatatatatcctccgcaagaacaattcttgaaaagactggattattatatgggactagctaaaattcaggtcttgatggttattacatatattttataataaaattgaagctttggttcattgcaatttatgtaggcataatctgcaaattttggttctgagaataacccgttagacaaaactacaaaaccaataaattccgattcgtattaacataaagacaattaacaatttatatatattttctatagacagacaaggacaaaaaatttaatatattatgatacaaagagaaataacaaaagtaaaaatttacttatactagttgtacaagagttgttgcctgaaat

SEQ ID NO: 4691 - DNA, 5652 bp, Sorghum bicolor
  misc_feature (2211)..(2340): n is a, c, g, or t
agtttcctgacgagctatgtaatttgtttttttattagtttctaaaaacccctctcgacatccttccgacacatccgatgtgacacccaaaaaattttcattcctaatctaaacaggcccttactattatgtgcaccgtgcgtccgtgccagtgatgtcagtcaggtcaggcctagaggctgcctgcctggcagatcggtcgatcacgttcgatacggcctggtccatcgaggcatcgtccaaaatttgtcgatcatcaatagctctagtatattttttcgtaaaagcagacgctacgatctcttttctgttttcatcgtaaatagataagagtaaaagtccactgattgtctttaaacttgttcgacagtgttattttggtatctaaacttacaaatcgatcatttagatcctcaaattagttcatctgcatcatcccaaatcgtaaacttataaatcgcttgtttaggtctgcaaatcgctcgtcatcctgatctataaatattataaatattataaacttataaatttaatatatgtttatagaactgtccaaaaataataaatatatttttgttagataacttatacattaaactagaatataaatgaaatcaccatgtactttctatttttaattctatagctaaatgactaaatagtcacacatattcttataaatcctaaaaaatatatatgtctatttatttattaaaatatagagttaaaaataaaaaaaaaacacatggttactttcttatattctaatttaatgtacaagttacctaacaaaaacagatttataattgttctataaatatatattgaattttcaagtttaaagtatttagagagcaggatgacacaactgaataattttgaagatctaaataggtaatttgtaagtttaggaacctaaatgatataactaaataagtttgagcacctaaacaagtgatttgagaggttagggacccggataaataaaaagaaataagcttgttcactgaaatgaaaatccagtgtgcctggagggccggacctagctcgccgctgagggaagcagcggtacagggcctagtgggggttgattgaagcccgctcggcaggtagagaaagaagcgccggaatcagcggtataatttgggccacaagcggacggccgatctgcgcatcagcctcggcgatcaggtgcggttttgggcttttctcggttcctcgttcctcggccgcgtctttgttagtccgcgatggacacggcccgccccgccccaaatctttcgtctggatcaaaagggccataaacaaaactcggccctcctctggttgggctccatttgcaggcacttgcgaagaatacgcccttgggccgatctaggctgggctggttgcatatgctccgtcggctggcccaatcaaaccgttttcgttgttgccgcgtcatccatcgggactcttgcctgcggatgaccttatcacgtcgcggttgacgtgcggcgcgctggttggaggatgcaaatcccctctcatctggcgcccggcagcgcccacacccgccaaccaagcacaggcacagcacgcagtcaccgtcaaaatcaggcggacgactactagacgaggaggaggaggggaaactgctgaaaaaactgagaaaactagcggcggccggccggagaggaaggaagagacctgcgttgcgccgctggtctcccatccatccattttgttttgtccgctagcttcttcacctgtcgttccagtaggagtcttgcttatttacccctcctcctccacaacgtccgtccagatcatccgagctagctagagagcaaaacggaataatctattcccggtgatagattaaacaaaacaaagtatcttctctgtctgcgtgcggtgtgccggccatttccacctgttcgttcgcccggctcctcctcctcctcttctggttctagttcgtcgacggcccttgcgccgcagcagagagagggagattcatggagctggggagcgccgtttcggcgcacagatgtagcagctactacacggcgacctacacccactgttccataggcttctccccacgggtccgcgccaccagctgctggatccgcgcggcggctgagggcgacgacggcggggcagaccgccgacggagaggcgccagcttcggcgacgataggcccaaggtcgtcgaagtcaccggtnnnnnnnnnnnnnnnnnnnnnnnnnnnnnnnnnnnnnnnnnnnnnnnnnnnnnnnnnnnnnnnnnnnnnnnnnnnnnnnnnnnnnnnnnnnnnnnnnnnnnnnnnnnnnnnnnnnnnnnnnnnnnnnnnnacgcgggagccgagctcgccatgtgggacaagctcggggccgtcgtcaggctcagctatggcattggtcagtacttgctgcttccacacccctacatcatctaccagttcaatttacagtatcaagttaggccttgtttggatgttgtcggattcacaccaatccacatgttgaggtgaattgaagtggaacttgaactaaattctactccaatccacaccaacacacatggattgaagtgaatacgacaacatccaaacaagaccttaagaattttgttgcatcatgagcatgcatgcatgcattcaattaatcctcctatagtcaatcaatctgtccatgtctgcgatcacagggatctacggggccatggcgctcaccgggagattcatatgccaaatggccgggatagactgcacgggaggcttccatccatctctcacggcacttgtcgaggggcttggttatgcagctccaccaatcatggctctgctcttcatccttgatgtatgtacaccgtcctctcattcccagctctactctcggatcacctagctagccccatttcaattccatttaatttgcctttacttttattattatctctgcctaattagtactagtagataacttgtgcatgtggtttaatttctgctttcaggatgaagtagtcaagtattcgcctcacgcgcgtgccatccgtgatgtggaggatgaggagcttcgcagcttcttctatggcatgtcaccatggcaggtactgtattcttgatgatctgtcaatgttggctgtgcatattttccacttaaatttccaagcctaaatagattctagctaatgaaatatggaacgtgtaattactctagtaacactatcctagatgctagatgtgtcagctgttatggagaatataatggcttggagctcctagctaaagtcaataaataatagggagtatataatcttttcttatattttgtagttcattctcatcgtggctgctagctcaattggtgaggagctcttctaccgtgcagctattcaggtatgtgctgcctgttcattctcattatggtcattaactttacttccttgcaactatgtggaggaaactgcgttcctttgcaagtaattagcatacgtttttcacttcatttaatttgctcgtgttgatgctggtaaaaacactgaaattgtagggagcattggctgatattttcctgagaagcacagagctaatgaaagatgctcgagggattgcatccctggtacatatatactttcagctgaattgagatgaaactgaattttgtgatatactagtagaccatctaatatatgtctttatgaaactgtaccgatgcaatgcagagtggtattgttcctcctttggttccatttgctcaaacgtttgcagcagtcatcactgcagccctcacaggaaccctctactatattgccacagctcccaaaggtgatatatgttctactgaggacagtcctaatttgcacgaattagtttcttttgttttctggtagctagaatcaacgatattgatcctgaaatctagtaataggctatacatgtgaagtgacatgtattgttcatttaaatttcagaccctacatatgttgtgacaccagcaatgcgttcgcgcacagggcgggagaacctcaagaaactatttgcaggttagtttggccacacacatattcttttgtaactgagctgatgttgcaacgtagttaagagtgtactgtatactagagagacatgtgcacacctcagcccatagcagagtagtaatgcgaaagtaattactagtcttaaccttggcatatccatggatttgcagcttggtacgagaggaggcaaatgaggaagatatactccccgcttctagaaggaatcttggctttctaccttggcttcgaatggatccaggtacgcatagtaggtccatgcatgatatcagatttaaattcgtcagaaacataattcatgcaaacgattgacaatatctgtgtgtgatatggatacaatgcagaccgacaatatcctagcacctatgatcacccacggcatatactccaccgttgtccttggccatgggctctggaaaatccacgaccaccggagaaggctacggcagcggattcagcaggtcagaagtcaagagagcagctcagacacattgtaactgcaagatgtggcggatagatcagcgtggtgtactactggatagctagctatgctgattgcacgtagtactggatgatcgatcgaccgatcaatcagaagaccagaggcgtctgacaagttttgatctagttaattaaccatcaagataggtaaaagattggggaaaaaaatataatgcatgtagtcatgtaaagtgatgtagatataatctgtacatacatatatggataaatatatgcaggctgtaatcaatataggaagtatagtatacaatagcaacttccaggtatgtaataatcctagtatatcacgtgcgtgcaaggaagatagcagcccactcttttttcccgtccctctctcacaattgcaatgttgcatgattgatactgttaaaaattacttcatcacttttagttcatctgtttggatacctagggtctaaaatttaggtgattaaagcttagcccatggtatccaaataaataggtcctgattagtgactagcactccctcagtctaaaaaaaatagaataggatacaaaacttgtcccacaaaatacgattgatgttttaactattggacaatagattgggccaatatcaatttgagattatgtctccatgactccatgcattccttttaatgaggggcttatattctttaattagcatgattcgcctttaatgaatagggatgtatgtatagtttttgttgagaactactatatcctaaaaattctaaaacattaatttttggggaacgggcggattattcacttgtttaaaatattggatttgagattgccatgatattagtgtttttcattgcagtgcaaaagtgcttgattctagatctacagtgaaatatctatgaccttagagctgccttttaggggggaaaacatacacatatgatcctaaatgatagtttttgtaattatgaccactgtgatgatcctctaattaattagactaaatcaagttgtcatccttggatcagcacttggtttaatgtgactaattcggtcgtccctagaatcacacaaaccgtgatatccactacgtgcataactaggatccattgctaaagaagaacatacatagctca

SEQ ID NO: 4692 - DNA, 7691 bp, Sorghum bicolor
tactagcacatgcaattctatcttcattatacacaccagcaaactagtacatcactaactaatctcgtataattggttgttcatatcagtgttaaaccatctactaaacctgtattatgatatttattcattcatatatttaatataagtagtatagttttatctgtgatttccactgcaacgcgcgggtatttctgtattcttctacagttccagttcaattcgaagtataaacactaccaaatattcttctgtgatttgcgaaaaggttgtctggagtaagacggagtgtgtttgggtgtggggtcgtcggtacagacacaagaaaagagtgagaccgaaggttcaccaaacggggctagctgttgggcgttgggccattgcctttgcttgcatccccaggaaccccccgtgctttatttacaaccaccacctcccctccctcatcctcccaaccttgtgctccaagtgacaaaacaaacaaggtgccgaaaaccacctcttattatttttatttgtcaattattggagcctacagcaaagttttggtcctttttttttcagcgtggcatatttttattcggagtggtggatgtatacctctgttggtttaggtcgcaatggccctctcatcatgcatctggcaggttgactgttgctcgttttcagctgatgcatcacctgcattactttctaagcgttgttgctcttttgggttattgcaggatccttagaaaatccatggattattgctaactctttttttttagcaggaaactggtaggagctgaaaattaaacatgtctcgctctctctgaaaatggtgggatgtttttatcgtactgtccctgtgatctagaaactatcgagtgaactagaactgaagttacagttcatcgcgcgaactcatgtcaaggctgtgacgttgtcgagctatatacattggacgcaccgcaggttgagataaaagatccttttcgcattggtaaagtaaagtaattggaaagaaatatgctctggtggtttgttcttttttttttgaacgcacctggtggtttgttccagcaaaaaggaaccaagagtgatggcaagaggtgaccaaaaacaagtgaccatcgtgccagatcagggcaacataaaaataaataaataaaaacaggaagggtggacaccactgttaaagtgttaatcgtcacacgagatggaaacatccccatcaattccttcactcttttgcaagggaattcagaaaaaaaaattgaaagcggcacacacaattatcgatctgactgatgacaatgtgtcaacatgttaaaccagtcagcagaagtcatcttactcttgagtcttttttctttttgaacttcttactcttgagtcttggcacaccatgcgaatcctcccacaaatggtccaatgggttactatattacagtcaactctaagattcatcagtccgtgcatcacggagtaacaacaggtgctgataattagagagatttgactgtccacaacatgacaacgagacacagctacctgagtatatacttgttaaccttgccaccgtttcacggattaaaactcggcagtaagagtgaaaatgggggtcgtggtctcgacgtgctgcagcttagtcctctacgatactgcaccctgcaacgtcgcggttcatctttccggccggcaccaactccctcactactcctagcatcgttttctatgctggcgcctggctgcaaaggccgggtaatctagaacattttgctggtcggcatgcgtcgatacacaggtagcaacaacatggtggcatgttgcacgatgccttgtaggctcgccaaggaagcatccactgaccagcagcatccaatccaagcgaagcatagcagcctaaccgcccaccgtacacgcgcgcctctgcaccttcccccctctgtaaactctggacataaaagtgtgtcgccctccctctcttcctcttcctcttcatagcataggagagcagccacctctctgtctctctctcttttcttggaacctggagaagaggaaggaacagggagcagggtaagaaggcagaggttgctgggacagcccaagtatcaagtaagcaccaattcattcagactgtcgtctgatctttatccatcaatgttgtttgcccatgtttagtccgttctagatttctgtttagtggactcggtgacaagaggttgtatctggtttcgaattgttatgcgcatttcttcattctgtgccttttgaattttgacaatgtaattcataaacttaattgttgacaagcctgcgcattatcatcaaaatatacttgttgtccggctaggttcagagaagcaattattatatcattataaaagtatacttgtatcaacagtgtaatgtgtatgctagttattttgtattgtcataatctgaagccacccgaacagccctagtctttacattctctctctctctctctctcagatttatgttcacggtcttgcttgtactgttattagcacggtaggagtttgaaacttctttttatattaattaaagaaataggcatttgaatattacctggtccgttaggctattagcatgtgccttcgttgatccctgctatgtgccaaactgcctatgtgaacaaaatgcacacaaaagcaataaatcaggaaccccagagcattgggttagcgcagttgatattatcgactctggtaattgttttatgggtggctattatttcagctggaaaagtttatgcagcgtgtgatgattttcatgaaattattgagtagggctgtctacccatgcctttacggcaatgctagatatgctagatgcaacgagcctttcagtccgtacatctgcatcaacatgagctccctactttaggctttctagtattggcagattttttttataaaattatttttgtttagaaaaaagacaaattgatctgggttgcaaattcccatcaatttagttggcaacagaaggaaataagaatcaatctgaagagagcataatcctctgtcacggagattgatgcattaggattttccatccatttccactacaacaaaaggacagtttcaacaaatttccttctcaaccacttggatcttaccaaccaagcaaagctacttcttaagcaacatattaatatatattataataagtgaccaccaaacacatgaagcgtgcggtggattggataaccattataagaccatgcatgtgttcagtttcttttcttccggtcatctcatgaatcaatctttttttttttggtaatcttatgaatcatttgaaagcaactgtaaccacctgtttgttgtgcatctgaggcccagacgcccagtagcagtccagtaggtagtaggctccagctctccaaaatataggagtataggacaagccaacagtataagacaaggctagctactgactcaaaagttaggtggggtacaatgtacagtcatttggtagataaaagcagcatatacatgtgcagtcagacgaactttgcacttcctgatcttgagccaaccgatttagtcaatatataagcatgttgggttactacttactagccttagttgctttatgtgattcgttcgtgatgaccaacttggtcaggattagccctgtttggtgtgagcatattatatgcggctagccaagtgccaggcttacgtttttgtgatgtccatgtgacgcatataagagaatctccaccagattgaacaaatgcaatcccttttccctataaccagcgataaaagggattcaaggataccatctacatactgttcttgttcatgaattgggcttgggccagctaagattatgaccacccccttgcattctacaatgaaaatcaatgggtttatgggttctggcaacaaggatcctatagtcaaatgctaagtaccacccagtccgttctgttttcaagtgagttagggcaccaatggttcaatactaccaattcgtaataacaaatggacagcatcactttaacaaaagactatggttgcacaatagcaatgagtttaagcagggaactaacttgatatgcttttgtttttattaaaaaaatgatatgcttttattttctcaagtttagtatgcataccttagactactctttacagatttggattcagacaagcagagaaacaccagttggtcaagatgtcagctggtttccagctcggtgtgatcgggtcacttgcactctctgttgcatcttcagttgccattgtcatctgcaacaaagctctcatcagcacacttggttttccattcggttagtacaacatactttgtttttccatgcatcaatggaccttgaataacaaagcatcatggatgcaccaaatttgcatacttagagtgtgaccattgacttgtcttgtttatgaaccaatgcagctacaacattaacaagctggcatctgatggtaaccttctgcaccctccatgtggcacagcgcttacatttcttcgagcccaaggcaattgatggacatacagtgatactctttggattgctgaatggcacgtcaattggccttctcaacctgagtttaggattcaactccattggattctaccaggtaagctcgtctaggtaacgtttaatataaacatgagcagatacattaattaaacttagtatgttctacagatgacaaaattggcgatcatacctttcactgtgctattggagactatcttcttgaagaaaagattcaggttcgagatataaactgagcagttttctcacaatatcagacctcatttacagtcaaaggaatgatacaaaacaacttaagtaaacactgaaatctttttttttttgagaaaataaaacactgaaatcttctgatccattttgtacttttgattcaggagaacaattaagtttcggatatttaaaaaaaaatacttggatcaaatgattgattaattgtctatctttttctgggcctaaatggtccctgtgatattaactgttgtttgcactgagctaataccaattcaataatgtgcagcgagagtatcaagctttctcttctggtcttacttcttggagtaggaattgcttcagttactgatctcaagctaaatatgcttgggtccatcctttctggcctcgccattgccaccacttgtgttggccaaattgtatcctacatttaatctaatagtaatacaataatcaatagtctcaaaactgtaaggtgaaagcaaatattttcagttcttttcaacccacttctcattgcaatgtacattgataaagtagtccattattaaagaaaaaacatacaaggacccagtactgaaaatcttataagctatttataggccttctagtttgagccactttatgaataagcatgaatctgccacattcttcatataccagtgccacatgctaatccttgaccaaatttttgttgaacgaagctcacaaatacaatacagaagaagttgaaggtctcctcaacccagcttctgtaccaatctgcgccttaccaggcggcaattctgtttgcaactggcccttttgtggatcaactccttactaaccggagtgtctttgcacacaaatactctgctccagttctggtatgatctcaatactttaactaaatacatgaaatagtattcttgcaattatttagggaactcagatgatttaagacacagtcacaaacagccaattccataatttgcagaatattaaaattctgagacctgccagattgctaacaaactaattggtatttgctgtgtttgtagatctttaatcatgtgaaagcgctttaaacacaaacatgtttatgcactgtaaaatagtttggtgatacctacagaattaaaaataaactcaagcaaacaatggcatcagcagttattgctagaatataacagtattttcaagacagtgttacttggtcatattcttgcctattggaaaagaatctcatgtatacctcaaatttgacaatgaaatgaaaaatgatctgctctatatgaattgtatgcagggtttcattgtcctatcttgcttgattgcggtgtctgtgaacttcagtacatttcttgtgattggaacaacatccccagtgacataccaggtgcttggtcacctgaagacatgtctggttctatcatttggctacactctattacacgatcctttcactctaaggaacatattgggcattctaattgccatatttgggatggcactgtactcctacttctttgtaagagagggcaagaagaagtcagcaaatgatgctctgccagtttcacaggttttatttttttccaatccttgaataacatgcattataattcatatttatcttataaaatatcatattagacatatagttttttatggaataggaagtgataagaatagaacagccatgccaatggctgtcctgcttcctatactcggcagcaataatcaagagtccatttcatcaaattaaatacagtagtagttgaatcttctattttggtataaccagttaaccaagatgacataaacatttaaattagaaaaaatgaaatcactttagatttgaatagaattggcgctgatcagaatcagtattaagcattagtatggtacagatagacaaaaaatatggcgcctccaatactgtgaaccagattggaccttgtaatgtttagggtatgatgtgagctacaagcaccatgtgtagtgaattattttagcttctggatgggattatcaaatatgctcagcacagctgtaagcctgcaacataatttacattatgaaatatgcaacaacaattgccaaatcgcccttgaagtaaaatttaatatgtacaacctttttttcagttcaccctttctgatgtttttgatgatgtatatgtagatgtcagataaggaggctgaaccacttttggcaactaaagacagcaccgacagcaagaaagcaaatggtttatctcacgactgctaaggcttttcttatagtttaggtctagtatgaactgctcttcgaatttaatggaccttgaaagccattcttttcattcttgatttcctttttaggaaaggaagattttaaaatttgtagagaatgtatattttaacattaaaattattatttggttgtattctacacacagcagtgccagctgaagttttactagtgcagatctcaaactatactttagcagatgtagttctctactttaccaagctagtctaacaaaatcaaacaataaatcttaaggacattccatagatcatttcttactctaagtacaaattaaatcagcagtctaccatcagaatcagttccaattccaaggtgaaagaaatggaggacaaaaaattatgcctcggttgctccaagtggattcatttatgcatacatgagagatgtatcatcacaactgcttgcatgaaatgtattggtacgaacacctttcaggcagtgtactagcaagctgctacatataaaaggcagggcttctgagcagtaaattaaaaatcaaaggttttaactattctgtaagagttcagataccactatcttgaaacctactcaacacgaatatgtggcacttcaaacaggtgtaacctgccatcagctattttatcgaaactagattaat

SEQ ID NO: 4693 - DNA, 7691 bp, Sorghum bicolor; identical to SEQ ID NO: 4692

SEQ ID NO: 4694 - DNA, 3119 bp, Sorghum bicolor
taattctcagaataatggatgcttgatgcttctaataaaaaaaataaccctgcaattaataggattcacatattcagaaggaaatgggaattcaccctttttcaggtagtagaaggccaggctgcagtacatagatgcaagggagctgtcgacatgaaggctgaggactacccaatgtaccctgctgttgtgaacgacgagaggctgcatcggcacgtagaggatgtcggcagaggcttgcttggcccgggcaacgtgagaccaggggaaaagatcatggccggcgaagacttcgctttctaccagcagctggttcccggtgttatgtttggcatcggcattagaaacgagaaagctggttctgtttactcggttcacaacccctatttcttcgttgatgaggacgtcattcctgttggtgctgctttgcatgctgcgattgcagaactgtacttcactgagggctcctctctcaacaaagactcgtagcttctcactcgtgcggttgatcttgggttgaacaaatataattgacatgtacagatgcattgtaaaagtgtttttttttggcaaaattgtgactcacaaaacaatgcgacgtcattttgaagcagagctctactgtacttgactacttccctgacggacgctgcatttcaggcgaccacgacctctggtgggcaatcagatctgaacatctgattcaccgtagtgattagctacccacggcctgcatcaccctccaactactgttctccccctctttaaacagacgaaacactacaaggttcccaatcctatcgtgaagggtttctgagcaactctacaagatctcttacgttatcctatactataagttgtttcatctcctacaaattgttttagaagagtaccttaaaattaatcgagagtacactgattacctaaaatatactccctccatactcataaagaaagtcgttttgtacaaggtttgagtcaaacattagaaatataaatcatgaataacttttaaggttttgagtttggaaataaaaaccatataaattgatttgtcttgaaaaacactttcatacaagtatacatataccactttttgataaatatttttataaaaacaaggaatcaatgttatgttttggacacaatgtcgctgtcccgaacgactttctttatgagtatgaagagagtataagatatacaatgtaagaaggttatttattgctcacagtccaaaccattaccattacaatgtccagatctaattaaatgaatggctctcagtcccacaacaaagccctaaagtaaatcaaataaaaggttatttattgttcagtccaaaccattataattataatgtatactgtatgaattaaggtgaatacaaccaatcaacaactctcaaatcgctgatcacgtggacagtggactgtccatccatcccagtaataacaagcagtagctttgtcaggtcggtggagcagcttagccacccgtgctctggtgatctgtagcctgccaagcacgatctcacccctcgcacgcacacgcgaccctttgcctcaatctacgcactgcattccacagacatccacgcatgcactgatgcgcctcctctacatcggcgcacaatatcaattttttctgcacccgtacactctgagcagtgcaattttacttgttgccgagaggcccgagacgagactgtcgggacacgacgagcaaagctccaaactttgcaccgaccaagtttgcattagaaaaaatgtgctgactcagctttccgattcgatccattgtacaactggcgaaaatttgaacaaatacaggatttggatttcgaacgagctctagctagctaggcctaagtaagccctatataaaccccctacgaccgtgtcccgtcgtgccggtcattccagttggaaattgcatctggacgtatcacactctgctgtcaaaagccgtcagagtagtgtggttcagcgtcgaatcaaaggatggcgtcgacctcccgccgcatggtcgcatcatccgtcctcgtcttcctgctgctgctcgccgcctcaggtgcatgtcgtctcccctgcatatatatatatatatatactccctccgttccaaaaagagtgtcgttttaggttttcgtgccacaagtttgactcaatttgtagaaaatacgtataatatttatatctctaaataaatttgttaaaaaactagacttaaagatcttctcaatgatattaattatgtattataaatattaatattttttattatatatttagttaaagttatttcttgggaagcgaaaacgacacttattttaggacggagggagtatatagctctcgtgccactgtttttagtagctagcatgaatatcttgttcctgacatggtgtgtgcaccgttgctttgcttgagttcgtgcgcagagatggggacgacgagggtggcggaagcgaggcactgcctgtcgcagagccacaagttcgtcggcgcctgcctgagcaagaggaactgcgccaacgtctgcaggacggagggcttcccgtggggcgagtgcaggtggcacggcattgagagcaagtgccactgcaagcggatctgctagccggccggctgcactgcatgcagcgttgaagcatgatctcatatcgacctgccggtccgtttgggtttgctgttatttgttgcgatgtttgcgcgtcgccgccgtacgccgtccctgctagctgtgggctgtggctcgcggccggtcatcaccaccttacaatcgtgcgtgtccgtacgtgtgcgtgtcttcagttactcctagacgtacgtgggtgtgtgagtgtgtgtgtgtctcgtgaaccggccggcttcacgtgctgtggtttagtttttacagtttatttctaatgtgtgttttagcttctacctggaataataaagtttgtcagtcgttgcgtgttgcgtatttgcgtacaatgtgtgtgtttcattaataatgttaaaagttgtgctagataaagttgtttattttataaaaaaaaaattgacgaacaaacttatgtttataagttttttatttataaatttttttataaagctatgctaaaagttatgttg

SEQ ID NO: 4695 - DNA, 5216 bp, Sorghum bicolor
cctcctagagatttccttcgccagttcttaagcgccttgactgttctgagcattttgacatgtagcctgaggatggcgtcttgagtgttcaccggcttgtcccaggcttcattaacagcctcaaggaaaccaggtctatgtatccagtgagcctcaaatctgaatcctttgtaaaaatctagactaacatccccttggaggaataaggcactatgatccgacccaagcgatgccaaagcacagagatcagttcttgggaataattctagccattctgtagatgcaaaaaggtggtcaatccttgtcatggtcgggatttgctgatcattgcaccaagtatattttcttccccttaattcaatcctagcaagttctaagttgtctaatgttgatcgaaatctattgatcattggtaggttcagtcgtgtattgtttttctcatgtgcattcaggatcaggttgaagtcacctaacatcaaccaagctggtaggcaatgtgcgcgtaggtccatgatttcctggaggaacaaaagtttatctatgtcgctttgtggtccgtagacccccgttaaggtccatgttttgttttcagctctcatagtcactgtgacagataccgtgtgtgcggtgaggtgctgctggttcagtttgaaaaaacgattggatgcagcaatcaaaattcccccacaggtgcccacggaaggcagaaatgcagcattgctggctaactctgtcccgactgtttcaactagcaggctatgtgtccaggcactaatttttgtctcttgtagacagacaattgttgcaccagtagatagcacttgatttcgcacagatgctcgtttagcaccatcattcaaacctctcacattccaacacagcagattgcaatccttagtcgacatgttggttcaaacccactacttcttccatacaacgttcataattcaaattacatgtctcaggagcaccaaaggagagggccgaaggcaacactgccagcaggtcccaagtcaagcacatacaaattcttcgccgaaggctccacggccagtaggcacgaaaacaagcttgccgaaggctccaaggccagcaggcaagtaaacaaccaaaacaaactcttaatagatttaggccacacttggcgtagactaatacaaaatgaaagcatgggcacatcacccaggatcccttatcaatctgggctatcattgaacttgggcaactgaagtctggaaactaggccctctgtcccagctccgtagcatcgtcggtctggttgtttttcttcaccaggatagcagcaccatgttcgatgaggtcctggatggcgtccatcttgatcttttcaatcggcctcgcaaaatgctgcgcatacaaatcaaattcgtcagggatagaagtattgacccctgcattgttatcacccgcgaggtcgcccagtttcttaactaacaaatcttgtgctatctcgattgccccttttccagaatttgtgatggccttttgggctaagcgggaactgtgtcgtttggggggtgggttagggtcattgttgacagcgttatgtcgtggtctctgagtgatcaaaggttggggaagtggtttggagatggagtcaaggaagtcttctataggggtctgccgtggattaacccgtgtgtgacactcattcctatctgaatgtgtgaaagtgttttgttcaggtggtatatgaaccggtgacctaggttgaacgttatttgtcggttcctcacactcattcctatctgaatgagtgaaagtattttgcacaggtgggctcaccgtgatattgtggagatgccccagtacagtccccagttcgacaaaagcctcctctcttgtcattcccatgtccttctctgcatgggccatagtagatggatcaggtatcgtacaatcagtgttgacatttgccatatgacattcagcaacagtaagaggagagttaagaggcattgagttcatgatttcctcacttggaaggatgttgctgcggtccctgtttgcaatcttgtactgcaccttttctgtcagcatcacgggggagttgttgactgcgaagccttccttttctccttccatcttcttgctgcagttcaggatggcgccgttggccactgcaaatggggtgttccacctttcacaatcaactaccaggggattagagtcaacaaaataggatgggaagggaggggtacccttgatgagcattatgctgtcgtctctaattggacgcatggggggctgcagctcagttgcaataggatctgcaaaagagaccctttttggcgccttctcctttttttgttcctttaccttccacaccagagccggctcctggtgtgcccttgctaatgatctgttcctccttgggggtgatccgtcacgaccacgccatctgttggagctaaggcagtcctcagccccacccctgcagcgggaatttcttgcccaggcagaaaggctgcgatggcgacggttacccagattgcgcctgtcgtcgtagtcgtcgtcgtcccgacgcggcctcatgtcacggccacggtcatgaccagcacgtctcccctgaagacgctcccccttcgtgtccggcacaccatagtcccagtcaaagacacggcgcgccctgcgatttgcagggccacctagccttcctggatcctggaggaaggtgaggtccttcaccacctccagatggttgcacagggtgtagacttggcttcgcttgacgtcgacaggctcatcacggtgtggatggtctctgtccggctcggtgactgtgagctgaacctccgtgggtatgtcacacgggtcgctgcaccaggcccataggtcaaaggacctggtgcgctggcgcctccgggtggtctcctccaggtagtgaatcgcacagctcttgccgagcactttcgctgctacatctttagcccagcagtgaaccgggacaccttcaatgcggactttgacgcggaactcccagctgatgttgttggcgtagcgacgctcgctccaagccgcgaactggaagcgtcggccgttgtcagggaggacgcccacgtccaccacccgttgcctgtccctagggttgttgaagatggctaggaactgctcggggaagtgcttgagcacctggacgtcgccacgatggatgtcaagttggcggagcgcagtctcgaggtggtgcggctccgtgtcatggctgttgccagggagccagcacactgccgccctgttgatgagctcgtctcgacgcctacggatgtctccggtggccgacacagcacagaagccgcgtgccggcctggcccgtgggtctcctggatagcgagccgccgccatacctccctccttgcttttctcccctctcaccacctccgcaaaggaacggtggtcgatctgcaacccgatgtggtctgagttttgtttgtgggtgtgggtgaagctttggtcctgttggtactccctcttataatgtatgcgtcgtggggtggaggaacactccttggctctatgcccaaaatggaagcacttccagcatctcggaggccggtggcaggagggggcaatatgattcgatgacaagcaattaaaacatcgacctgccatcttgctcttaaagaagactgaaccagttgctctatctctggcttggtgtctgacctggggaggagattgctcaggatctctccttcttcgacggtgtgtcttagctggttcccaatcttcctccgtatccaaggtgtaattgctcggggctgtgttaatgccactattgggttgctcgccatgactgctctctcccatcaacacccttttccctttctgattttctaggattctgccttggaggaggacgcattgaagcatcaaatcttcatggagattcctggctgaagcctctggatatgcgtgaactctgcttgaatgagggttgatggttgagctgctctccgtagtaattgcgcctggtctcttcactgtcctgtgcgcgtgcagatctgtaaccaggtcggggagcaatgcctgggcctgttcctgaatcaccgggtcaattgaggttgggctcgaaggtacttcaatgccgtagaggcttgggaactcctgttctccctgattgggcaggggcagaggcatggtgccgatgagcattgaatgcgtctgggtctgaaggacctcctcctcgccgcagactaatcgatgtagaggttcagctttcctggtgagaggtgaaggcatctgcgctccaatggaagccggcgttgattccaccgtgctcgtcccatctttcccggcgagcattgaagtcctgttgtccctgtcgtcggatgccgaacgtacctgcgcgtcgcagaccaagttgtgcaaagcagtcatgcgctcggtagaagaagcaggcacctggtttatcacccgtagctccaccataggcccctcaggtacgatgtggtgtgtcgtcggcggcgaacggacacccgccggtgacatggaaatggccccgagcgaggtgtggccgggctgagcccccctcggcgacccatcagggaatagatccacctcaggcggagctggatctgaagttgaatggaggaggggcgcagaggaagggacggatctgacggggttgggtgactcggcggcggaggcgatgaggaagacggagagcgggtcagggggcgggtcggggtcctccatctcttcgttcatacacttgtctagtttcaccctttttggaattgtagatagcttttttgccctaagatatggcctgattcatcataaagctgctgttcttgtctgttggagccacttctacatctgaagtggtgtgtggatccaaattactcggtgattttatttcttaaatatatttttattaaggtagaagagtttggaaatggctggtgaaccaaccaccatccacgaggaggcctcaattactcggccaaaggacaaccctgagtgatttttaatttcatggacatgcgaaaacattgacgtgtccatgttgcataattgttgtgcatatgttcaatccctccatgggcattcattcatgttgtttccttgctttatactactatatggcaaaatccatctagaacggtggttgaattctataatactgatatctctttctatatatgtataatatggattatatgatcaatgcaatagttcttattagcccttga

SEQ ID NO: 4696 - DNA, 2832 bp, Sorghum bicolor
ggtttctatttgatcgtgtctagttggtttctatttgagactttaatgaacctgaaacattgatcttcattgcacaaagtatatttgagttcatgcatcattcacacttttttgagcagaatagcatgctatggcactagttgtgctatgtgaaacccactaccttttgcaatccattgaggcgcaataatttgatatgcatgtatgctaatatgttgatccatctagaatgggaatgcaatttcacgtgccctagtgttgaagtctgtcatgttatctttgggcatgacatgtcttactgctgaacacacgttatctctatatgtgttcatcttgcggagagaattgatgccctcaagaaatgcaactttcatgttcattccacaagccattttgagcaagtgaaagagtaatttaatttatgttcagcaccaattatgccatattttgtacttattccttctgagtaatttatgtattatgacgtctgaatgtaataatacatagtcattttacacttattcctatagagtgattatattttagtactaacttgctttttgtatgatttggtgatatttataaattatacgtgagtaaagtagttcattaatttaatgttatcgttctcatttttctaaaaaataaaccttgcaggtctgccactgggcctagtgtgctgttgtagccagcaggcttgcagcaagcggaccgcaacggtggcttgcaggtgtctgcacaccggcccacatgtttgcgtcaacctgtgattcatggtgagctaatccaaaaaaaaaaaaaaacgagtctcggtgcgccgagcgcagaacgcggtgaagtcacgagcgcacgagaccgttggttgcgccggcccacgacgccgggagccagaggtaacgagaaaacgacgacgctgtgtgccgtcgcagccgacggagttttttcgtgctgaatccacccaacgtcccagcacgagcggcgcgttcacacttcacacccagagttcgttccagttccaggttgttgttacttctgtgatgatcaaacgtaaaaactagcagcaccggccaataggaaggaacccccgaggaatctcaccttgtttacccaatgtttcggttgggaaaatggattctttgcccaggcttaaacctaacctcacggatccgccgaaagtctcacaggaccagtgtacgcgcttcctttcatcttaaagaagaagaagcatcgaccactgcctttttcgtttttcttccagaaagaagagcaattttctcgttaaacagaacctagaactagaaggctagaaaggacaacaattggcctggggcaattagcacggactggcaaacgggccccataaagctccagccatgcgtcagacccacatgccagtcacatgtacctcagcacacactcatcactcgatggctagaggcttgtttagttcaccctgacaagcaaaaagttttcaagattctccgtcacatcgaatcttgtggcacatgcatgaaacattaaatgtagacgaaaacaaaaactaattacacagtttaactgtaaatcacgagacaaatcttttgattctagttagtctatgaatatttgtcacaaacaaacgaaaatgttacagtaccgaaaacttttcacttttcggaactaaacatggcctacgttaggcaattccacacagactgtttcgcatcgcaccctccaatcgcgtgattcaaacgtcaaccgccgccccttgaccgttccctggaacgccgacgcggccgctggccagagtggccgcacaactcatttccagagctttacagatcagccccgagttcaccaccacaccgcaccgcgccgctacctttcgtttatatagtcctcctcgtcgcgatccagacgcgcgacaagtcagcaacgccgccgcctctcatttttccttctcatctttctcgagagcgcgagtgagaggaggaggagggcaaggaaggagtcgaggagagatgggcgggttcgatcagcaggtgaaggagcggaccaaggagctgaagcacctcaagaccgcggcggtgaagggcatcaaggccgccggcgagtcgtgcaagaaggcgtggagcaaggtcaggagcagcatcaagcgctaggcgcctaggcggcggcggcgtcgcgaggacttccgtggccgtggtggagatggatgggattgcagcgtgcgtggtttcctgagttgtggtagatttgggctttttggtttattttgttggatctatttatttgagcaacttgaaatacatgatgtgtgaacatcgtctgtatgtatgtacgtgaatgcatagtatttttctgctctcgtgttcgtcgtgatcctcttcatgctttttcttccggtggcggatttagttgttatttttgttaatttgttgtagcggatagatctttatttggctgccaagtgtgccaacgaactctcgggtctggatgttcatcgcgaaattttttacaaaaaatttctacgtcttcgcaaatgcaacgtagggtcggtccttgcttcctaaccggcaacattgaaacaatctgcgctaaaatttaattattatgttttccaaaaaaaaacttatactaaggaaaaaccgaacattgatgtgtcacgttcacgaatgatcgcacccaccggtcttgctccaaagtccaaaatcatatcaagcgaacacaaaaacacgtaagggatcggcgtcctaagttcggatctccaaagtccaaactcatcaagggaacacagaaacacgcaagggatcgggtgcttaggtgtcctaagttcgggtcatcaccatgata

SEQ ID NO: 4697 - DNA, 5316 bp, Sorghum bicolor
tcgatcacttgcagcacccgccgccgccgccggcgtgatacttttctttctcccccctcctttttctcgtggtgttgcacccagcaggccagcacccgtgagcattttccggggggctggtgtgtgtgtgtgcgcacacggatggggaggagcggccgtggcggcatgtcgacggcgacgctgctgggggtctccttcctctgcgtgcttgtcatcgggaactctgaatctgcctcggatgacggtattgctgctcctctctcctgtgttctgtgtgctgaccttcagctatactcctacctacttggtgacaagttgatagccgctgactgctctgttcttgcgttgcgtttgccagtatctgcgcttcttgcgttcaagagagccatctacgaggaccctctgtccaagctgtcggattggaactccaaggacaaggatccctgcgcctggtccggtgtggggtgctcgccgttcaacaaccgcgtggtcacgctgtaagaatcacaagaactggccgccctctttttgatccctcatctgtttttttcctttctcgcattgcttaaggtcacatgattctaagcaaaagaattctgagattctcgttttacaagtgctttgtctgttgaagcatattcttggcctcccctgtctatttgtccaaatagcatgcatggttcattagctcagatgaagaagaagagaaggttgctaaccatatgcgaaatgtgatattccggcctattttagagcttgctcaaatggataacggacaattatgcactgtggttgaaattatacacttgttggtggtagaaatctctgcagcaatggcagaatgatgcatgttctcccacagttaaagtggacaaagtttctgacaccagataaggcacccagctggaagctatcattcaactttatctattcctgtcttcagttgacttaacaagcatccacaatatttctccaattctcctcctaaaaaaacatgcacatatatagttttgtggtccgtccggaaggcaaatcctcaactagtatttttaagattttatgctgaaagaacaaaacaatgacaaatgttatttctccaaattcagatagggattttgttgtttgaacaagaacctaactactttttttctctgttgatgaacgtcctgttctcatataattaagtgtttgttattttcactgtatagtgagctgtcaaattcatctctccaaggatttttggcaccacagatcggatccctaagatctttgcaaactctgtgagtgttaccactccataactccaattttaatttcacccaaaaataatatcaactgatagtcttggggaacttcttgcagcatgctggatcacaatacattcgtgggctcaataccaaaagacatcggcatgctaaagaatctgattgagctgaaccttagctccaaccaacttgcagggcctatacccagtgagattggtgacatggcaaagatcacgaaaatgtacaagaagagctagagatcaacttgtgttattctcggcattacttcaattttataactcatctgttctcttatgccctagagaccttcatgcaaatcggttggatggcactatccctcctgagcttggcaagttgggaagcctccttgagctacgtttgagtaataacagccttacaggcattattcctgcaagtaatgattcagacatgtaagtaactgtttttcagtgtcttcaaaactccaaaggttgttttcagtaagcatgtatttttctgtacaaaggaatcaaacaattagttaagaagttagcatcaatctgcttactgtgcaagcatgtaatttgaatttaattaaatatctggagacaagctgaatgagatatgaaacaatgatcaaactgtgaactccacaaccttaacagtactcttctattcagacatgaattggtatggcatatgaacaagcagttgtacctgtaatccttctttcaggggatctgtcaacagcaatgatcaaattggattgtgtcagctatctccgctaaccaatattgatctctcgtataactttttggttggagatattccttcatgcttacagcaaatccaaaggtacaccttcgccttttgtgacttaaaagtttcagttgtcttcctgcacttacctgttttacagtatttgaacagatcaagcttggtggggaattgcttccagaacaacacatcaaaccgtccactacagcaatgtatggtgatattttatattttaatttttcacatattatagtcactaatacagtttgttcctcctcttccttttgttttacaccccttgccttcgttatttgacaagtgcatatacatcgatggttgcaagatacaattattggttcctggtgaaaatccttgtgctgagcaaaatgaaaagttcacaaaaaatactttataaataacagattggtaaagcaatcctagttacagtttttttagtaagttactaaactacatattctgtgaactaccccattaggctagtctgagtaaagaagtccaaccctttgttcatccctagaagatgaacttggggtgcatttctgggctcgaggacatagtgcgatgttggaaacctaactataggctgttaaaatttatctgacacgtaacagaaaaagtaaccctagtcacatcgcttattgcgttgtcagtttcagatcactaagttacggatgattcgggacctgggatagtgtaaccttctatggttgttaaaataaaggcctgaacttgacactttgtttgcttctttgttggatccgatctcccacattctttcttttgtccttcgatttttagtgctccttttgttttggttcatgttaatagctccaccttgttttttaaagatgcccaaattgattttgtgtgtttttcatatgcttgttacatctgagcattacaatatgattcatacggtctatacatactgttaaactagaacgttccctgttactgtaatttgcttctctgaatagtgagcaagtgcactgcataattacaggtgatactaatcaggacagaggtgaagacaatggtgctgatgagaatgcgcagaaaggcctgccagagccactttggctattcattctggaagtcatcgcggcactttcattgctttgtttgttaacactttgtaccatgactggcctccgaaggtgcagaactagatcctctgggtccgggaccagtgttccatggacaagagctgtaagctggaaggagaataccgtaatctcaatcggtcagtgcctgcttttgttgcgagtgaccgaaagaactgaactttacactgttttgattacgggttgccttcaaaataaaatgaacaggcacgagaggtgcctatttatatattgataaagaagaaattgtgttgattaccagtttttgcttgtgtagatgatgacctcctggtaaatgtgccaaagataagccggcaagagctggcagaggcttgtgaagacttcagcaacataattggatcgtctcaggagacagttgtgtacaagggaactctgaaggatggccgggaaatcgctgttgtgtctctgactgtcccggtgcattactggaatgactatgtggaactttactttcagaaggaggcgagtgttcaccaactaaacccatattaagattttactgttgtataatcatatctcataatatgctcgaaatattcaggtgatagaaatgtccagactgagtcatgaaaatgttgcaaagatggtgggatactgcaaggaatctgatccattttcgagaatgctagtctttcagtatccacctaatgggacactctacgagcatctgcacggtaagtcaacaagctccatgcctccatgtatgcagtatggtagcatgaactcggtgcgtcatctgtttgcagatggagatgggtggcagctatcttggcctagacggatgaaattagcactggccatctcgcgggttctcagatacttgcacaccgagctgcaacctccatttgcagttgctgcactgacgtctagttcagtttacctaaccgaagacttctccccaaaggtctgtgtttgtatgtatgcactcctagacacactgctaaatcaagaacactagttgctggtagcatagcatcctgattcctgagcatgaggttccagtcttagttcatttcagataacaactggaactgaatgcggttttgcagataatcgatttcgagaggtggagatatcttgcgaccaaaccaggatttgcctcactgaatggcgagtctgtcaacagcattacagattctcggcataagcgcttcatggacgtccaggccaacacctatgctttcggcgtgatcctgctggagctcatcagtggcagagcctcggtttccaaagatacagggggcttagtggattgggtaactcctgaaccttcttgactcaagcggccatgacagcatgagtgatttcagactacctatatctgtgatcactgacaacgactgggcgtgttgcatgcaggcaagaaagcacctggagcagcccgaggagttcagcaagctggtggacccgaggctgcagagcgtgaaccaggagagcctgggcatcgtctgcaacgtggtgaacctgtgcatcgacccggagccgtcgcggcggccgtccatgagcatgatcgcggccatcctggaggaaggcatcgaggcgtcggcggccaccatgctcaggaattcgtctctggcctgggccgaagccgagctggccatctcctagatgccctttgctcgttttgctgcactcgctagactgtatagttgcttggacagtgatggtttgacccattgttactaggtttggcattgtaatgttttttttttcttttctggagggagaaaatggcagataaatctgaattaaaaatgactcaaatttgatttgatcagcacgaaaagcagtctcttttttatcctttcaaatacagagggagcattttctctttttttggggtagcattttcatttcctgagactctttatttccattgcatcggaggcccaaacgaatgcggcctacgaaccacggaggccgttgggcccaaatctccaacggcctaagaaaacagcccaaatttccttttcttttcttttctttttgatgagtgagaatataataagcgttggggaagggaatgaggaccttttgcggccgtcgccatggcggcgggaagagaaaccgacgaacagctgaccgagtatgagaagcagcggctgtcg

SEQ ID NO: 4698 - DNA, 4133 bp, Sorghum bicolor
gagtttcatcctcatgaaactctctatacttccataaagctcttatcacctttctattcattaatacggtgtcacatcagcatatttaatgtctatgaaacttcaatgaaactctattgagactagccttaaggccttgtttagttccccacctaaaaaatttttcaccaacacattattaactatttgaatacatgcatgaaatattaaatttagacgaaaaaactagtttggttgtaaatcgcgagtcgaatattttaagactaattagccataactgctacagtaacccacataagctaagaacagattaattagtcttaataaatttgtctcgcagtttctgaacgagccatgtaatttgttctttttattagtctattgtgacacccaaaaaatttcttttcgcgaactaaacaagtcatcagtagggttgaagctagaataaatttgagattggatgcgtttgcgtgcataaacttttactgtgtcaggatgcgtgtatgatgaaaaattaactagaattgttgttttttttcatttttacgtgagtgcgcccgcactctttattgtctatacagactcgccctcactattagcctacgtatatagtggacgtaatgattctcaccgtttctaacaaacatttagagttcatggaaaactaaaactactatctgattcttaattatatgacatttaggggtttcggaagatatttatttaattaagttcaatctctggagcaaataaaatgatttagactggttacatgaaagaagtactccctcaattcacatatacttgatgttcttttaaatcattcgtggcctctgaagctgttgtggttttggtcattatgttctacgaatatatatatctctagaaaacctaatagatttatacgagttatgtaagtagtcttctagacaaatataatctacacatatgatcttatgttttcgaatggcatgtttctaatagaataaataatatcatatctccgaggctatggatcgcaagtactctggtcacaaatttaatataaatataagtacatttagctaggtttatcctaataagtcagttgttaattatttacttttcacttttctgtctaaactttatatagattgacttcacaagattggtattaatagatttattgtgaaaaataaccgcataatgtatgatgataacatttctatatatttatatcatttatcaaaatatcatattagagatcgtgcattggaggaagtattgttcaaaataaatctatacatatgattttttatgttttaaactacatactccctccatacccgtaaagaaagccgtttaggacacaacgacacatcttcaaagactaactttgactccttatttttataaaaatatttatcaaacagtggtatacttttatgaaagtatttttcaagacaaatctattcatatggttttcacatttccaaactcaacaacttaaaatttattcatgatttatattcccaatgtttaactcaaaccttgtccaaaatgacttctttacgcgtaatagagagagtatctttttatggtaaacagagacgagatatatagtatatagtacccacctgagatgtattcatgtattccaatgaacggagcaaagtgctccaaaatatttagtaatagccaaagttgtaagattttgatgggacctacaaaaccacaagtgctttcaaatacttttaaactattatttatcactacaaaactaattaagggtcaagttttctaatcataaaaaaactttcgctgcttgtccaaatcttaatatacctgtacaagacggagtcatgcattcttaccatttaattattttgcctgagctagtacaatatagatatgtccacacatcacaagactagctctggctaaatgatagctttgccttgttaaccattgtgcagttaagtttgctcgacgtctacctgcataataacttggttcagaagatggacgctttcacacatgttcctcccggctttcgtttccaccctaccgatgaggaactcgttgattactaccttaggaaaaaggtagcaatgaagaagatagatttggatgttataaaagatgtggacttgtacaaaattgagccttgggatctgcaaggtacaacaatatgtacactcataacatgtgtggaataacatgcttcttgtgaagttatttgtgcttattcatgaagctcgacggttataagccgctaacccacttctatatatgatgatatgaaacagaaaaatgcaggattggagctgaagagcagaacgagtggtacttcttcagccacaaggacaagaagtacccaaccggcactcgcaccaacagagcgacgacggctggtttctggaaggccacagggagagacaagccgatctatgtgaagaactgcctcgtagggatgaggaagacactagttttctacaaaggccgagcgcccaacgggcagaagtcagactggatcatgcacgagtatcgcttggagaccaacgaaaatggaatcccacacgtaagatccccaggattgttcacctagtgtcatgtatgcatggtccatgttagcaccctatgcatgtgtgttagctattcaacacctgtctaacaaaagattgtatgtacgcatgtcattcaggaagaaggatgggttgtctgcagggtgttcaggaagcgactcgcgactgtccaaagaatggttggggactcaccttactggttcaacgaccacgcagggttcatgccaccggagctcggctcgccgaggcaggcggcacaccaccagcagagcgccatgatgtaccataggcaacagagcagctacccttgcaaggtggagctagagtaccaccacctccttccccaggagcacttcttgcagcagctccctccgctggagagccccaagctccctgaccttattggccaagtagatgctactctccagccatgcggccttacaccggagcatggtctcgttcgctacaccgtgcaagagctccaagccgagccgctctatctgacggctaggaatgtgtctggcacagattggcgagctctcgacaagttcgtggcgtcccagctcagcaacgacaccactctgaaggagtcaactagctactccaatccgacacaggtgtttcagcagtctgaggagaaagaggaggcattagactacgtgtcaacatcagcttcttgtggaggtgacaatgatttctggaaattataacgtcaacaacatatacatacatattcacatacatactaaatcactgaagtagtgcattattgcatcattacacatttaataacattgaggtgtgctggatgtaacatagccaaccgattcatgtgtcatggtagaatcgtatgtacataataaagtgtaaccaattaggctacagttccatgcataagttggcataatgtatgatgttaataagtaaggttagctaacagctaaagctaagggctttagccactaatctggcgattcgtgaagatttattatataggtaatgtgtcaaaggcagtaatgccttgtattgtcaatttgtccatgtttacaagtgcatcactactgtcattctattttaaaaagctaaatgtattgataccatgagaacaccccatgatgggagtagagccatccatggagagattacaagtgcctattgcacagaatagggtcgaatagctaaagctccataaaaagaaagacaaaggataatgattgcttgtctagtgtgtgcaactaagtgaaacacatgagtttaagtaccaccatgatcacaagagtctaaggtagccacaaccattcatagtgataaatgccgagcatctccaagagtttgctattgtttacttggcgaatcttgtgatttgccaactcctaaaataatatggagagtaaaaaaatagcccctctctaagagtttgctatttcgaacttggcaaaatgaaaaaaagaaggcccacaagatgtttttccccgggtcctactagattccacgtgcttcctctcctccccttcgtgcgaacgccgccgcattgtagcttcatcgatcggttccctgacgtcagaccta

SEQ ID NO: 4699 - DNA, 5394 bp, Sorghum bicolor
aatcccggttaagaacatcaaaaataatttaaatcctgcatattggtaacccctttattttagaggatcttaagtccgggttagtaacatcaaccgggactaaagggttgtaacatatgggttgtaatcccggttgagaacattaaaacccatcttggaaactcaaaaataatgtaaatcgtgcaaatcttcctcttgtgtgtgtgagattcgaaccaagacctcttgtgattatgtctcgcacgtatcttccttaccaactcaactgcacaccacatatgacaatgtcttggacactctccctttaaattcactcgtggggaatctttagtctccggtcgaagacttctaatctggtttggtgacttcattcgtgattaaaaggtcaccctttagttccagttagtgttaccaaccgggactaaaagttagaggatcttaagtccgggttagtaacatcaaccgggactaaagggtggtttttagtctcagctggtgttaccaaccgggactaaaggttcttaatgcaaaagtctgttgcactatccgttgggcaggagattctagtcttgattggtggttccaactagaactaaatctttattagttctgggctcaatttagagcaggactaaaagtgaagatcaaaaatctgttctagtgaaggaaacaaagatgcattttacttgatggaagaaaaaatcttcacattttccatttacctcttcaggtggaaacactgaataaacacctgttgtcaactgggaacgatgttaaaagaaggaaaaacgaaatgctatagcagaattaaaaaaaaatctgaatcggcgacctggctgctgtcaatcgctgagtcgcatacagacagggaatatttccggaccatgagttcatcatcaccaggagattgtggtctgggctagttttgtttcagttttattattttgggttgaaatcaaaacctgtgaccagaagcattaagatggcccaatagccttggcccactagcctatgaagaactagaacctcaccactaggcctaatagaacgtccacagcccaaggcgcaacaccgtttacttcgtcggcgagaccgcggcagtcgaagaagtaggagaggagagcaggaagagggtaagaatggcgggcgccacgagacgccgttcctacttcctccctcatccaagcgggagagggggactcggaacgcctagcgacgccgccgcggcgaggtgatggtttgtctgtgctcctctttgaatcagttgcgtggtataatagtttgctagtttggagcgcctaaggcaaaattgtcgcctgtcgggtacctgcatttacgctttcgctggggtgaggtatgatactgctcggtgttgtggatgttcattttgctcttctttgtgcggcgcaaagggtgttttcgtgtgagttggtaccacggttacgaaacaacctttatgttaatttgatcagacatcacagcgatatttaggtacagagccagaggggatgatctgcaaaactaggcagagctcccacgcaaagcatgctaagggagaaaatggttctgcttgtttcagagtgttgtaggtaataacagaccaaaatacatggctcacctgtgatttgattctttatatgcctttgcaaaactaacctaaactgccatgcttagtgtcaaaatttaaaattggttcggttgactgcaccagctgcatgacctatacaagagtcaagaggccttctcatattttcccaacggtactggaaacaggtaaagatctctgtaactatattgctgtcagttaaagaaaggcacatggaattcaggaagccctcattgcgtgcatttggtggttcagagatgagccagaccgttcctgatgtatcaggtgcatgcttcacttttagttccctctaattctcacctaacattcttttagataaatcatgttctcgcacttatataagcacatatgttcaagcatagaagttctgggaggtctcatacaatcattcagtgacactgttatggcttctctcaagccatctctagtgttctgctctattcttactcttctgagcttgaactgtggtccatctcatgtatttgccaaggtttatatggtggtgatggaggatgacccagtcatttcctacaaagtgaaccgcaagcatgtaatgtatgtgttttctgcacaggaataagttgaattatatcatctccgggtaatacaaattactaaagtattttattcaggagaggcgacgaagctcagaagtacaaacgggtggccacaacaaagcatgacagcttcctggactcatttctcccagtgggatcttacaagaaactatacagttacacgcacttgattaatggatttgctctccatgctgaatctgagaaggtgctttttcagactttatagtgcataacaatgcttttattattttctctgttatttgactatttgggctgggaaatgagggaactgttccacattgcttctattctcacttggcagagtagaatttccagacttgctctgtatttacaaactgaaacccatgaaagacatggagatgtcaaccatcaaatgcaaattcattggacttaaatttttgtactggctaggtgtttgcaagttttcttaaagagttgatgatgttattagttaatgttggttatttgtttctgttggaattaatagttgaatatttttatttgttatatgtgtaatagacagttagaattcttagtggtgcaaaaggagttagatttatccaagaagacatcaaaatggccaagatgaccacacatacaccaagttacattggagctagtgcagtatggccgctcctgggtggtgctgagaattccggtgatggggtggtgattggcatgattgataccgggattgaccctaagaacccaagctttgctatcagcaacacgtcaagccaagcaaaaccaccaccggctagtttcaaaggaatatgtcgtactggaaatagatttcctccagattcatgcagtggtaagatagtgggagctaggtggttcgcacgtgctgcccaagcgaccggggagttcaatgctactattcactatgaatctccttatgatccagatggtcatggcaggtttgtccaattctctattatatacgctgataactgtattaattcattttatcctcaaaatgcatcagcagctgatcataacaatatcttcacagccacaccgcatcgattgcagctgggaatttccatactccactaatatccagaggctacaactttgggtatgcaagcggcatggcccctggagctcggtgagttggactgaaagaacaatcctttttcagcatttcagatgttttttttggaagatagcatttcagatgttgaaacttgaaagccaagaagggtagtagtgtatataatcttacgctttgttgattgccctttcagtcttgcaatctacaaagctgcctatcctttcggtggatacatgtcagatgtgattgctgcagtcgaccaggttcttagatatactctacagaaagctgctatcgttcaatctgtatgctaaactgtgttacttgtatgtaggcagtagaggatggggtccatgttataagtctttctatggctccttcttcagtttcacctgggccagcatctttcctcaatttgcttgaggcacaactgctccttgccactaaggctggagtgtcagttgttcaggccgttggcaatgcaggacccgatgcaaacacagtcgtctcattcagcccatggatattaagtgttgctgcttcaacgacagaccggaagtatagaaaatcaatcataattggcaatgggaaagtattttcttgcggtgccctttcaggtaattcatttcaacctatcttggtcgttgatcaataatttgtagcattttgccaatttgttagcgtaatgccttcagtatttccttatggtgggggtctggggaatgtaatttctagacagccttacccttgcataactgtacctgatcttggataggacaaattcaagtagatctaatgattgaccatatcacaatgtgcctatgtttgaatacttcactcgattccaaatttgttttaaccccttgcctgtcttgccagcaccaacaccaggtgaaacaatgtacccactagcatgggctgatgatgtggtcaatgagaattcatctgatgggtctgttaattgccaagatccaaggatgttcatcagacctcttgtccagggaaaggtgattatttgcatgttcgactcatcaaactactatgaagacgaccccgaccttgctagtgtcattgatacgattgagagaattggagctgctggggtcatcatcactgaccgttcttcgggtgacatcgacattgattttgagcctacatttcccacgacagtcccttccgccatagttctgaggggttccgacatgcgagtacgttcctgaccaagctgaaatatcttaagagaatgcactacagctttgttttgatcgaaacgcaagattctgatttcactagctaggaattttttgcctgatcgcaattttcgtttgctactgtgtgcaggctctgtttaggtactataacaacaacacggttcgagatgaacatggaaatgtggtcagcttcggagcgactgtacggattacggagggacggcgtgcaagctattcgggagaagcaccagtggtggccgactactcctcgagggggccggacgtggagaacgcacagatgcagccggcggagggtgaaaacccagcgtcagggctccggggaattttatttggggagcacgatcccggcgaccgacgacctgccggagatccagggtgagaagtacgcgcttctgtccggccaagagcatgacggccccgcacgtcgccggggtggcggccctgatcaagcagaggcacccgacgtggagccccgccatggtgatgtcggcgatcatgacgaccgcggacgtgacggaccgctcgggccggccgctgacggcgaggagtcgacgacgggtccgtggaccccgcgacgccgttcgacatgggcgcgggcgccgtgaacgcggcgcgcgcgctggaccccggcctggtgttcgacgccgggtacagcgactacctccggttcctgtgcgcggtgcccggcgtggacaacgccgcggtgctgcgcgcggtgggcgcgccgtgccctcccccgccgtcgccgcgtgcgggggcgggggcggcgcggtggtgcacggacctgaacgcggcgagcgtgacggtggcgagcctgctgggttcgcggcgcgtggaccggcgggtgacgagcgtgggcgcgcagaacgagacgtacat

SEQ ID NO: 4700 - DNA, 3769 bp, Sorghum bicolor
  misc_feature (1)..(1682): n is a, c, g, or t
nnnnnnnnnnnnnnnnnnnnnnnnnnnnnnnnnnnnnnnnnnnnnnnnnnnnnnnnnnnnnnnnnnnnnnnnnnnnnnnnnnnnnnnnnnnnnnnnnnnnnnnnnnnnnnnnnnnnnnnnnnnnnnnnnnnnnnnnnnnnnnnnnnnnnnnnnnnnnnnnnnnnnnnnnnnnnnnnnnnnnnnnnnnnnnnnnnnnnnnnnnnnnnnnnnnnnnnnnnnnnnnnnnnnnnnnnnnnnnnnnnnnnnnnnnnnnnnnnnnnnnnnnnnnnnnnnnnnnnnnnnnnnnnnnnnnnnnnnnnnnnnnnnnnnnnnnnnnnnnnnnnnnnnnnnnnnnnnnnnnnnnnnnnnnnnnnnnnnnnnnnnnnnnnnnnnnnnnnnnnnnnnnnnnnnnnnnnnnnnnnnnnnnnnnnnnnnnnnnnnnnnnnnnnnnnnnnnnnnnnnnnnnnnnnnnnnnnnnnnnnnnnnnnnnnnnnnnnnnnnnnnnnnnnnnnnnnnnnnnnnnnnnnnnnnnnnnnnnnnnnnnnnnnnnnnnnnnnnnnnnnnnnnnnnnnnnnnnnnnnnnnnnnnnnnnnnnnnnnnnnnnnnnnnnnnnnnnnnnnnnnnnnnnnnnnnnnnnnnnnnnnnnnnnnnnnnnnnnnnnnnnnnnnnnnnnnnnnnnnnnnnnnnnnnnnnnnnnnnnnnnnnnnnnnnnnnnnnnnnnnnnnnnnnnnnnnnnnnnnnnnnnnnnnnnnnnnnnnnnnnnnnnnnnnnnnnnnnnnnnnnnnnnnnnnnnnnnnnnnnnnnnnnnnnnnnnnnnnnnnnnnnnnnnnnnnnnnnnnnnnnnnnnnnnnnnnnnnnnnnnnnnnnnnnnnnnnnnnnnnnnnnnnnnnnnnnnnnnnnnnnnnnnnnnnnnnnnnnnnnnnnnnnnnnnnnnnnnnnnnnnnnnnnnnnnnnnnnnnnnnnnnnnnnnnnnnnnnnnnnnnnnnnnnnnnnnnnnnnnnnnnnnnnnnnnnnnnnnnnnnnnnnnnnnnnnnnnnnnnnnnnnnnnnnnnnnnnnnnnnnnnnnnnnnnnnnnnnnnnnnnnnnnnnnnnnnnnnnnnnnnnnnnnnnnnnnnnnnnnnnnnnnnnnnnnnnnnnnnnnnnnnnnnnnnnnnnnnnnnnnnnnnnnnnnnnnnnnnnnnnnnnnnnnnnnnnnnnnnnnnnnnnnnnnnnnnnnnnnnnnnnnnnnnnnnnnnnnnnnnnnnnnnnnnnnnnnnnnnnnnnnnnnnnnnnnnnnnnnnnnnnnnnnnnnnnnnnnnnnnnnnnnnnnnnnnnnnnnnnnnnnnnnnnnnnnnnnnnnnnnnnnnnnnnnnnnnnnnnnnnnnnnnnnnnnnnnnnnnnnnnnnnnnnnnnnnnnnnnnnnnnnnnnnnnnnnnnnnnnnnnnnnnnnnnnnnnnnnnnnnnnnnnnnnnnnnnnnnnnnnnnnnnnnnnnnnnnnnnnnnnnnnnnnnnnnnnnnnnnnnnnnnnnnnnnnnnnnnnnnnnnnnnnnnnnnnnnnnnnnnnnnnnnnnnnnnnnnnnnnnnnnnnnnnnnnnnnnnnnnnnnnnnnnnnnnnnnnnnnnnnnnnnnnnnnnnnnnnnnnnnnnnnnnnnnnnnnnnnnnnnnnnnnnnnnnnnnnnnnnnnnnnnnnnnnnnnnnnnnnnnnnnnnnnnnnnnnnnnnnnnaaagaaaaaaacggccagaggcaggcagccaggacatccacgtcctccagctgcggttacacatttgctgcactatcatctttggcttcttgcttctcttttgggcacacaagcctgacactttatcattcatgaggtgtagtgtctgttggaatattgtagtgatgtgattctttcaatgtttgtagcgagttgatcttcgattttgatgctatctcatgcttaacgaaagttctgaaggaagcatcgccaaggttgcaagcaagagtctgttgtgtactagaccatgtagcagcttcagagcaacatgccacggcaatgactgctgcttgcactggttcagtaatcgaagctattcttgaaataggggttattcatggtaaatttttagttgacttttttgttggatctacaaatgtctacattatttcttttccttgtatcatttatgtatatcagaaaatagttatggtagtaaccttcgacaagagtttttatgcactaaaaagctttatagtagtgccctgacttgacatgaattactatacatatcgttaagatgttgagtatgttagagtattaaattaatgtatttgtttgaagtgtaaaaatagcctattaataatgtattaatcgccaaaaaagtaattgatcaaccagaaaacatcaagatttgttggggtctattggtctgtagcaaaaaatggaataatgaacataaactttgttttcatatcaaccatattacattaggttcattttttatccatgcacatcaactttaacgttaatcaagtctgaattttggtactatatcatttctaccctaatggaaatatatgttctgttccatagttctttgtttcactgccataatttagtaagatctttcagtcaattctatatcgttgtcatccctgcataaattttcctggaatgatggtgccttttggtgcttataaggttgtattataggtaacaatataacatgacattacaataatgatgcaaatatgcttgtcatgtatagtgttagccaagaatggtgctaatgaatcagtttttgtggaatttccttcaacaaaatattatgatttagtagcattctgagatatcacaatttgctgtcattttctgctagttttccatctcagaagccttgaaatgctgctatattgatataatcttcatctctaaaatttctttatgtttctcttcataatagggaccagaagtgactctgaaaactttgatgaaactcctagtgcagtcatcgaagaactcagtgaggctgtgtctgcagctgtgaggttactcacgaaattattgaactttgatcttttcatccgcagcataaacagtgaaaaaatcacttctctgctaagaagaatgctcaagtcaagtttcccccttcagtcaaaggattgtcttgcagcatgcctcattaagctagaatccagagctggcttatcaggagatcatggtgtcagtaatatagatatggagataattatctatcagactattccacggctagttgagcaaatgatgacctcacattctcttgaaataagagaagtgctgtaatagagctcaataagataatatctggtggtgtgctggaatatacaagagcattggctgatggtggaggcatatttccactggtcaaaatgcttgaagagggggatggagatgcactcgaagctaccttagctatcttgtataatctgagcatggatccagagaatcacccagcaataattgctgctggagcagtgcccctgttgaagcggattgttcttgcagaaggcccacaatggaatagtgctattcagctgttgagaacattgcctgtatgacattgctgaagaaaatgaccattcatcgtcaacacacattttaaaccacacttagtgcatgcacaggtacattgttaagatcttcatcagtgtctacactaccagtttgttccaaatgcctctgcaattgcgatactttgatgttgttaaacacaaaggctgctagtcattttatcacttttatatggataccttctctcttaatattacaatggtagatgataa

SEQ ID NO: 4701 - DNA, 5153 bp, Sorghum bicolor
  misc_feature (1)..(1682): n is a, c, g, or t
nnnnnnnnnnnnnnnnnnnnnnnnnnnnnnnnnnnnnnnnnnnnnnnnnnnnnnnnnnnnnnnnnnnnnnnnnnnnnnnnnnnnnnnnnnnnnnnnnnnnnnnnnnnnnnnnnnnnnnnnnnnnnnnnnnnnnnnnnnnnnnnnnnnnnnnnnnnnnnnnnnnnnnnnnnnnnnnnnnnnnnnnnnnnnnnnnnnnnnnnnnnnnnnnnnnnnnnnnnnnnnnnnnnnnnnnnnnnnnnnnnnnnnnnnnnnnnnnnnnnnnnnnnnnnnnnnnnnnnnnnnnnnnnnnnnnnnnnnnnnnnnnnnnnnnnnnnnnnnnnnnnnnnnnnnnnnnnnnnnnnnnnnnnnnnnnnnnnnnnnnnnnnnnnnnnnnnnnnnnnnnnnnnnnnnnnnnnnnnnnnnnnnnnnnnnnnnnnnnnnnnnnnnnnnnnnnnnnnnnnnnnnnnnnnnnnnnnnnnnnnnnnnnnnnnnnnnnnnnnnnnnnnnnnnnnnnnnnnnnnnnnnnnnnnnnnnnnnnnnnnnnnnnnnnnnnnnnnnnnnnnnnnnnnnnnnnnnnnnnnnnnnnnnnnnnnnnnnnnnnnnnnnnnnnnnnnnnnnnnnnnnnnnnnnnnnnnnnnnnnnnnnnnnnnnnnnnnnnnnnnnnnnnnnnnnnnnnnnnnnnnnnnnnnnnnnnnnnnnnnnnnnnnnnnnnnnnnnnnnnnnnnnnnnnnnnnnnnnnnnnnnnnnnnnnnnnnnnnnnnnnnnnnnnnnnnnnnnnnnnnnnnnnnnnnnnnnnnnnnnnnnnnnnnnnnnnnnnnnnnnnnnnnnnnnnnnnnnnnnnnnnnnnnnnnnnnnnnnnnnnnnnnnnnnnnnnnnnnnnnnnnnnnnnnnnnnnnnnnnnnnnnnnnnnnnnnnnnnnnnnnnnnnnnnnnnnnnnnnnnnnnnnnnnnnnnnnnnnnnnnnnnnnnnnnnnnnnnnnnnnnnnnnnnnnnnnnnnnnnnnnnnnnnnnnnnnnnnnnnnnnnnnnnnnnnnnnnnnnnnnnnnnnnnnnnnnnnnnnnnnnnnnnnnnnnnnnnnnnnnnnnnnnnnnnnnnnnnnnnnnnnnnnnnnnnnnnnnnnnnnnnnnnnnnnnnnnnnnnnnnnnnnnnnnnnnnnnnnnnnnnnnnnnnnnnnnnnnnnnnnnnnnnnnnnnnnnnnnnnnnnnnnnnnnnnnnnnnnnnnnnnnnnnnnnnnnnnnnnnnnnnnnnnnnnnnnnnnnnnnnnnnnnnnnnnnnnnnnnnnnnnnnnnnnnnnnnnnnnnnnnnnnnnnnnnnnnnnnnnnnnnnnnnnnnnnnnnnnnnnnnnnnnnnnnnnnnnnnnnnnnnnnnnnnnnnnnnnnnnnnnnnnnnnnnnnnnnnnnnnnnnnnnnnnnnnnnnnnnnnnnnnnnnnnnnnnnnnnnnnnnnnnnnnnnnnnnnnnnnnnnnnnnnnnnnnnnnnnnnnnnnnnnnnnnnnnnnnnnnnnnnnnnnnnnnnnnnnnnnnnnnnnnnnnnnnnnnnnnnnnnnnnnnnnnnnnnnnnnnnnnnnnnnnnnnnnnnnnnnnnnnnnnnnnnnnnnnnnnnnnnnnnnnnnnnnnnnnnnnnnnnnnnnnnnnnnnnnnnnnnnnnnnnnnnnnnnnnnnnnnnnnnnnnnnnnnnnnnnnnnnnnnnnnnnnnnnnnnnnnnnaaagaaaaaaacggccagaggcaggcagccaggacatccacgtcctccagctgcggttacacatttgctgcactatcatctttggcttcttgcttctcttttgggcacacaagcctgacactttatcattcatgaggtgtagtgtctgttggaatattgtagtgatgtgattctttcaatgtttgtagcgagttgatcttcgattttgatgctatctcatgcttaacgaaagttctgaaggaagcatcgccaaggttgcaagcaagagtctgttgtgtactagaccatgtagcagcttcagagcaacatgccacggcaatgactgctgcttgcactggttcagtaatcgaagctattcttgaaataggggttattcatggtaaatttttagttgacttttttgttggatctacaaatgtctacattatttcttttccttgtatcatttatgtatatcagaaaatagttatggtagtaaccttcgacaagagtttttatgcactaaaaagctttatagtagtgccctgacttgacatgaattactatacatatcgttaagatgttgagtatgttagagtattaaattaatgtatttgtttgaagtgtaaaaatagcctattaataatgtattaatcgccaaaaaagtaattgatcaaccagaaaacatcaagatttgttggggtctattggtctgtagcaaaaaatggaataatgaacataaactttgttttcatatcaaccatattacattaggttcattttttatccatgcacatcaactttaacgttaatcaagtctgaattttggtactatatcatttctaccctaatggaaatatatgttctgttccatagttctttgtttcactgccataatttagtaagatctttcagtcaattctatatcgttgtcatccctgcataaattttcctggaatgatggtgccttttggtgcttataaggttgtattataggtaacaatataacatgacattacaataatgatgcaaatatgcttgtcatgtatagtgttagccaagaatggtgctaatgaatcagtttttgtggaatttccttcaacaaaatattatgatttagtagcattctgagatatcacaatttgctgtcattttctgctagttttccatctcagaagccttgaaatgctgctatattgatataatcttcatctctaaaatttctttatgtttctcttcataatagggaccagaagtgactctgaaaactttgatgaaactcctagtgcagtcatcgaagaactcagtgaggctgtgtctgcagctgtgaggttactcacgaaattattgaactttgatcttttcatccgcagcataaacagtgaaaaaatcacttctctgctaagaagaatgctcaagtcaagtttcccccttcagtcaaaggattgtcttgcagcatgcctcattaagctagaatccagagctggcttatcaggagatcatggtgtcagtaatatagatatggagataattatctatcagactattccacggctagttgagcaaatgatgacctcacattctcttgaaataagagaagtgctgtaatagagctcaataagataatatctggtggtgtgctggaatatacaagagcattggctgatggtggaggcatatttccactggtcaaaatgcttgaagagggggatggagatgcactcgaagctaccttagctatcttgtataatctgagcatggatccagagaatcacccagcaataattgctgctggagcagtgcccctgttgaagcggattgttcttgcagaaggcccacaatggaatagtgctattcagctgttgagaacattgcctgtatgacattgctgaagaaaatgaccattcatcgtcaacacacattttaaaccacacttagtgcatgcacaggtacattgttaagatcttcatcagtgtctacactaccagtttgttccaaatgcctctgcaattgcgatactttgatgttgttaaacacaaaggctgctagtcattttatcacttttatatggataccttctctcttaatattacaatggtagatgataaccataatttgagtacatatttggacaatgatacaatgttttattgcctttcttggatgtctaggagacagagaattgacgcaaaataaacttcaattagtacccacaggactactagctgctttaggaattttctggaataaataaaaaaagtgaagtcaaaatcatctaatgtaacttattatcttaattgcagttgcacattgcttaatttagcatatatgtaattaaggattggcaattagagcacacatgaacagaacatgtgaaggttctaataaaagaatttgttttctggtcctccttgacgagtcaatgatgatcagagcatagggaggcataatattattttcaaacaaacttttggtggatacacaggtattgttgactgaagaaccgatgcagaaaatgtcttcgaaaaagtctggattgttttaacctgttcctgaatacaacactaacaataatgagatcctttactaaatatgattttcttttgcagctaacttcttagattgaggtcgccgctgaacctagctccagctccctatcatcatcttgaatttatgacctggaactcaaagaaagtatcagcaaggacatttcctccgaagtagcaatatacgctgcccttttggctagttgaaaagcacaccggggcctgatatatgatgtcccctgatgtatgatgtctttttgctcacatgcgacggccatagatagtaccatgaactgttttggacactggcagtttgctggttgagaccttggaaagttcaaagttgtagctaggtgactttgctctgtaagaaatggggatccgatcctttttgtataacctagagctgaactagtgaactatcctgcctagcgcaacaaaattacagtaaactgacgtatactcattgattggggacttgactacttgagccaccagaatcatagtcattgcaggcggatcctcttgtgatcgacgtgtccggatgcaagcaggcttgcagacagaccaacccaaacgacaaatcgtgcagaggggaaaactaattttccgggaattgaaatgttattatcttgggacaggagcgacgaccctgagtgataactgacaagtcgctgacgatctcacgccgtgccggtgaggcgtgagcggtgaaccagacaaccagtggcgcaggctttgcagaggtcggaccggacgaccacgacgactgcctgattgggaatttggatgcatctcgactcgcaagaggatgcatccaaagcaaacgaacggcctcatcacgggcatctggactcgtccgacgtttggattggtttggagactcgattcatcccgaatggactagtccgacgtttttcagccagagagtacctcgctgttactc

SEQ ID NO: 4702 - DNA, 3720 bp, Sorghum bicolor
tagttagtccatggttgaacaataattaacacaaacaaacaaaaatactacagtgtcgcggaacttttcccttcagaaactaaacacggcctcggtgtatgttattgtgcacgattcatttttgtctgctgagtgtgtcgcttaattagaaaggtggcgaaatggaaaattagtatggtatatgttgctaatacggtgcaatcacttcggtgaccgtatgatgccttcaccgaaaaactaaattttttcaagattctatatcacatcgaatcttgcggcatatacaatggagcattaaatatagatgaaaacacaaactaattgcacagtttgactgaaaatcacaagtcgaatcttttaaacctagttactccatgattggacaaggtttgtcaaataaaaacgaaagtgctacaatgttaaaattcaaaaaaaactggaactaaataaggcctcctgcagggcagatacagggtggcacgtacggttttactatttgtcgtgtacttgctctgttccaaaaagaatgtcaccatagggttcgtactggttattttttttaaatataactaggttcaaagaagtaaaagatatattaataatatttatatcttcaaaaaaattattataaaaatatatatttagtaatttattaatgatattaattatgcaccataaatgtcaatatcttcttatatatatttggttgaactttaaactatttaacttttcaaaaaataagagtgacatttttttatgaaacggaggaattagacagtataatgtaaatatagtaatacgtgctcaatgagtcatgcaactattcaaggaatgcaagatgttgtaggtaagagcatcctcaagatctttctttcaaaatcatcatttaaatagtcatttaaataaaataatattttttcatatttctattatgcacactctaaagagtcaatttagttctccatcttcaattaacgagaaattccaaatagagaatagcgatatttgaagatctaactaagagccttttaattaacgagaaattccaaatagagaatagaaatgcatattttggtgaaaaagaatacacaaaatagaaatggatattttgtgacaaaaatacactccaatgacttctttaaaatagatcttcaaatataataatcatttattccagatatctcgctaaccaaatatagagagtggaaatggttctttagagtgtgtacaggatgtagacaaattgttgaaggatgaaaaaaacaatttttattccaatagctctctaattttttcacgaacatgctttgcatgtctatcattaaggagaagcaagagttttacaacgattagtactggtcggcctaggatgtgagcaaccttgtaagtaagagcaaaaaaaaaaaaaagccaactagaacaactgttacatggcagagatagcagcacgataatcagcccatggcatggtctgatggaaatgactttctaaatgataattttagagattaagtttatgagaaagtcttggagatactctaatttaagaagttgtagggtattttcaaacaaaatttttattttttatcaataacaacgatataaaaagactcttagagttgttataagaatattataagtcgccaaatctctgggacagtgttgcactagcagtcagagagcgtgatcatctccgttacctaaggtgtcgtccgagattcggctccgttgacaaccatatgtgctcgctcgtctttcaatcatgcccgcacgtttgcctcaataatgcaatgcaataacagtaagtactgctgcgacatatttgctgccacgtttggaacttctaataagacattctatatataccacccgaaatgagctacagtctggcaaacaaactcgccatcaccataccaagcaccagctagaccttctatagtccattggccctcgtctcagctcgtctcctatagcgtatcacaaacaggagacgacgatcaatggcggctagtccgagcacattccgatttgctgccgtagtggccgtgctgtcgaccctgtcacttcttgcaagccctacctccggctacgagaacgccgagcccatggtgatcagggactcgccgcagaacgacaccagcaggaggtacctgtgggcgtcgtcggcgcgaggctacggctggtcctccggcggcgcgacgtggtacggcaacgctaacggcgccggcagcgacggtacgtagtaacagcagcacgtgctctgctcaatgcgcgggtgaaacttaatttagcgattagtggaaaacaaattgaccttttttccattcggtgatctctcttttgttttcctgcaaattaatggtaatctcttggttccattgttgtgtataatgcaggtggtgcttgtggttataaaggtgatgtcagccagcgcccattcaggtcgatgatcgcggccggcggcccttccctcttcaagaacggcaaaggatgcggcgcatgctaccaagtcagtatacacacacgtactatacgttgaccgtgagaggtgccacgcacgttctagctgtccatctactaactccgggtgtacgtacggcgactctgcagattaagtgcacgggcaacagagcctgctccggccggccagtgacggtcaccatcaccgactcctgccccggcggtgcgtgccttgccgagtcggcgcactttgacatgagcggcacggccttcggcgccatggccaaccgcggcatggctgaccgcctccgctccgccggaatcctcaagatccagtacaagaggtgattgttgctactcatagtagtaaccatgcatgcataatgcaagacgctgtggcgtgatacattgtcttggcttgtgcagggtgccctgcaagtacaacggcaggaccgtcaacttcaaggtggacgcggggtccaacccgtactacctcgccgtgctgatcgagtacgtggccggagacggcgagatctccgcggtggacatcatgcaagccggctacaactcgtggacgccgatgcagcagtcgtggggcgccgtgtggcgggtcaactcgaacaacggccagccgctccgcgtgcccttctcggtccgcatcacctcgggcgccggcaaggtcctcgtcgccaggaacgccatccccgccggatggagcgccgggaggacctaccgctccgcagtgaactttggctactgagccagtgtgcgggtagaagttgtttcttcggtcttgaatgaatttggtatgtgcgtccgggaaatgcgagaggccgcgctggaagaggaggttaggtatattcgtgcatgttgtgcatccccccacggtgtgtccggaaaaccgtggaagggtactccctccaaagacgaccacagtgtgttttcccttgtgatgtaatgatgtcttggtgtccttaatgcagaagcataactattggagtcacaatgggtccgtttggttctctggctatctcctaaccaggcttgctagagccaacttaagcttgtttagttgattgaacagatcccttagctaggcttgagcaagccacccaagaagcctttagcctggccctagaaaattggaggagttggacgtttttcaagaaccagcctggttgcgagtcacctcaccgcccgcggttgcgagttgaccgcatcgtcccgtcattcccttcctctcgctggtgctcgtccctg

SEQ ID NO: 4703 - DNA, 8708 bp, Sorghum bicolor
attgtcacggaactcttgttgaagggggaccagcaagtatagcctgcgactcctgcctcatctcccacccatctagtgtctggtccagcatctgagaagataactaccctttgttgtagctgatgtataagtgaaaaccaggcatcaaacatataattcatcttcttggcatcgccctttgcaccatctagccaaatttcctctagatctccatacctgcatatttgaaagcagaatctttaggttatcctaaatacagaaaatatataattgagtgtgcactatgatgagtcatgagtataaagtatatgaacgaatgctgcccaaatacgactatggaatctgcgatttacttctttttccaatatctctaagaatgcaaagtaatgcatgcagcaaaccgctaataaagatggaatagccacaagaaaagccaaagtttttctaagcaaccggcatcacagttaatcactgatggcttcaaaatcgaagatatcatcaaggaagtagaccagtcagctgctactgaaaatttctgcaactgaacattagtttccagttacacaaccacatcaagatcaaccttcacatcatctgcatcgcaaagttcaaaacttcggctgcaaaagcttcaatgacaatcataaagcaaccatcagcaaacctggtcagcagttccgtcatctgtcccaagtaatgctcgttgtacgcgatggtgtccccgtacaccggctcatggcggtcccacggcgagaggtacagccccagcccgatcccctccgcgcgcgcggctgcggcgaggtcggcgacgacgtccccagccccgccccgccacggcgaggcggccaccgagtagtcggtcagcgccgacggccagaggcagaaaccgtcgtggtgcttggccgtgagcacgacgcggccgaacccgccctgcgccgcgacgcgcgcccactggcccgcgtcgagtgccgagggggcgaacacggaggggtcggcgcggccggtgccccactcggagtccgtgaaggtattggggccgaagtggaggaagagcgccatctcggagagctgccaccggagctgcgcgtaagacgggacgggcaggaccgggagaggcggcggtgtcgcggccgaggacgcggtggcgccatgggcgcagaggagtaggtgggcgagcagcagaggaagaagtgctgccatttcgtcagaaaggggcgtgcagtgtgactttcagagtcaactgctatttctgtcatgaaaaaagaacggcaaggcaaagacatctcaagtttaatcaatattataaaaactattagaaaagtttataacataaaataaatattattataaaaatataactaataaaaaatctaataatattttgatagtatcataaaaattattatgttgttatataaatttagtcaaacttaaaatgttttaactctcaaagatttttgaaacgacttaaatcgaatttttggatatgtgtataaaaaaattaattatataatttatatattatttttgagaaatgtatcttaaagtttttcttttccggaactaaatgtctagccttgtttagattcgaaaagtttttagattttaatactataacactttcgtttttatttgacaaatattatctaattatagagtaactagacttaaaagattcgtctcacgatttacagctgtgcaattagttttttatttttatctatatttaatgcttcatgtatgtatcacaagatttgatgtgacgaaatttttttaaaaatttttagtttttgagtgaactaaacaaggtccaagttctcaaaattttctttcatttttgacgtcagagaaagtgaggtgaagacgtgaagtgcagtactggcgttcgagatcgaattcgacgctccgctcgttcgtggggcatacagacgaacacctcacggggacaaccaggccactcgctccgctttactccggaacggaagcttcccgcggaaagaatgtgctggtgcgcggccctcgtcgccggaggccggctgccaccgcccgccctcccctgccggctccgccgccgccgaaggagctccgtccgggcagaggtctcgccaggtggcgagtcccagcagaagaaggtcgccgtcgcgggcgccggctgggccggccttgccgccgcgcaccacctcatcaaacaggttggtctcgcgtgaattgtagctcgtgcattcgagaacttgtaagggtggcgactatgtgcaaatttatgaattacaacttgttctgatgatcaggggtacgatgtcacgcttctcgccgcagagagcggcccaaccgaggaggttggcctcagaggtatgacaaccttcagtatacgatatccgtttatatggttcattcaattccgtgccagctttgtttcagtaattcgctcatcgtgtcgctgcacataggattctggcatccgtaccgcaacatcttcgctttagtcgatgaactggggatttcgcctttcacgggctggaataaagcagcctactattctacagagggccttgctgtaatttctctgctttatttttgtgcgttaacatgcttctgtagtcctgtgcatgtgcgttgctgcaatggattatctaatgaatatactttttcaatttctttttggtggatttattattacttaaaaatgggtttagccaggaatttcttagtctgtagcaagtatcacattgttttgcatgggggctattgtgtctcgacttaagatcttctatatgctaaccccctcccgcctgaatcctgattaacttaaattgttatgatcaccttgcaggttgaatttcccatatttcataaccagccccgattaccagctccctttggagtctttgcatatccagaagtaagttgtccttagatcttatattggttatcagtttatcttattctaaattagtaataatagcctgaattatatttgcagttcccaaatcttcctttgattgataggctgacatcaattcctgtcatagctgcaggtactggtgttcaattgttaagcttctgttaaaaatcagctcacttgctaaccacttatgcgttgctttggtccagtcattgactttgacaacactgacactgcttggaggaaatatgatgcaagtaaggaagttccattgtctatccagttagttcagactagagtacgtgtcatttgcactacatgtcttcataaggagttatctttctcaaagtattgttggtatcttcctctgtagtgactgcaaaagaactttttaagatgtacggttgctctcaaaggctctacaaggaagtctttgagccagctattcaggctgccctgtttgctcctggcgagcaatgtagtgcagctgcaacactggggatgctgtactattatatgctgtctcatcaggttctatgctcttgtacattataaatgatcatttttctccagataatatcttattgtctctttgtaggtttagtttttataatgaatgccctatcttgcaggaaagttctgacttcttgctgtgccgtggtgaagtagaagaaaaaattctctctccttggctgcaatcattggagcttaaaggtttaaaatttgtagaaaacaaagttccaacaagtttgactacagatgcggatactggatgcatctctgctattgtctgtggtgactatgtatatgaggcagatgcatttgtttcagccatgggactctcttctctacaatccatcgtcaaaaacaggtaacatcatatatgggtcacgcatgagtcctgccattgcattaaaaaaacattcaagtaacattgccttaccttaccttactacattcaagtaatgtctatattggtttttgccagttttctatctaataaaccatgtgtctgtatggttttcgggcccgctttcccttataaaccgggtcaattccattatacttaattaaaaggcagagttcctgccattgcattaaaaaaacattcaagtaacattggaagtcaagaatggtaagaaaatataatcttgtagcacttaaaggagccataagtttcacaacctgaattctgcaattaatatatgtgcttttctgacatgaaaagtccgttcctacggtctgatcgggaattcaggaatcttcttcacttatctacactcgacgtgatctctgtaaaattatggtttgataaaaaggtaagccactatgcactctgtctgattactgtcacacattgtgtccctcaatatgattttatgaaatccatttacaggtcacaattccaaaggttgccaatgtatgttctggttttgatgattcgtctggctgggcattctttgacctaacctcaatacatgatgattataatgaagaatcaataacaattgtggaggctgaatttgtatgttctgtccacctttatcaatttggaaatatacatccttttcagccaggatttacttactcttgtaacttattttcccagtataatgctagccatttgatacttgtaaatgatgatgatattgtctctgaagcttcatcacatcttatcaaatgcatacaagattttgagggtgctattgtgataagatattcaatcagaagatctcctaattctgtaatcaactttcttccaggtaatgcttgaaggacgactattcttgatagcttcctttctatagtaataaaaaagttattgttaacagttttggatgattgataatgatactctagatcattccagtgcatattgtcagatgtaaattaatgctgtgaatctgtgataaggatcaaggatcataacaataaagtattatacttctgtagcatatgtacataccagtgcagagtgctagtttagaaatatgttgtttcagaggaatatttaatttgatacatggggaaatgcattacttgcaggctcctacaagtacacactgagaggatcaacttcctttccaaatttgtttattgctggtgattggattgtcaaccgacatgggtccttttctaaagtaaggcataacatttcaaaaagcgattcagagtgataataaaaagttgtatttatgggttcatattttcctatgctaggaaaaagcatatgtgactggacttgaagctgctaatagggtggtagactattttgacaccggggactttgccaaaataattgcaatcgaaggagatgagccccatatagagacattgcgtagtctcaacagaagagccaatgaactgaagtcacaaattccattctcagaattctttctccaataatttggttgggattttcctgtgtctgttgaccaatgcccactgttgtagggcccatatgtaaaaggtcagccagttctcattttatttgctttatatatttaacacaaaatactctcttcaattgacatgtatgtcatttagccttttcaactttcctctaaatctaagtcatcctcgaacttctatgcatcttttgcccttttcctccctctacgccccttgaaataattgagtcatcttttacaatgcaagtataaatgaagggcaccgcggtcatttaatctactttcttaaccttgttcacaagtctaaaataatttggaatttgagggagtattatttcttctgctgtgcgcattggccaacctttggcctgagatcatgtgttcctggttacttttgtgaaagactgaattaatagtctaaaaaggctatataatattctattaaaaaatcttgctcaaaaaatattctattaaaaaggaagaaaatgtgggttgaggcaccaataacttttttatacgcaaacaaaggttagtttgcaatttacattggaaaaaagatacactatctccccagcggtgcaacttatatgaattcagtggaaatatggatggatatgtaaatttatgtatgtgatgttaccagtgttagctacttttccgatggctttgagctgcttcaggtgaataatacctaacagaaattatgtcatcctatccctgtatttgttattatctgctgaccccgcaatagcatttgcaagttcatatgctgcacacattatggtttaccatgaactttgtaattttgttcaagcatgtgttttcctttcctgatcctaattttgaacatacttattttaaataaagcttcacaaaatgtaccattagtgaaatttacttgcagtaggattagtgccagttttctggtaggctgtatgtttttttgcatatgtatgattccatgaattctgccaacactcttacggtgcagctggtcagcacaacacgccatagaagcggttggctgagccagcccgggttcgagtcatgacaccatcttcttaagacgaaaatcagggggacgtctctccccctggtcgagtcttttttattccatgaattctgaacattttctctcttgttgcatattcggtcaataataactgtacatactagttttggaccataactgtagaagcaacttgtttggagttaaacttgcattgttgcttgtacttgccatatttgctgaaacatatatatacaacctcttccatcatgagaattgcgaacagagtttcctcaggtataacttcccttcttcatcatttctacaaactcttcatagtcgattctcccatcctgttaattcagaggggggcgattgttaaatttatgcaaatggattgggtagcagcaagaatgtgctcaccttgtctttgtcaacttcatctagtacttctttaatgcttgcttcatcactgattccatactccgccatggcttgttgcagttcatctcttgttatgtacctgtggttgttatacatgttatctcagttgaattatattaaacttttttgttttttcgtaattgagtttaaccaagcaaaacgatgtgatgtggcagtagcatgtatttgtattgttaatttgttatattatgaacaatttgagcagcgtgtaattttattttataagttctagcatggttcaactgtataggtctttgttttagtgatgcatcgatagtatattactttcttggttaggaagaattaattttacccgctatcatctttgtcaaagtgttgaaatgcacggatcaaatcctcctccttttccagtttatgtttattcatcatggcagtaaggaactctgcgtaatcaatgctgccactcttgtccacgtcaacctgcatcgaagcatgattagtgaagtatttcatacacaaaacttagtgaaagtggaatggaatcagcaatcttactgcttccataagcttctgaacctccgcttcactaatctttgaccctagttttgtcagtccttccttcagttcttcgactgtgatcgtgccactcttgtctgtatccatgttgttgaacatctgcttcagtcccttgatctcgtcttctgttaggttctccgcgattaccttacaatgacaggagacaatttgtcaacttaaactgacataggcgaagtagcagttattcttgttaaggaggttcaccttgagtgcaagttgctttagcttgttcattgccttgaattgcttcattcttgacaggactgcgctatcgataggtctgtcaggtgcaccacctttgagccatggatgttctgcacatggagtcatccatttatttgggatgaagtataaaacgtggaaatgcagatgagctttacactcataactcaagtgttgtatgaaaaggcagttgagagtgctacctagggcctgtactgcagtaatgcgcctccgaggatccctgttcaacattcttctaatgagatcctttgcattttcagatatggagggccacggggaggagattaaatcaagttcgccggccaatattgcatcaaatatgcctttctccgtttctgctcatcagatacacaaattctgtcatcagccaatcatactggaggcaatgtagtagtctgtcaggatgaagatgtttggatcttcacccacctgcccagaaaggcggtgacccgcatagaagaatgtataggatcacgccagcactccagacatcaatctctctgccgtaattccggtgcagtacctctggcgccacatagtacgcacttcccacgatgtccttgtaaactttacctgcaatttgttgggggtgggggggaattgaattgtctagtgttatcacatcatttgcatggaacagttgcattttacttgaatgaatataatgatgagcaaataaagctaaccttcttcgatgaagacggagaggccgaagtcgatggccttgagcggcgcgtcgtcggcggggctggcgaggaggaagttctcgggcttgaggtcccggtgcatgacccccatgaagtggcagacgtgcacgacggtgaggatgtcgcggcagacggcggcggcctggcgctcggagtagctgcccttggccgtgatgcggtcgaagagctccccgccggagcagaactccatgacgacgtgcacgtcgtcggcgtcctcgaacgcgcccttgaactccgccacgttgggctggccgctgaggtgctgcaggatggtgatctcccggcgcatgtcgtcgatgtcggcgcggcgcaccagcttgcgcttggacacggacttgcacgcgtacttgcgccccgtcgcgcgctccgtgcacaggtacgtggtcccgaac

SEQ ID NO: 4704 - DNA, 6223 bp, Sorghum bicolor
gtactactagcataggtttgtgtgaccttgcatctagaattagttaggtgagttcttgctaagaaagcactttatttgctttgtttagaatcttttacaaggtactagagattttagatacaggggtatagtcttagctagaccgataattttaagggacaattggctaccggacatgcaaagtggcgtgcatttgctgtaagacactttttcatgtaacactcaccaccaaaacagttgccatttataaaccataaggccaatggctatgaaattttaacagcaacaagatctgcaatggtcaccactttgcatgtccggtagccaattttccctaattttaattccacatttagcccacgtgatttgttttagaaaaaattatttacctcctctaatccgctatctcgaccttttacccgctctcttacgtctaagctcagccactaagaccaaccacaacgtttacgttgctcaaaaaattttaactctgtgattgggcaccgatgcctcaactcctctgtttctacagcatcggcgttgatgtttctctctatatgtggacctggatcacaaaatgattctttttcttcgtaaaatataaaatataatattttaatcataaggaccaatatcctcctagaatatattattttagtcattcaggcagcaacatgccactgctcagcaaaaatccaaacttgacacttgtagacacaatggtaaaaatcgatgcacaaatctcctctcttctttcagcaccacaaaaagctaacgttgtggccagtctaagctaggtttcaaatcaaccagaggcttcatacgcaacggcaagcaaaaaggacagtgacagtggagcagcgtgacatcgtatatgcgctatgcctgccaaataatttaatgacaaatctgaaagtcatgcgatcttagattctacgagcccaaacccaaaataggtttccaacacagtacctatagcctccaacagagtacccatacagaaaacttattttgggtatcaggggaggcataacccaaatttgggtatcctctctcctcgagacccatttgcagagagcgttgtcttttaggtcttgttgttggagaagactaaaaataggtatgaaatttacctgtagcgctacccaaaggacaaatagatcttatattttgggtgacgattgttggagatagtcttaggaccgtttgaccgtttccctttggtagcgtccagcagtttctccgtagaatcaggttttagttaggaatttttttaagctattgtagcacttttgtttatatttaataattattgtttaattataaactaagtagatttaaaagattcgttttataaattacatataaactgtataattaattatttttatctatatttaatactttatatatacatataaagatctaaggtgatgagaaatctttaaaaaaaattaagaacaaacttttctctcgtatatgcaactagaacatgtactacccagcgtagatgagccctcgctagtctctgccaagcggctcccagcgcaggcccatcatctccttctcctttctcctgtctcgcggcttctcactggaccacaacgatcccgtccgtccgatcgcacctaggtcagaggagcacccctggagcggcgagcggggtcgactgggaccacggcccaccggtcagtcggacggcaccggcgtagccgcgcagagcgccaccgcctcgcgtctgtttgaaacacacacgtgcaccgtgcatgcccgttcggggaggaggcgaccgttacagacgggcagacggccggcccttctcgagctgtccggtccagcggcccactagccgttggcctgcttttccccctttcaaattctccccccttccctctcacgcagcccagcccccccttcctcttacgccagcggaaacgctctcttccgatttctcctccaagaacaaaatccaaaaaacaaaataaaacccgctccaaaatctttccaatccttcctctctatctctctcctccttcgaatcccaaggaggcggcggccagagaggagagagagagagagagagagagtaggactagagagccgttgctctggttgtggtattattaacgccgccgccgcccctccccccgcattcgtatggtccgcgtcgctccggggctcctgcgaccgaaaggcatcgccgcggcgtctcggctggatcgacaggccggccgatccgtctcctcctcctcctcctcctcctccttctcctgcgggtgcgcttcacggatcgctgcgctgcgctctctccacggggatcgggtgggcgtttcttgaatcgaatcctgagccgccgccgccgccgtgtgctgtgtgcaggtcggcttcgggacgatggcggcgagggcggctgatgagaacaggaggccggcggcggggggaaagcccgcgccaggcgtccgaggtgggtgcgggcggcggacggcccggcctgatctcttcttgggttgtttgctgcgtcgcgagcacatggtttctgatctcctgatttgtgcagagatggggagccggcgcgcgctcacggagatcaagaacctcgtcggggttgccccgtacccctgcgccgtcgccaagaagcccacgctgcagtaatctcctgccccaaagatcgtgtctttttcgtgcttcttggggtccaaatcttgtttaaccgtggcgttcctttcttctcttcaggaagagcagaagggacgaaaagaagacaacgttgctgccaagcagccggcccatgacaaggttaggacgcgtgctagctgttcttgcgcctctgacgtttcttgcaggctttgatttgatctgggtattgctttggttgttcaggaaattcgccgcctccttggcgagcaaagggcaacctgaatgtcagccgatcctaactgaatgtcagccgatcctaactgatccagaacccggagttgatcaacagaaggaatcaatcggtgatggcaccgttgatatcgacgtggaaatccacgagctggtcgacgatagtgatagtgacatcgacatggtattcacacttctgatttgtgctcttgctcagaaagggatgggttttgggcatctttgccatggctctggcttactgttttgtttggcgatgcagggagagacagagaacaaggagatgaaccaagatgaaccgctcatggatattgacagagcagactcggggaacccgcttgcagcaacagaatatgttgaagagctttacaagttctacagagaaaatgaggtggtttattgtcagatgatgcttatcttgttcctttttggtagataatctcaaatcataaattctgaacttttggatgaatatcatcaatgcgcagatgcccttataagaatgaacaagttccttgagaaactgattaaattagaccgggagcctgtaaggatcattctacttcagacaagaatcttaatccagtatggtataatgtggaaatgcatgtctaacgttgattagtatcattatgcactttaagcaactaggtaaaaaaaatatcagtatgtttactgatatagcacattggtccacctcacagccaggagtaggtaactattgtgctagctgtcatgtgcaacacattggaaagttatgctgcgctaaaatcatcactactacttgtactattggaaccacttcatctgttatacaactgtgaaagctacaacagttcataatgtctttgtactactaaaattggttccttcagtatttttgaagcaaaccatggtcatcagaatgaaacttattgccgacagtatccttacattgacaaagacttatgcaggcttctactatcttggaatttctattgcagcttttattatcttttcagtattaccaatgtggtgctttatgcaggctaagagttgtgtaaggcctgattacatgtccagtcaacaagatataaactcaaagatgagagcaattctgattgactggctgattgaggtacaaaaagcacggacctcacaaattgttctgatctgaaactgcatgttttaatatttttgctggtccttttgccaggttcactacaagtttgacctgatggatgagacgctctttcttacggtaaacataatagatagattcttggataaggaagtggttccaaggaagaagctacaactggttggagtcacagctatgcttcttgcttgcaaatatgaggaggtctcagttccagttgttgaggaccttgtgctcatttctgaccgtgcctacacaaaagggcaaattctagaaatggtaatccactaaatacaatttgcactcacactgaattcatgcttggttcttttatactgcattatctaaacgtacaatgatcatagattaggatccatatatgctacatcagcaaataagtaacatttccttacagcagacatggatcttttactgcaaaattgcaattatatcctttctacataagtggaacatggcagagttggtccaatccttgcacagtcttctttttttagaagatggtgtacacctgatcatgatgatatccatatgtaataccttagtgagtaaataacatttatttaaagcagacaaagattattactgcaaaaatgcaactctatcctttctacatcagacaccatgtcaattaatctttcggatgatttctccatgttttgcttacatgcattctgtcttcttttattttatagtgattatttgttatttttggctaagagttgaaaatcttctgattgaacaggaaaagttgattctgaacacgctgcaattcaacatgtctgttccaacaccttatgtcttcatgaagaggtttcttaaagctgcagatgcagataaacaggtgaaatatcactaaactctgttcttctttttgtctacttggataaacaaaacaccagtagtagtgaacttttggttttacgactgacactgcccactattgtatctcgcagcttgagctagtgtcatttttcatgctggagctctgcttggtagaatatcaaatgctgaattatcagccttcacatctggctgctgctgcggtttatactgcacaatgcgctatcaatcgatgcccgcactggacaaaggtttgcgagtcacatagcagatacactagcgaccaactcctgtaagtccatttcaaataacttcctcactgcgtttacaagcatctgtatcctgactttctgtgtgccttttgctgttctctcagggagtgctcgaggatgatggtagactttcaccagaaggctggaaccggcaagctcactggcgtgcacaggaaatacagtacctacaagttcgggtgcgcggccaagaccttgcctgcgcagttcctgctggagtcaggagggacaccgcctccttcaggtgcaatctagttgaatcgccctattcaactaggtggatttttaaagtttttagcatactccgtgaacaagatgcagaaaacatcgtgttgatgttgcccaaaagtgcatcgaatttccttggagagttatgattaactgttttttttatctatgtcctgaatgaggagtgacggtcggtcaggtcgtgcagttatactgcggctaataacgaactgtcctgttcaggaatgctgttggaaccttgtaaagaaaacaatttctgaatcaaatggatcaatagcttttgtccaaaatgttctcccatttcgatgttcacttgatggtgtcgatgttgttggtggaaccttgttctctcatttgacatttgaacgtgggcaggcacgtgactgatgccgcccctcgccgatcttggtagagtggtgccatgtgaactcaaatgtggcgcagacgcgcagccagacattatcttcggtttgagagtcttgtcatgcaaagtttttaaaacataacatacatttgttttcaaagatgtttttcgtgaatctaaatattttattcaaaattttcatatcacaatctatatttaattctttttttggaattttaaaaagtttagagatgctttttatgatttaaaattcttgtcaagtatttacaaatcaattaactaaaaaagaaaaacttgccttgatgactttaacgaaagagatatactccctccacactaaaaaaaagtcgttttgacttcttgttctcataaaatatttacaaaaagtgatataga

SEQ ID NO: 4705 - DNA, 6343 bp, Sorghum bicolor
catgatcgaattcctgagcgctgggatgaagtagacgccgtggagcacccggtgctccccgttctttgcttcgaagatgatggacccgacgccatggatctccaccttcgactcgtcgccgaacctcaccgatcctctggcagaagtgtccaggtcggtgaagagctcgcgtcggccggtcatgtggtgggttgcaccgctgtccaggtaccatccgtcgcgcacggggttcttcaagctcgaggcagccgttcttggcgcagaagattgaagcttgggccttgctgcagctcccttgtgcgtcgagctccaggaagccatgcgcgaggaaggcggcagcgtcctcatccacttgggcgacgttggcggcgccaccgcgctctcggttgcgtcggggatgaggacagtctcgggcccagtggcctgcttgatggcagttgaggcagaggtcgtcgcgattcgccttgcgctcgccgtccgcacctcctgccttgtccgcctgcgcccctccgccaccggctccgcctccgtcgcgatcgccgcgcggcttgttcttcttgccaccgcgaggtcgccgtcgcttgtccttggacggcccggctgcttcctccttcttcttgtcgaaggcccgccactgttcggcggtgtacagaagcttgccgccggcgttggcggattcgaggtcgtccgccagctctcggtcctggaccgacttgagccggccggtgacgtcctcgatggtgagcgcgtcgaagtcgagcagagtctcgatcgagttcacgatctgcctgtacctcttcggcatgcaccggaggagcttctcgacggtgcgttcttcggtgaggtcggtgtcgccgttcagcttcatctgctccatcagactgctgaggcgcacggcgaagtcctcgacatgttcgccgggctgaaaggcgaggccttcccactccccgcgaaggcgctgcagcgtcgcgcggcgtacccggtcaccgccgactctgcgcagcgcgatggcgtcccacgccagcttcgccgtcctcttgttggcgatggaggccgcgatgtcgagcgggacagcggcgcacagagcctccaaggcccggcgatcctcctcatacgtgacgccaccgaggtaaactgcatcccaaagatgtcgagcttggagctttaccttcatcaggaggctccactcgtggtagttgctcttggtgagcatcggccacggcgtcccggccccggagtcgcagtagaccatctgcggcaccggcgaacgcccgcgacgaccacggcgccgctcaggagacggcgactggcggcggcgctcgggagtgcgcgatcgcgatcccgcggagaccgcgtcctcctgctccagctcccggcgtagggcggccgcggcgtcaactgcggcctgcgccgctgctgctgcctgctgggccgtgacggccgcggccgccgccgctgcctctgcggcagcaaggcgcgtcctgcggtcatctccccctgcgccgaaggctccaacgccccgctgctccaccgtggatgccacagcagctgctgctgcggcggcggcggctgcccggacgcgagcactctcggtggacatggctctctctctgggtaaaccctaaggctctgataccaattgttgcccaactcatagagatttggatctgggaatgcccagagggcagcttggcccttgaccgcttggattgaatcaaaattgtgataacagggatacaatagagggaggggggtctgccacttatatagcaatgtggtcagccacccactccagaatatgctatagcaaaagtaaagatgcctgctccaaacttggatgccaaggcaccgctactactaatgcagaaattaagatacatagcaattaggcttaactaacatatcctaatcataaccactcaaaatgcatctaagttttcttccaattttaccctttcttccttaactttaaaaggtataaatatgttagcagcttcacgatgaagttgcttgaggaaggttttgatctttgtgcacatctgctagctctgcggcggtaccatttcatggaaatagctgactgggcagattcctttattgcttcaatttatcataaggtaatgtttgtctaaccttagtatttgagccataggtcatgtgtttttgttaatctgtacaagtcttctcaaatttgaactttctccgtgcagaaattgtcatttgttaaatctgagcagaaaagatcagagatccaagggcttatggacttggctttgcagaaatcatcttgtgattctgatccttataaggaaagattgtttatatacatgagggagccacccgttgattcttttgatgcctctgcatgtggtaataatttcatctgggatgtctctatgactctacctactatatctgcagcttgtttactaaagttctacttctgagattgttaactgcctgattctttactgccaggtcttgatttgctggatgatatcttgttgggttataaagctgaatggccagtgaatattgtcattacagatgacacacttaaaatatatgctgaaatattctgttatcttcttcaagtcaggtttgcagtgttttcactgactgaagtatggagatttctaaaggtatcttttctccattgatgtttcatccacagcatttcattcatttagatgtacatgctatgagaacttcgacttctgttattatttcctgtggactgaaccaattttgttagtgcccagtgttcatggaaagtaccattgttgactgatcctgagctaaattttcttatcaagtagctacagcaagcagtttcttttctctagttctcattatagatcttggtaatgcggcacttctttggtatgtatgtgaatatatgactctcttgctacattatcacaggagttgacacagttcatcagtcgctccagcaatagcagacctgatgtgttgaagaaattgaattttgtaatgaaagtgaggtactcacattgtgaatctttctaaaactttggcacccatcaccgaccttatattcctgttatcagttttatgctgtcactgaagtgttaggaataaaatactttttcctagattgtttgataaattgttgattcttatcttgcttctggaattcctttggaaatggaatatacaaggcatgttcatatcatagtaaagttgatataaagttcatatccaattaggcaattatccattcagttgcatatgtagtagtagatatagatatttgatttgcaattgtgtaaactaattttagtaagtcaacaaagcatactggatcttgctcatcctgttggctcatttctaatttcttgtactgtgcccatgaatagcatttttacctataatgaacagtcatgtggctttattttggtttctggcattaactgtctgtcttttctttctgttgtatgactttatttaggcataaactttatcactttctatcaacactacagcagtatctccattgccatttatctgatatatcgtggcgccgttttcaacattcccttaaaaatcaggtatagtatttcaatcactattcttgtaaaacttcaccctgagaggaattaatatgctttgttaggcttcctttcttattttttctgttacattaaatacacttatcacttacgaattaaactatggctactaatattctgttattgcttaggtgagggatatactggacctggagtatgtgcatatgtgttatattactgatgcacttgacatgtgagtgaaaccttaaaaaaatatttgtaatttgcgatactgactatgtacttaagtataccgtttgttcaaatgaatgggaacaacatcaatgtgcaaaactggcatttatttctgctttatctgtttagtggtgtaattcattgccatcagtataatataaataataataaaatcacctgactgttaaagttttggcttgtcatttttgcagttggttacataggtgagtatatggagtatggacctacttctttcatgtatgagttagggtaataaatagatttatagatggcatgggaaacacgagtatttaattgagtatccagactaaaagattgtgtttaactcatcaaaagaagcttattttctctatctcatttctcgtttttcttatctgtgtgtatcatcctatttagatttaatgtggatatctccatgagtaattaaatttgggtatgtagaaacaaagtagatttgccaaagaaaattttcacaagattgcacctctacttggtcttataaatatgcaactataattcatgaccagaattctgtcccggagaccatatgcctatgtccacaatgacacttactgtgatcgaggtgcttttttccccctcgaacaagtaggagagctgtgtatctttgtattaagaagaaaatagggcaagaacccttgcaacacacaccttctaagagtacattcgcaccctaattgtgattggagtgttttcaagtcggtaagtcaagcctagacaccctggcactgactagacaactaggtcgactactcgggtcactagaaagactagtcggtggcagaggcacaaagaatagcacaaatatagattaaatattccagagtaagtagcagtgtagcactaacaaagtagcaagtcaagcaaactatcatagcagcacatgcagagcacattatcacattaaactgaaatgggataaaattccaaggctaactcattgaggtcaagtcatccatgcctaaattgagctaccagtcatgattggccatagagtagtcatatgactggtgaactagtcactctagtcgagtttctgcaccaagttaatgcccaccaactgagtggcgaattgtcgactaatcacaattagttggacgacttaataatactggattggactggatggagtatgctttacaacgtggcaattgttgtctgattggttgatgtgtttgtttttaaacttatcatgacgtatttgtgttcgttgataactgatcatgacatgttttttcagatgtttcttatctgatgagtcaaaacaagttgccacgataatcaaaagcatgctgcaactggctttggagttaagattatgcttccagagtcttggtgatacttgtgatttatcagtaaatcaactaagtaatctgcaataccttataaacttctctcaggtattctctcagtttcatacaagcaatgtagtttgatttacgccttgattcagcctttcaactccagcatgcaaattgaaaagcgtccaacccatctggtgatatatatgtgtagcctttcaactcctggatgtcctatatgttcagagtggcttggggttggtatccctgttagttaataagccactgcccttaaatgctgatatagaactggcagtttggtcatcgttagttgacaatggaatccctttgttctgtcacattgtctgaaacttaacagtttgatttttcttagttgctaagatccgcttttgttgattgttcactgttatctgcagcagtagtttagaggatctccactgcctccaaatctcaccttgccacaagtattatctgctaataggctttttagcgccctttggtcactgtatgcttttcaatgcaggtggatgtaattagaacaaagtttgagggcaacatgaaagatttgtatattttgcattcaaaatcttcgaaatatggggagcttggcctttcccgtttctgggggtatctgaactacaatgagtatcattctacgaaaatcagtacagatatgggcagcttctatttttgataaggacatcttaagactgaactaaggtttgcctttatctttggggactagctgaccttttaaaccgttggtgagatcattgtgtatttgtttgtttcatggtagtgatgagaggtgcatcactttgttttgggtcttctggaatcagttcagctttttgagctacccatgacgggaattattgcttgtttgtgctggttatagtgccccttaacgcatctgcaagtcaagaggtacacgatgctgagtgccgagagttctccttttaaattgtcccttgtattggttttggcgaactaaagagaactatggttctgacacgccatatactttggagatgcatgtatgtactaatggtgtatctcaaatttacaatcaaaataggaaatcacgtgacttgactatcatacaatgctaatgttgtttctgtggatttaggtttggagtgaatgtatgtactatgtagttctttgaaaggtgataattttgtatagcccatg

SEQ ID NO: 4706 - DNA, 13854 bp, Sorghum bicolor
gtaattgccattccaagcaacactttttatttattccttttcgccgagcacacaaacttgggtcaaatttgtgccaacatacatgtattcattcccttttttcgctgctcaaaatccaacggccgacaactaatcagtttctgcccaatgcagggtagagtactgtactgttgctgttaccatttactgccacaagtgactcctcgtggcaagccacgcatctgctactgctatggctacctcagcgcatcagcagcaaagcaaggaaaagatctctttctctgcagaccgtcgcatcaggcaacgattacacgagcaggtcggggtgctgcagcggcgacgcacccggttgcagtaggcctaagggtgcgtagacccaggcctagaccttacacgatttattactgctacacaaaacgaccacccaaagtgagaaaaaagaaagaaaacgaaaaaaaaaggaaaaatatatcaaatgaaagaagaacaaatgagagagaaaaaaagaaatataaagtgtgcattagcactggaccagcggcggaaacgttgagagaggtgccaagtgtcatcactgggagaaatgaacagcaaggaaaggaaaagaggcaaatctacgacatctctgctgatttcattttcactggtagtcgataagtgcacgatatttctatgtgattgaaacgatttttttttcaagtgctaaaaggattgagaattgaaataggagtcgttagagtataattttttttcaatctgaccaaaaaattaagactggaagtgagtttttgaaaatgctcgctatatatggaacaaccactcacccaaagagaaaggaaaagaaagaaaaataaaaatatatagcgagaaaaaaagaacaaaggaaaaagaaaaagaaagtgtgcatcagcattggaccagtggtggaaacgtctggacagaggaggggagagaggtgtcatcagagggagaaatgaatcagcaaggaaagagaaagagggaaatctgcgacatctctgctgatttcattttcacgagatccatttcttagagaagaagaataaaatacagagagggaattgcgcaaaattttactcgttcttggctctggcagcagtgcattaccagaattaaattagagaaattataatacagatttttatttttgcgtcttccaaatctggagatggtgatgggggccggacggggaccccagccccggccagctccgcctccacgtccgtcgcaataaatcgcccgtcgtctccaattcccctctcctttctcctcgcccgcgtcggctcgaatccaatccctccaataatacgcaccgccaccaccccatttgcgccatgctgccgcggccggcgaccacgagtcaagaacacgcgcggcatccctgagccaccacaccaggctagcaaaaacgattcctttctctctcggatcccagccgctccccaagcgtgcgcgcgatttctctccttgcctcgcctcgcccaggtgagcttcccctgccatcagtttgttccttttctaatccctcattattcccctctaccatcatcaatctactgtttcgagatatgtgttggtgaattccgcgagtcttgagagaggaaggggattaaaaaaaaactgaaattttgtcagcgtttcttggcctagctgcccgctttaataatggccgcgcggttggttggatggattggcaggccagatgcattgctcaggagcgcttgggccgtgcgagctgcgggatttgggagatgcgtgcagttgaatgcgtgggatttgccgcgatttctttatgctaatcgccctcccctcccgacccgtgctccccccgcgtccgctcctccctttctcgtccccagttgccgccgagccaattcagcgccgctttactgttatataagcgcgcctccgcaccggaccagggctctgagatgtgtttatctttctctccttgcagcgccgtgctcttgtgctgaagatccatggaggggtgccaactgctagtaggctgtaggattgagatggaggaggaagcgttctttgactcgcgagaggagctcacggcgtcgccggcgcccagcccgggccctgcattgccgtggtcgggaagcctcgacagtgtgtgccagaggagggagcggttcatgagaagcatgggcctagagtgctgcccggctcccccgcaggccgatgccgtggccaccgtgggcgatgtcgagaaggaggaggttgtgccggaatttgggaggttgtggtcgcagtcggatgagaatgactgctccatgtcgagttggtccacggaggagacggggagctccgtggatggtgtctcggatgacaattctgtcagtggatccagccgggatgatgctagcagcaaggtgagcaggagtttcagttcgttgtccttcatccagaggctcatgagccgcagtggtaagctctctggtgtgcccaaggcgattgagaggagaagaaacggatggcttcggaggctgggcttgagggctggtatcctcgatcatggagctgatgaagctagcaccagctcctcagagagtgagcaaaacaggggtggaaggtacgaaagggtcaaggtccgctgctacaggaagtggtcgaaagaattgtcagcagtttatcaaggccaagtgatcaagggccatgatggggccatcctgactatgaagtttagtccggatgggcagtttcttgcaagtggaggcgaagatggagttgttagggtctgggctgtcacacagtctgaggactgcaaaattcccgtggatgatccttcttgtgtttacctcaaagctcatcgccagagtggcttggctcctgttgttgctgacaatgagaagaaatgcaaagtcaagggcgtgaagcaatctgcagattctgcttgtgttgtgattccaacaatggtgttccagatctcagaggaaccattgcatgagttctgtggccactctggtgatgtactgtgtctgtcgtggtctgacaacaaggtcagtccaatgaaatgtgctttctccctcatttgtaaagtttgattgcatttttttctttgtccattcctttctgataattgaaattttctacctcgcagcatctactgtcagcatcaacagacaaaactgttcgcttgtgggaaataggatctgcaaactgcatcactgtttttccacacagcaactttggtaggcatatagtctcttaattgctggctcaaaagttttcaactatgcttctgaatttgacctcagcatttcgctatgaaaatttacttttgcagtgacttgtgtccagttcaatccaaccaatgagaatcgattcatcagtggatcaatagatggcaaaatccgtgtatgggatattcccagatgtagtgtcattgattgggtggatattagagacataataacagcggtttgctatcgacctgatggaaaggtatcagcatgcattctgaagtgttttttttggctaacttgttatttcagtagtttgtgcgattaatcttctttttcttttacatcttgcagggagcagtggttggaaccattactggaaattgtcggttttatgatgcatcaggtaaaagaaaaaaaagttacatctctactagcttttcagtgccatctgagcatatctctgcttttacttgaatgatatttcatatatgctgactataactacatcttgatggatcagataatctgctgaggcttgagacacaaattgcactcagtggcaagaagaagtcttctcttaaaagaatcactgcttttgaggtaaatatcttcacgagaaggaaggcttttattgcatagattacttcatcagtcatttttcgttatgatgctcctatgttctgactctttgttttatttttcatgtcagttctccccaagcaacccaagtaaattaatggttacctctgctgactcgaagatcaaaattcttgatggaaccgttgtgactcagaattatagtggtacagttcacatcttagccttcattcttattgatctaagcaatcattacaattttatgtattatgaactcatcattttattcattcaatcaggactccgaactggctcttgccagtcattggcaacattcactcctgatgggcagcatatagtttctgctagcgaagactccaatatttatgtatggaaccatgaaaaccaagatgagccttcactgaaacatgcaaaaaccatatggtcctcagagcgcttccactccaacaatgcagccatcgcaataccatggaatggccaaaaacccagaaaccctgtctctttggcctctcaaattttgtcaccgcaaggagataacttctggtgcatgagtaaggctgtgaagtgcagttcaagtcgcagtgaagattctgctattaatagttttgtgtcaagatttgctcctggtattttcaatttgaatcaggagttctcctctgagtccacttgcagaagttcagcaacctggccagaggaaattctgccttctcgttcaattcgtgcaattttggatgagtcacagtacaagttcctaaggaactgtttccagaccacaccaaactcctggggtcaagtgatagttactgcaggatgggacggcaagattaggtcgttccagaattatggcttaccagcgcatcagtgatcagctcgagcatttgctgaaactacacggcagttttggcgcctcacatggcctgaagagaggtacccaagcacccagctatgctggtccagcgtgtggtttcttggtacaagacatcacatgctcagtgctcctgctgaattgtacatggaccagtgttgtacataatcaacctggtggtcctgcgagatctccgccatcagtggttgttcatggcaggacccgtagattgtaccttttgtagaaaatttttagtgtagatcagatttcttcctttgccccttatcaattgctcattgatatatacaacagaaatgttagtctcagatgagtgtaagttcccctcccactgtattacgggagcccaagcgggaaccaccagatatatatgttgcagtcaactatacaaaattcgttcattttttaaaaactttgtgccctgttgttctgctcgttcttgatctatactttgtcgaatttcagatacaggtgactggttctcttgtttgacatcataagcagtttgctgtggacccagtgaagccctatagaggttattattgtacctcttattatggggccttaggttgttgatgatctttgattggtttgccatgtgagcatctcacaaatgtaccgatcctgatcctgaatccgttaatgatttgagctctgagacctagcattatctgatgaatgtgctattatctgtttccaagatattttccccgtgcacttgatctattcttcgttttctctgcgaatctgttatcagcgattttatccttctaaatattttattgtcaatcttgagctactatgtgggataagatatccagatattttggtcggtttatggaacaagaaccccatttgctgctagcacattactgtacatttctctggaggttgagttccctgctattctgaggctggcaaggctctcaatgcatgtggcatggctcccattcgtcaggacgtcaatggattcaactcactaaaaacatcagagatgcatttgtctactacatagatgccacaattggatcgaggcaaggcgatcattgattgcctctaaaatatgtaacaactcggccaagttggtgatcctgattttgtcaaacattagattactcatcagtctgcatgattgactattgtaagtccaatgcaaggtagacatggattttcatctttcctgcttctgggtactgaaggtgtcagtggtgacgccatgctgacatctgacactgcaatgattttgtaccattgtgggtacagcaaatccggtggagactcttctggcgagaatgaggccttgtttagttctaccaaaaaaaattttggtttcgggattgtactatttttatttttatttgacaaatattgtccaatcatggagtaactagacttaaaagatttatcttgcgtaattagtttttattttcgtctatatttagtgcttcatgcatgtgccgcaagatttgatatgacggaaaatcttgaaaattttttggtttttggggtgaactaaacaaggcctgagggcgtgtaaagttccatagttcgatcacgaggccttgtttagttccgaaaagatttcgtatttcggtagtgtagcattttcgtttgtttgtgtcaaatattgtctaattatagactaactaggattaaaagattcgtctcgcgatttacaggcaaactatgtaattagtttttgttttcgtctatatatacagcttcatgcatgtgccgtaagattcgatataacggaaatcttgaaaattttttggttttggggttgaactaaacaaggcctgaaattggtttgtgcagctgaacatggtaaggcctgaatattctgaccacgaaaaaaactatgaactaaaaaaaaatgttatcgagctacaatttccatttgctgccatagttggaccagaccactattgagcaattgtagtcaacagcggctaacttaaagttgagtaatagagaatttgtcaggtttcagccttgcttcagcttcaaactttgcatgccttatccgtttcaaaaaaaaaactttgcatgcctctggttattaggtcatcactgacctccttcagtgaccctctgcttaggtcatacctactgtacaatttttttaactgccagggttgccactatgcttgcagttcaccgcggtccacggtcctataattcgggcttgtttagtttttctgagtgaaatttcttttagcactatagcaatttctttgtatttgataattattattcaattatagactaactaggctcaaaagattaatctcataaattaaaacaaactatataatttgttattttttatatacatttaatacttcatacatatgttataagatttgatatcataaaaaatcttaaaaaattcttggatttcacatataaacaagaaaaacaagagaggtcctgcgctaaaatggaaaatctgtcctgcaaaggcataacacgttggaaaagctgagaaagcctccgctgcggattcagaaacctatactgaaaccacgagtctatttagttggtgaattttttttattttggttactacaacacttttgtttatattttataattgttatctaattataaaaattacagataatttatgtaattagtttttttaatctatatttaatgttttgagagctctaatgttttattcgtatcgtaagatttaatatgatgaaaaaatttaaaaaattttcagaaactaaacaggcagtaaaggcagggaacagtacgaaggaatttccaaatttttaccacgatctgcggtgcgcagcgggcagcgcggcgcagacctgcaggcctgcagcacaggcacagcagagtactactgtgaacattctggccaggctcgaatcattgcgctggtctccaactgatcaactccctaatccctaggcataattgcgtcggtttgcagctcatcacgtcgtttttgcattcgcagcacccaccgcatcccgatccgtgcatgcacagagattaacaaaaataaaataaacacaaacatccgtgcggtcttcaacagttgcatccagattccgtctactacgtcctccgtgacctcatcgccgcggccttccccgttccccagcgcgtgcctgccaagcaagtggccacggccggcacgtcggcaccacccgccagccacattgccgcctgcacctgcagcacggcgaatggcaaatccgaggtgtgccatgccgtgccactgccgcacgaagattgccggcccccgtgcacggtaagcacagtgcctgtggttggctgtggtggcacagtgcaatcaaggcaccaccaatttacatgcggcaatacgtttttgcagagcagtagtgctccggatccgagctagcgctgcttgtttggaggcgtttcagcagagagagctgcagtgcagcgtcgtctggatttgtccgtgggggatgggcatcagagcatcagccatgttgtcatatggcaactgtcttgtgctgtagcaggagtgggagacatgcaggtacagcatccaccactgcgggttcagagcggtggacacgggacgagccacacacagtcgcctcgccgctcatgcatgcgcgatgcgatctcggactggtgggggtacggtggtggaaaaacatggaattatcaggcgagctacggggacagctcactggcgcacgacgcggaatgattcgttggttttctctggtcattggaccccaagaccgctcgtcctgctcctgtacccgccaaaggaagcagtgcctgccgaggcagtttaggcaaaggtcatagaaaaagcagcatctgtgctatgcttggacatccaggagcagaaaatattcgttcggaaaagaaaaaaaaaactgtgccttcgtgaatgtattcgcaaaatgcattgtttggtgtcaaggtttcacgtgatggagggtgactagtttgctgcacgacctgaggcggcacaacggcaatgcatcctcgatcatcatctaccggaactggaagactgtttggtgcaagcgatgattgcgtttcgggttcggcgcagagagaataatgcgtcgactgttggtcaaggaagatacccggccggccatctcaattctaaactccagagtccagaccaccatttactataagcaagaagtggaagcattgtgatttgtgaacatgccagattctgcaaatcttcattaggtgttagactgattgaccgaatggtcgttggagatgcattttgcgtccaatcatccttattgtttatgcacacaagcaactgaccaattgtttagttcactccaaaatgccaaattatatatagtggtcagcagaagagaacttcttgctagctcgctagcttcaagtccatgtccagaccaacgttgcttgatcacaactgcttggtcgttttcagttgcatcctgctgggtcctcaaattcgcccgcaagcgtgtaaaatcggacagcgcatgtcagagcgggacgctgatgaactgtcgacaggtttcagaaacgccagacgtaaaacactgtgcatgagcgttcagctctgcccgcatgccggtgcctcttgtcttgtgcaaccctgtcccttctgacggcggcaggatggaagccaattgtgatcgtgagcacgcaacgtaacgtgcaggatcgcatgtgcaatcggttattctactgccgccccctgcatcaccctcgaggtttggaggcccaacgggaaaccggccggtctctcttcctctctactacatatacacgctcactgctgccctcaccgctcacaagtcacaaccatcacacgccatgtagaaatcagaggaatagatacggccggcgtgcatgcaaatatatatatatggctgcattaacaaacatcgctgctgctgctgctgctaaatcagcgggccaaatgcactgctcccttgattacgactcctctctctgcgacaccatgcatggctaccacgagtccacgaccttctagatgatcacacttcgtttgcagccgcaaccaaccgttccatcatgttttgtttatctccgccggctgcgcgcgacggacatgcgcttagtttaattacgcggcgcaaccttcgcgtaaatctggctcgctcgcacggggggtgttgccaattgtgtgtgtgtggtccgtgacatgtatcgaaaatcatcaaacggcactgcgcccccctcggactcggaggttaaggcaccagataatggtgacatggtgtgggtgtgctgctgtagcggcgttgggagacagcaggatgccgaagcagggatccagcagcccgcggcaccggcgcagccgctcgtggctggagccttttggttttggatctgccggtcccttccctgccccgtctcggcggccgcgtcgggtcgggggcgtaccggctccgatcgagtttttatgcccatgggcatgggcctctctcgtctcgacgggaccagacagctaatccgatcgggtcgggcggcagcggcatccagttgcgctgcgcgtgcgtgcactcgtggcccgtcgtgtacaatgagcgctcatgggccagaggggagcctgccctcgcgttggacgccgtgcgatccgctgcgggaggaccggagaggagcgcgcggtgcgtgcgagctgcgaggacaggtggtgtgacacgttccggttggtggatttgcaggcgcggaaacaaaggcagacacacagctcatttctgcacaatgcgtagtagtattgcgtagtagaatgattggttatagtttctgtgggccgcttggggctcctctttctgcgtcccaggacgcaaacagtgatgaggcaaaggccagtgatatgcaaacatttagcatatctctgcttttgccaacgtagtacagtgataaataaagaaagaaaataaaggatagagcagcatgcatgcgtgtttcttcaaagcagtgcattttacttgcgtcgttattaaagaaagtagcatggttattactacattacatgtggaaacaccgaaatttcagttgagcgaatagctgcatacgcaactgcagatgtgtgcagtgcataatcctctcgtcttctagaaggtttgcctggcacaagcgattccatttctgtgcggatagctagcataccagagatagcatttgagtggtcttttcgaagcaagaaatgccattgtgcgatgcccagactcgatttgttcaaccgctcttcacgtgctgttaaagactggttggagttggagatgccatgttagggtcaatcccagtattatattgttgcacacaagcctctccgtgactccgactacgatcattgggacttggaactgaacaactagtgcaggtcaacacaggctaaggccctgtttagttcccaaaatttttcacgattccccgtcacatcgaatcttgcggtacatgcatgaagcattaaatatagacgaaaacaaaaactaattacgcagtttacctgtaaatcatgagacgaatcttttgatcctagttagtctatgattagataatatttaccacaaacaaacgaaagtggtacagtagcgaaatccaaaatttttctcaaactaaacaaggcctaaaacgaagaaccagtcaacttgtgtactcgtagattccttcaaggcaggttcatctcctgtgtgttggaccctgctgagcttgagctgattgtcagacgctaactgtttattgttgtctctgacgcccatacgatacgggttactacgtacggctgtattaaaaaaaaaagatcagcaaccttgtcagagacaggaatctgacgaactgaaccattgctacaatcacgagactgccaaaaattcaggaatgaatattcactaccaatcgcccacagaaaattaaaagctgaatgatcgacaataatgtgacaggctgacagcaggagcgttcagctcggccatagccatttgtttaagcgtgtcccttgaggcagcggccgaatcattgtgctaggctcacgcataattggacatgctggcctttaacaactccgggttagcaccttagcagcaagatcgcgatctgttacgagctttttttaatatggcctcccatggctttgtttttgagcctaacccactccaccatgacctcatcgctcgccggccatcgcatcgcaagttcacaaaaccgggggtgggtgcacgcacgcacgcacgcattgtgacatttgttaatatatacatacaaaacactttccgttttctgcactgcacacagacaccagacaccacacgcacaccgtggcattggcttcgaaagcggcgaccgcggcctcctagattcagtgcacggctccagctccggcatgcatggcgccaccgtgccgcgcgttccgactgcccgccccgtgccgtgttgtttaatcaggcgcgatcttcgcgtggatcccgtcgcggatcctgctgagccgtggctagaggacagcatgagatgagggcaccatcgatcgggccaagcgcacgagttggtcttggtccggtgggggagccgggcgcacgctgtagcggcgaggggagacaggggtggcgcggccggccagatccagcggggcgggggcgggggcgggggcgggccagatccagtcgtggccgtggaacgttggatctgccatttcgggaggagtacgtggtgatggtggtggtggcggccaggcaccactggccggcggtcccgtcaccggcgaggggtccggtccggtacggtaggatctgggcagggcagcccagtttctagtccctgctgcgtttgctgcccatgggcctccataggacgcgacacgatggcccatggctgacatttcggacagctcattttggggcgccgaattgtgtgtgccgtcgtgcgtgcggagtttgagatgtcagacgtgggcacagggctagtgaattgtggcggggctcgtgtacgatgatgatagtggtggtggtcgatggaattgaaacactcatgggccctgacgccctggcacgatcagaatttcctgctctgctccggagtagtacgatgataaagagtgttgaggtttcaaacggagtatgcttttgtcggggggagaatctgggattacactttaaacacctgtcaagccagatcattcttcatctcgtggcttgtgtgcaagttatagatagagttagcaagaggtgagggcagtctctcaaagtctctattatggaggtaattggctcttttttaagcaccacctagctataacatacttgctaattgatatcttatgattgagcaaattacctacatgggccattgaggataataattccaaaatgctctttttccaaaaaaaaaatgacttgcatggtatacttaagcataaatatcagtttgccgcatgctagctgcatcaaatgctttcttttcaatttttgtgctgtcgctactccgcctcctccaatacaagctactgtctagtttttttttttccatctgactacccccccttgcccctccctcctcccgtgcgatcgatggccttgtcagcgatgagaaggagtatgaaccctctgttccaaaattagtagcgatgttatgattcagttaaataaattttgtttcacaggctaccgagtaagatcgttttgttggatcttatttctcacaaagatcttttgtaagggtggttatttatgcatctaacacatggggtagtcggccctcccatttgcattcgtgccaaatgtgatggtcgtgtagtagtggtgttggatggatggtcccttgatcatcttcatgacgaggtagttcatgttgttttgatgtgtcaaatgtgcttcatgaagttcccatcgagttggaatttgcagtgtgtccaaggtttcattcatgtcgttgtgtgcatgattggaggatgatgtttcggcgatggttgttggcgttgctgagccgcaatggattggaataggcaatcgtcgacgccatggcttgcgggtgaataataatgttattatattatgggcctctagctagtgtatctttgtttttgacctaaggcctgcatgtagccggttatgtaattgtgtttcaacttaatagagttccttccctttggcaaaacagttagcattgataact

SEQ ID NO: 4707 - DNA, 7032 bp, Sorghum bicolor
aattgttgcttatggcgactaaaaaaactaaccgtacgttttgaccacagttggatataaaatccatcctactgtaaacaaacatcgtgaatttttgtaaaggaaaagaacaaagtcgtcactacgagtagttaggccttgcccaaaaacccaaaatttttcaagatttctcgtcacatcgaatttttagacgtatgcatggagtattaaatatagacgaaaataaaaattagttgcatagtttggtcggaattaacgagaataattatttgagcctagttagtccatggttggacaataattaccacaaacaaacgaaagtgctagagtatcgcgaaatttttttcataaggaactaaacacggccttagttcttttgccatctgtcacattttaaggacacgcagaactgcgaaagatataacaccatgtcgttttctcccgcaaccatttggatattcaaaactgacctgcattatcaacataataaaagtactataaaacagtccctcttccgcgcgctcctaattaagcactgtaccaaccatggacttggagctctcattgtgcaattcgtcttcggtcattatcaacaccaaacctcgagtgatgctgcacgctaacacgaacagcgaaccacgtgaaaaatggaagaagaagaagaagaatgcatccggcgtcagctgttcttgcttttgttgcacattctttactcgcctttttttttaacatttgttgcaagcaccagcacgtataaacttctgcaattaactctagatagtgatttttcccccacgaaaccttaataatacatttgaaggtttgatttttttaatagcgaaggattgattttatattttgaaggtttttttttggaatagcgaaggattgatttagaacgctcttggagcaaccccaagtccaagctgaggcctttccattttctcatccatccaccgttgattcttcgcgcgcccatgtggcccggccgtccaatccgagacaaggacaaccgatcagcgcttcccgttccaccgtacgtcgtcgttcccctacctcccatgcgccttcggtcctagagcttggtgctactaccctcgcatgcgccgtagtccccttgcgcagccggcatcacgcgacgcctcgatgcgcgccgccgtgccgtcagccgtggccggcgccttatcagcgtgctccagagaggatccacagcttccagcggatgtcccaacgccgccccccacttgtggggacaccgggaagggccgctgaccccgcgcacctgccccactggccagtgttgaaaggtagaaccctaagtgcaagatttgggaactgaaatgttgattttaaactagaccttggaggaccgaaggtttgaaattccgtgtttagagttgaatttctcgcttcaatagtttataaatctctaattttagctaaagagagaagtgatggagcacccgacttgagttggccgcacgcagctgggaagtaggatcccaaaacactgtcgtccatatattgattgacttgaatatctgtacgtatctattattttaatttccttttgtattctacggtcacatatctgatatgcctatgttgtttagtgaatagaaaacactgtataaggattttgtgtcatcagcgatcattatttgtgttttgattgtgcaagggtataccgaatgattggctaaacattagtcttacatcgctgtctttccttgcgatgtacgacaaggcaaccaccaatttagtaaaagcatataagcaggcttaccgatcaataattacaaaaaaggcgtagctttcaagatgtttgcttatgtaatggcatcatggaataattttcttttctttttcatgaaggagtgataatcgccaaaattattagtgtcatcatatggctgtactatcttttttttttttctgtaacaggcccgctaattatttattcttcagtttcagaagactctgttttttgaaacgccaagatggttaatttcggaaagaaattgatggctgatcaagtggaagaatggaaagggtatgacttttcttttggtacttataaaatgatctattcctttatcttctcagggcaaaggttctttattttcatatatgcccactccactaggatacattagaacaccatactgtagttatcgccatatcacagtccttagtatcatcatctggttaattttattattaatttaaacaaaatctagcagttattgaattggtgggttgcgctacaatgatgaagtcattttcgctaatgtaagctagcgtcactttgtttaacagtttatcagaagtcttatcagctttttggtctttccattgctagatactacatcaattacaagctgatgaagaaaatgttaaagcaatatgtccaacagacccagcatggtgggaaagatcgtgaacaagttcttaaagatttttcaaggattcttgatgaccaggtatacaaagaaagctttccctagaaatgatcataatataagattttgagcgtcatgtctattctgtcagtagtcacttatagccttgtagggactggaacagtgtcatacgacaaaattagtctgagtgattttttcttagttgtgagctaaaacacacatgtatttctttgttccagattgaaaggatcgtgctttttctgctacaacaacaaggccatcttgccagtaggattgaggagttgggagaaaaacgcattgttcttctagaagagtatgacatatcacaagtttatcagctacatgatgcatacagagaagtcgggcttgatctcataaagcttctccgctttgttgatgtgaatgctactggtatacgcaagatactaaagaaatttgataaacgctttggctacaagttcactgattattatgtcaccactcgtgcaaatcatccttattctcagcttcagcaagtctttaagcaagtggtaattttcatgcacattgcatttttagggatcattgacttttcatttcttgatgtgtaaagtaattcaccaataccatgcactcctacggatgcagggaattgtagctgttgtaggtgcattatcgcgcaaccttgaatatctgcaacatcatgaaggaagttttgtatccatctatgatcgtccagcagttaccttaaaggtattctattttcactattccattctcagttcagaacttttgctgacaaatttataaattaaaaccttgaaaatgctctttctgacctcagaactacatcaattatatttccacatgaactaaggtgtgatgtgatactttttttgttaatatattcaggaccctattatcgaccaagtaaacaatgcagtacagaagctcacgcatgccacaaattttatgcaattcttgggacaacactcacttattgtccaggaagatgcgcaaagcgggtcggaggatcttgttgatgatcagagctaccatttcatgtccctgatgcttaatctagttaacacattcctttacatggtgaatacatatatcattgtgccgactgcagatgactatgctgtaagccttggggctgctgcaactgtctgtggtgtaattattggatcaatggcagtcgctcaagtgttctcctcagtctacttcagtgcctggtcaaataagtcctacttcaaacctcttgtattcagtagcattatgctgtttcttggaaacctattatatgcattggcatatgatctgaattcactaatagttctcctgattggacgactgctatgtgggtatgcaattttctcaattcactctatctcacttcatttatgtttcacttttgtaagctagaattgatctgggtgaaaattactaggatggcaaatgcaggttgaggatccttaagagggcatattctagaatatttatattgttgaatacaaaacaaaatgaaaactgtctaggttacacggagatgaaggattttagagctcaagactggcattagaatatctgcttttccatttccttatagaacttaactagttatccctacctccctttgggctagtaattttcctatattgtttaaggttcttgattttctgaagatgcatctgtgatcgagctgccaacatgtaatgtgcaggctaggctctgcaagagcagtgaaccgtcgctatatcagtgactgtgtgcctctcaagatgaggctacaagcctccgccgggttcgttagtgctagtgctcttggcatggcatgtggccctgctcttgctggttttctccagattaaattcaagatatattcgctgacttttaatcagagcacgttgcctggatgggtcatgtgcattgcttggtttatttacttgttgtggctgtggcttacattcaaggagccagaacacttcactaaaaccctggtcagcgaacaaccatcagaatctggtaagctaacaatacactgaaatggcaacatgttttgtttgaattcatgaatatactcaaatcaaaaccttattgtacaataaggatgtgtatgtttaccattgtcaggaacttttctgagatgtttatttccttataaaaataggttgccaaggaaattctaacttggaggaaggtctagctcaacccttgcttgtaggtatagaacaaaggcaggaggagaactcagaagataatgatgatactgaattagcctcagaaagctctcatgagccagcaacatcaattgcttcagcatacagattgctaactccatctgtgaaggtttccttccccctcccttcccaattatcgattttcctatcttgttcttggttcaaacatttgagacgctcacagtctacgaaggatccttttataaataaagttagataaattaaggccctgtttggatcgctataggtagtagttatctgctaataattttttcttttggatccaaacaggtatagatactagactagctaattgttagcttgtgctttagataacaaactatcccactagctgaagcaaatcagataacgaactattagtcagataactattgaatcaaaattccgaacagggcctatatataatataatcaaattgtatctttaaatggtaatggataaagacattccagttactagcaggcatatctgcatgtcatacaagcaaacataactgtattactgttgacacgccatgtaaaaaaactagaccaacctagaaaataggcacccaaatccgccttaacgaggacttgaagtcttgaacctaggtggtctgtgtttacatccacacccttgaccaagtgagccagctcaaataaactgagccagatgaaaagttgcagcgcatctacccttttctttggaccagtacatgctcagctacccttgtcatctttcaatctttgttggagctaccttcttatgtattaatatatttataaaatggttgtttgtcaggcccagctattgatatacttcatgctcaagtacgcaatggaaatactactctcggaatcgagcgttgtcaccacatactattttagctggactactagtgttgtggctatcttcctagcgattcttggattaacggttcttccagtaaatgccattgttggaagctacattacaaatttgtttgaggataggtaagctttgtactcttaaaaaacacaggaaacttttatcttctctgggcactgtttttctcttaaactaagaaatgctctgcagatatatttgtcaattgttttagaaattaaaacatactctaaagcataatgaacagctgctaatgtggccgttctcatttgcaggcaaattttgttggcatctgaagtcatggttctcatcggtataatcatgagctttcgtttcacacctcattactccattcctcaatatgtcatttcagctctcatcacatttgtatttgctgaggtgcttgaaggtatgtatgtttatatacattggagattacaagacggcaaaacctaaatcaatcatacactgctgatttctcagtcacgcaacttctaatgttgagccatgcaggagtgaatctgtccttgctctcacgagtaatgtcatcgaggctttcccgagggacctacaatggtggactcctttcgacagaggctgggacgttggcccgtgtagttgcagatgccacgattactgcagctggttatcttggcacggacctccttctcaatatcactcttgtcccatctcttgtgatctgcatagtctccatcgcagccacactctacacttacaacaatctctattgaagctcttagctgtacaagtgtacaacaatgttcctaagctaaagcgattcttgcccacaatgggtttgtatacgattcctgcccacaatgggtttgtatatctgttcaagcatggtttgtaaacattttgatcaagttggtatgcaaaatttcttgtatttagtgtatttatgtaaaaattcatcctgtaaataattatgaactatgagcctctattgctggcttatgtattagtccatttatacttgtcttttagccttatgttatttgaatttgtctaatcaaggccatcttccaatacaagcacatcagtgacacattactgaatagaccttttttggacgtgagatgctaaagacaacctataactgaaaatttttataacacaattatgttctttttaagtaaatggtagcagctctgcatattaattaagaggaaagagtttatatacagtgatgttgaacacaacaacaagtgaggaatggaaaaccactcacaaaaacatagattgaggcgttgttacatatgtattcatctcaacccatatatgttgaagtggactaaagtgaaattaaactaaattccatttcaatctagtctaacatatgtggattgaagtggatgagaaatatacatgcgaccttgagtgaatatatttacatcaaaccacctgattttccgaaactcccagtcctaatggtccctgtgcagactcatcaaaacccg

SEQ ID NO: 4708 - DNA, 4848 bp, Sorghum bicolor
gttttgcgccaaccaacggtcgtctcaaaagcgagatagtgatgcatgtttctttaaaaagaatttgacacgtcatatatgtgttctggtcaatgcacatgatcaaactgataatcgagtaaaatacactgatagtttttaaatttgagagagtatttatttaggtttcaaactttatttttttaatttgtaggtctattaaacttgtcttggactctagccctcgtccacacggggttaacttgcttcatataccgatgtggtatgctaactgcctgactcaacataatggggtatatgacatgttaggtttagtacttaaacttcgttatggcgatgccatctaaaacctaaacttttaacattacatatatatatctaggttcctaaactaaccacatggggtatctaaatttgcacgaaagtgccatccaaacacctaactctcttagaattatagctaaaatccccaaacttgctaattggactacaccaaatcgaaaatcaccattgtttacggtaagccaccaatgtgatcgctgatcgtgcgcctagcatatggggccatagccgtgcaggtgccatatcaaattatcttgaacaataataatttagacctcgtttgatcctattagcaagtttaataatctagcaatattggattgagatctggatatcgcgcaagtttgggtacctgtacaactcgtttagcaagcttgggaacctagatatatgatatttaaagtttgggacttagatgtcaccattgtataagttttggtactggccccaacatacggatcccacaccagctatgagttaggtcttgtttagttccaaaaatttttgggaaatggacactgtagcactttcgtttgtatttgacaaatattgtccaatcatgaactaactagactcaaaagattcgtctcgtcaatttcgatcaaactgtgcaattagtttttattttcgtctatatttaatactccatgcatgcgtccaaagattcgatgtgacgagaaatgtgaaaaattttgtaaaattttctgggaagtaaacaaggccttagcataccgtgaagataagaaagagaaacctgtctctgttcacttgactcaaaagatatgatagaaagtattcactaatctattacgagagaaaaatacattgctaaacatcagatagattcagctaataagtcaacgaacagggctaaaccgaatctatgtgtcagtacaatatttttatctcacaaaccctccggatctaagagccggcaacgtaaatttatttttggtaatttattatacaccaacaaaccatgagtgagcagtgagcactattctattgtaatcaaagtggcactcacggcttttgacaacctataatatcgttgccattttcggtacatggactcttttcagttacttttggttgttggagttaaaagtttaggcattgtctaactctattttttttagcaaaataagcattgtaacatttttatttgtatttgataaatattgtctaattatgaactaactagactcaaaagatttgtctctcaaattacaaataaactatataattagttattgtttttatccatatttaatgctccatgtatatgccgcaaaatttgatatgacaacgaatcaaaaaaagtttgcaaaatttttttgaactaaacaagccttagtccgagaaagcaaattctattcctagtgcttgaagagacgtgcgaagctctgtcggagcgtgcaaaaccaatatgaaacgtgcaccacaacaaacacaagaggaaaaagagagggaaaaaagccctttcagcacacacaaaaaaggtgattttgttctcccaccgcaaatcccaaactgaagccgccgtcgaccgtcgtcagactaccggatagcgatagatagagcgccaggcaccacacaccactcgtccctgattcaggccacggacagcgaccgccggaatctgcgtgccggagctgatgtccctgatgaccacctcttccgccttctcggccactctccttccgttcccgccgccgcctcgcctctccgttgcccgcctgcgactccacccccgccgtcgcgctctggtccgctgcgccgcggtgtccgagattgccccggccgcctcagccgcctacggcgtcctcctcctgggcggcggcgccttcgcatgtactacgcgcgttcccggtccccctcctcggtgcatttgctagtgtggctgctctggcctgtcgggttgattacgactttattccttgaccactgaatgtctgctttctggtgttcagatgcgaggtcggggagtaaaggctccatctacggaggactggctggagctgcgctcatgggcgctgtgagtggacctcgaatgttctctagatttcccaactaccgcatttttcgtttgtttagattagaagagtctactttgcagattagcagattatatatcgagtgccttgtcatcatgccatggttcctgctacaacagctcttctgagtcagctatgacagtgtgcttagaccaaattgcagacaggattttgcattttgattctgggttggttggaaacactggagtttgaagtcttcggttggaccagagtgttgttcaagtccccggtagaatctaattgctaggtgcaggccctgttcggctggctgaaaaaaaggccattgccaatgttgatgctgatttgttgtgagagaaaaacattgttccggttgctatgtgctgcaaaggacgtccaagccctctagtttattcgaggggcaaatggtcgtacgctcattgtctttcttttggctattcctgtgggcatatgggtttaggaaatctaatgacataacagctactactcgaatgaacattactagaagaattttcctctcttttttttgcctggtcatggcacgagcaataaggggtccctgtatttattcttaggaagcgtatcttaaaagctatatcgaatcttaacagtaggcagttttccagatggcaatatttcctctggaacaataaccactaaccaggattcctgtggaaatgtattgccattcaaaattcgtgcattattacgaattaggattctgatgcttgtggagttatgagatggaatttgtgaaacgtaatgggaattgttactttgcagtgaactatcgtcatcattcaattcgtgatactacaccaaattgatcatgataagtggaatgatgaggctggttttttgcttttccttcttcttaggaagagattcgaaaagaactactactacgttgaatcttaataacaatagaaagttttctggatggcatatcattcttgtggaacagttaaatggattcctgtggaaatatgtttccaggtttgttcatactgattaggactcttatgcttgtagaattatgggatcgaattcacaaacaagtcttggaattgtcattctgcttgcaatactacaccaaattggacgttgaatcagattcgtaggcatttttcatcatttattccagttatctttttggtggagtctttctacccgagttctggattattgaaaaacagtgaatcataaatgagatattatgtatgaaaaatatgtagccttggcaaatcattgagcttgttgaatttaccttttggtttcagaaacttttatcttcaaagcatgcatgttcatgtttccagttttatgtaaactactgaaaccatgagcttatttatgtcatcgagaatctcagaactaataaagctattctcttctgtttgtaagcagatgcccactacatttcatggctaattttagcgggaacatatggttaacaatttttcttttttgcaggcctattatctgatgcagtcgcctgagacgatggcagcaggtgatgctgttggatttggatctgcctttttatttgcctgcgtgtttggtatgttccacattttttgtgcttcagttcccatgaaactcagataagtcaaaacatccaacccctcctcgctttcaggtatcaggttgtacaatagccggaaactggtgccatctggccttcttctagccctttctcttggtgccttgggtgtcttttactctgcttacttgcaagacaaggtgtaaaccaatttgatttagtagttgaagaatatgtatcatctgaagcttccttgaaggcttactctgttgggttgtagatgtagaactttgcatcagctgttggtgcaccttcctttcgttgtagttgtaacaaagagcatctagtgttctgtattggttgccaacgataagtttcttcaagcttttcagtggccattgtgttttcgagaacgtgcttagcacgtgtttcattaagaagtcagtggccattgtgttgattgcatcgttcagccattgtgtttggcggaccaatgaaatctcggcctgttattaccaaggacgatcgccggtgcaagggaacgttttgttggctcgctatttccacaagctgctcgacaggatacctgtacagatattttgttggcggtggatgatggacacatgaatcctgcaacgactatcatgtgcactggtctccgaccagaatcgacaactccgtacgaactagctcgtagatagagagcgagtgtatctaccatttggctgtttgttcgatatgcaatgcaccaagaatgattagggtgcagactgcagacaggtatgggaaaggcattgccgaagttgaaagatagtatatactccgtacgacagtagcttgtttgtcattgtcgttcatcttatctgtggttttgtagcctgtctgacgtctagtcgttcatcttat

SEQ ID NO: 4709 - DNA, 3740 bp, Sorghum bicolor
gcattcgacaggctggagccctagacgaagagcgcgagaggggctcgtagtgtgaaattacataaatgacataggatattctcccaccgtcacggagcatttttgtaatcgccttaggtcggtttccgtcctctatataaagggattgtaaccacacttgaaagggacagagagcatttactgttttcacctactgttgagcacaccattcactattgcttggcctctcaggcaccgtgtgagaaggttcttgatacacgtgttactgaggagtgcagtgcgcattttcagaatgatttggagtatttaggatgtacagttgctgagctgcatgacaaccacagcattttcagggctcgagatttaagcagatgtaacctgcttcacaaaaaaaaagttctaaatgaattcgtatgcaaaatgttgatttgatctctctcaactattgcacgtctgatttatctctccctcgatccactcctccagttttcttagtcagaattttgtgatagtcgagcgggtcagttaaaaaattttcaaaaaaatgtaaaatatctttttaaaaatatacattttttcataaatattgcattttaaaatactaaaatatggtttaatttagggaaattatagaaattttgttttaactcataaaatgaaaatagatttttttttgcaatgtcatgttctatgttttcctgaactaggcacaataatatatagcatgatgttaggaaacacatgacgcccaagccgtgtaaactgccttcctgcttgtagagtttttttttttaaaaaaaaatatatacctagtttcatttttttccaagttaaaacaaaatttctatgaacactctaaggttaaatcaaattttggtatttgtacatgcatattctgtatgatttttttagaaagtacgatttatctcacttgtaactgacgtgctacctaggacgactaacgtggtaccatgtccggtaaaaccgttttcaaacccgcttaaagtggtgaaaatcttattctcaagttattaagcaacttatacttgcgcaatagtgcggacagactttttttttgtcaaactgtatgtactccctccgtctccaaatactgccagacaaattagttccaatgagctgcatttaatgtcaactaaacagactcaaacaattaccatgcgccaaagtactactccctagaagaaattaaatggactggtggaccacggaacttctgaggagaattaaatgggctggtggactgagtatgctagtagaaatagtagtatttgtggataaaatttttctagtaaaaatagcagtatttaggaatggagagagtatcatatttgttgatcggtccattacggtggtaagcaactttggtaccgcaccgttcaatcaaatacgacccaaaagtataatactgggctgttcatttggtcacacacacacccactgggccgataattcgtatggcgtggaccgacaagtagtggtagcagcttcctccatttcaaattgtaatgataatgacttacaatttggaatagagggagtagattattatcctgtctaaagattgtttttcaaggcatgttaagatcctactccgtatatgaactgaaacaaatatttagaaagtacttttcattttattattaagattactttctaaattctcgcaattcttagaaaccaaacgttgcctaataaaactctatattactgtatttaataataatagtaacagtaataacacacaaggaaagaggagaagaagcggcagggccgccgccgccggggataaaaacctcgggtagccgacgagtccgttggcactcccccacccgcgggccgcggtaactcccatcgacccgtcctcctatttatcccaccaggccaccgcaccaccggtctgaagcgtcgtcttgcctcgcgctgcaaccgctgctctcgttgtcgttggaggcggacaaggagggtccagtccggctggtatggcttccggaggcgtcgcccgcgcccgcctcgccgaggagcgcaagtcctggcgcaggagccacccccacgtacgtgcgcgccatcgtcctcttgttgctagttgatctacgctccgtcgcgcagttttaaggttggatcggatcgccgatgagatgcttgcttatcttcttgtttttcagggcttcgtggccaagccggcgacactgccggacggctccgtcaacctgatgctctggaactgcattgtccccggcaagaaagacgtaagcaaaactcacccccacagcatgtgaccttctcgatctgtttgcgcagcgctgtgcatggtggcaatcattgcacgcgtgcgttgcgtcctctgttcaattctgtcctcgatcgtcatggcggccatgcaactccctttcgtccggccgccggcacgttacttttcatcccccattgggagcagtcaatcctttatttggaacgaaagcgaattgcacatacgaaatgcttgcctaggtcttgacttctccctttataattttttttgaaagaacaggaggggcagaagagcccctactccctttataaaattattaatataaaaacagcagttctctgccaattttaagtttaggcatagatttgttgaccttatttttatcttgttgaacaacttttcataattatgtctatataatatgcagactgattgggagggtgggcatttcccattgactctgcattttactgaagactacccaagtagacctcccgactgcaagtttccggcaggtttcttccatgtcaatgtctacaacactggttcagtatgcttgtcgatccttgctgacgtacgtatataagctttaattgggcacttcctttacaggataatcagttgcatgccatgcagaattaaaacatcacttggccatcatgtttttttatatatatatttctttcaggcctggaagccttctatcacagtgcggcaaattctaatcggcattcaggaccttcttgataatccaaatccagcctccccagcgcagaatttatgctacgtgctctttacacaggtttgtcaggcgcttacagtaggaagataaaatataaatcattcatacagttcagtcaggcgcttaccattgcgttttcttctgtgccattcattgtcttatgcagaatacgccggagtataagaatcgtgttcgtcaacaagctaaacgttaccctccacttgtgtaacgttggacaatctctggcaccaaaccagttccccacttcgttgaacactgtcaagattgtgtgctctattattcatcatttcaggaagcttgttggaactgttaaaatgtatttcagtgagtcagtgacttgtcgtcgtacatgaagctatattgtgccttttagtgtccatgcaaatatgagtgattcacattttccatttttgtaactagctgtcccgattccgttaccagcgtaacacggaattgctgaaagtaactttgtttgcaattgaagcggaacaaggaggtacgagtagagaagacaaaagcagaagcatgttgccgatagataataaagagcacttgcttagttgcttcatcattttcaaaaaaataaataaataaaacaatcctcaaccgaacagagtgcggtgggttcgatgtgctatactgctatgtgccagtcctgaactacctctgttagggatcgttcggttggggtattagagcatgatcaaa

SEQ ID NO: 4710 - DNA, 4141 bp, Sorghum bicolor
tatctgactgcctgacggtgggggccggcggttgctgcttcgctgactggcggctggcgcatgcaggcgtgaaggccgcggccgcgccgcgccgcgccgcctcgcctcgcctgcagtgccgacggcccgacgctccgcgttcctgggcctggggctgctgggcagctgttattctgattctgcaactgaggaaggcgagggctgtatttgcataccgctcggcgctcgatccacgtgagaacggagaacacgcaggtgttttggtttcagatttgaggctgagattgctgaacacgcggcaggcaaaatcgctgctgcgtccccggctttgtgcatcttgttcgccaccacacaggcgtcaatgttctcggctaccctctgcggcgagaggtccgagcccgacctctgcatctctgctctgccggcggccggcgatgccggtgcctgcctgtctggaagctgctgacaacccttggtttaattatgaaggctcggatccgcctctcactgggagtgccagctctctgctaccaaccttttcaagtcttcagcggccagcggaccagtccaggaaatctactgcggactcagcttatagttgatctccgtcagtttgtagaacacacgttgaaaggagaccatccaggatgaaaagttgaaaacacagtgtagactctaatgtctgcatagcttacagcagtggccaattttgatactgcatcacaacaaatcaaacgacttgcagcggtggccagttgaactgacaactgagcaagctaccgacataatacagacagtaatatgtactagcaaggcaagaagactggaaaaagaaggtccactaaaaggacaatcaaggtcgtagcttctgctactcgccgttttgtattgtattgctaaggatggtgatggtcctgctactcgccgccacagctgtgccatccagcgagaacagtcaccatggcggaaacatgcgcacaccatcggatgcccgacgtactccacgcacgcgcaatgagtcaatgcttgtagcagggaaccatatatatatatatatatatctctctctcttgctgtggtgatcagctcgtggatgtcatgaccagaggctaaacgaggacaaatccaaatgaagcaatcgtcgcgcacattgttctaccactctccccagttcaccaggtccgtaggcctctcgccggatgccggcctgcagcgattacaagctggagctggcggacatcctattaacgaactagacacgaggtgtgggtatcgatatcgaagacgacgtgtggggtatggggagagagagagagagagaaagagagagaggtactgcgccgccgttcatctcaccaccgtcgccgagcctcccgaagtgacgggctctcctgacgcgcggaggactccccatccatctcacatgaggctccgcccctgcttccgtcaccgctggcgggcggcggcgtgccgcactgcgatgcggccgtcggagtcgtcgggggcgggcgacggccaacgggatcgggcgcttctgggcaggcatttcgcgaccaggcggacgcccaccgactcctcccggcggcgttccctcccgaggcgctggggaaggaggggaggggacggtggtttcgtggagagagaggagagcgtgaggaagcgtgggtgtcgaactgcagccgcgcagggcagaccggaccgacagagggagaaacgacgaagacggcgttcgcgttggagatgtgatagactgttatcggcccggcccactttatattattcttgcctgtcgcgggctcgcggcttgcagattcggcgaaaacgaaaaagtcccgtttggcgggcacccccgccattcccgggcatttcgaattctgaattttgatgagaaccccaccaaacgccgagccccgccaggggtcagtcgtcaccaagactcgccagcccgctcgtcggcgctcagtcaaatctatcctacctcgtctagactccgctccgccatggacgacggcgccggcgaagccggcggcgaaagccaggtacgccgaatccgtggggtctccctttcttctgcccccgacccttatcgcggtacaggtacggctctcgccggagtaatccatcctccaggccgctcgcttacccgcgttttctgtcgttgcaggttcacgtgtgcagttcgcaccccctttcgttcccttcccgtgcgttcccctccatccctcccctcgcgaatctagtgtttttcttggcgcatcgagtttgaatctctggctgtgctgacgcttgtttgggtgttctgtttcttcgtcagagccgccggacatcaagaattggttctcgagctatgtgtatgactcaccggaggtcccggagctggttgctgatcacaacggcggcaacggcagcgagacccaagacccattcgaggtaatcttcttttttttgctgaatcttttaatcaggtcgtgaacgcgttacaattgctgcaaatctcatcctcctacctattaggctattaggccagctaactgtatactctggttccgttaccttgtacccattcgtcactaaaacattctctccaggatggtggagttgctttgagagaaaattgtctaggaggcgaatctgagcctgagattttttctggaaaatatttggttccggttgatgggaatgtgatgaagcccgcccccaaaaggaagcaaagcctgcgggcattatttggagcgagttttctttatgaggctgaggaagctactgaaactgaaagtcatggtttgttccctgtgcagctaaatgcactgaagcatgtgtcagatcgtacaagccttcctcttgatgaaatatgcgaggcacattcagaaaaaaaggattgcgcaataagcttgcctgatagtactagacatagccaggaaggcacaactgagcacaacaaggtgctggtcgattgtgatcgtattagttcagctgacactcaagaaagcacccctgcagatgaagttgagagtaaaaagtcttctaactgttatgatgcatgtttggctgatattggagacggctttgcagaagatgacatccatcatattgaactgcccgtcagtttcaacagtaccattctagctggaactgacaaaaagatccaagatggtgttgacaacagcacaagtcttgttagtcgcaacagcctcagtttagctgacactgaagataattctccactaggggaaaatgatagtgaagagaattctccctcagggctagggcgaactgacaactggaagccttcgttagacagtataaagccacaagaaatagttgcatcagatggttttatagctgtaaagaggaagaagctaccagatgaacacaaaacaaacaaaattccgaggcacccaatggggagagagaaggaaaagggaaacttacaagagagcggtggcatttcagaccaaaaggtttttgtccaagagcaaaccagacgtcccttggcagataggactaatttttcagaagtaaacacagctccggcaccagagccgagcaggaaatggaagtgtcctcgcaaaggaaagccctatgttggtcgtccaatgaagcagctccggttggagcaatgggtgcgccgtattaattgacacttcatctgccatcctttttttcagaagagtatgcatcatcaggttgacagtttagaccagtttcagctctaccagtctgtagaagtgcatgccacccaagtaggagtagatccgttataatatcgttatgtttgttagctactattcttgtgctactgctatcccggttcaattttatcatagcaccagggtacatattggcagaagactgaactgagacaacttgatgacgggtgtaagattctgtgaatcttgttttctgatgagattctgtgttactttttaatgttgtgcaaatgtttggtctgttgggaaaatgcttcccaaactgtaacgagatttcataaacagacgcatgaatatacgaagacttgtgtgcgaaaaaaaaacaacacacaagtaaagactgtatgttgggcctggctattttttggaccgtcagtcggcccacatcttcctacgactcaccggttcttccgaggccatattcctgaacg

SEQ ID NO: 4711 - DNA, 4591 bp, Sorghum bicolor
cagcgcagtgtgatgtaacaaatactaataaatcatttcctatcacgcagtaattaattaaccaatattttttctccctcccttgtttcttgcgcgactaggctaggaccggttggctcgatcgcctcatcatcacccggccggataattgttaattaattggttagtgcatcgttatcgggcaaggggggttatcatcaggaccggttccaggcgccaagccatcgatcgatgtgatgcgtaaccgcagcacgaataaattactcgacaggggctttgttgtaaccgatccttaattcaacacccaaataaattgtactactatattcggtggcatggaaatcatgatgtccgcacagtaaacctgagctgaacaatgtgacagcaccagctaaataattgaagaagtctgaaaaacgcgccgggggcgtgatgtcaaatttttttttgaagaagtctttcttcaaaaaggaaaaaagaagaagagataattgtagaagtctcaaacaaaaaaaagctaaataattggagacgcaacccgtgggaggtggcatagcgtttgcttgcgatcgagcggccagactagtccaaagggcgttgcaagggtggttgaccaatactaccgaatgccgtacgttggccggggaaaagagataatctactcttttttttttctaaaaaaaacaaagatgcgatctttctgctgaccttgaacctgctacattacttgcccagccaacccaggtgatgatgattatggcaagaaacaatcgggttagttaaaagcatctacatagaccaatcagttactattgacgtctctatatggaaggggctagctagtggccatggagccatgaatgaacaggtttttttttttgacaacacatgaatgaacaggttaggtgcgcattagaaaatgcatcttcattgcttgtacagtacggagcatatcgagaacaactgaacaagttctccaaacagtgagctccattcttccatccgagacagcacgcacacgcactggagaatgtgaaagcgagcatctgatcccctcctcctgccccatccacagtggtggtgatcggttgcgcctcctcccctggcctgggcgcctggccaggtgaagctccctcggtgcggccgtacgtggatgatctgcttggcggtggcgtgactagaaaacggcgtggctagtggtaacttttcccgcgggaaaatcgtggctgggtgctttggcacatctgcactagccgccgccctgaacggatgggcgactcctagaggctacagcagcagcattggtggagcaagtgacgaagaaaccgcacaaagcaccaggtaattctgaccaataaacaacaccgttaaaggtgagaaaacgagctagaacatgcatgtgtgccgagacgggtcgggtcgggtctcaggttgtgacttgtgagctgtgaccgcctgaccggtgcccgcaaccagatggaacctcgactcgacgtcactgctgatggccgcgtgccctgcaggagctcggacgaaaactccactcgacagcacgactggcgtgcagtgattcacattttcactgccagtgccagtgcagtgagagcttcttcactgtgatatctgcatcgagcaccgtgacagaggtgtcacggtgaagcaacagcaatctgatggaccaggttacatctcctgaacatgaagcgtgacagctgacatggtgagaaggcaaaaattgttgtttatagggcacgatgcagaacgggtctcgcggccaagcgggcggccgacccggaaacggctgggcagcggataaggacgagctccgaggcctcgactgggcatgacacgaacacagagcatcgtttcctgttgaaaaatttaccaccactagcgcttagcctataccagtgctgtgatacttgtcgcagcagcagctgctgctgcctgctttcccccggtctacaaagacctcagctttcctacctccacttctttcttccaaagccttcgccttttcctctcgtcttccctccctccccctccaaatccccccctacccctactctttctctagctttctctccacattctccctgctctgtgcaccttgtagtttcggttgtggatcgccggaaatggcaatcgacgatgaatcgccgctcagagtcaacaccagaggcggcgccatggtaacgtgtactctcttcttgcctttttccttccggtgttgtgctctggtttctttgttctctgttggactggcgctaatggcggcgccggatcgaatgcggcagggaggaggcgggtgcgacggggcggagaaccagcggtggccgccgtggctcaagccgctgctggggacgagcttcttcggtcaatgcaaggtgcacgcggacgcgcacaagagcgagtgcaacatgtactgcctcgactgcatgaacggcgcgctctgctcccagtgcctcgcctaccaccgcgaccaccacgccatccaggtgagcacacactccgcggcctcggaggaaaaaaaaagtgacatttcttggcgtcggattggagcagccggcgccgggccctttctttgaaagaaacggcagctccggccggcgcccctgcttccatccaaagagtcttcttgttatcggtctctcctccgtcgcagagacttctcttcttgttagttgcatccaatccaaggttgcaacggccaatctttcgtttcacgttttaaggagaggtgaaaaaaattccaaagatgagaataactgactttcttgaagtggcagcaaatgtgcctgttccatctgcggcttctcgctgacggcgatgcatgctctgttcgcttggtgttggtggtgtgcagatacggaggtcctcctaccatgacgtgatccgggtgtctgagattcagaaggtgctggacatcaccggcgtgcagacgtacatcatcaacagcgcgcgcgtggtgttcctgaacgagcgcccgcagccgaggcccggcaagggcgtcaccaacacctgcgaggtatgcgagcgcagcctcctcgacaccttccgcttctgctccctcggctgcaaggtacgccaaaccaattcaaggccccccattgtgctgtagctagcattcccgcttccagcttcgcacgtgtggtttgcaacggcagcactgtagtagcgctaataatgtcccctcgatgcgccgcgcagatcgtcgggacctccggcgacttccgcatccggaagaagcacgtcgtcgttacgaagaagaagaagcaggcccagcaccagcaccagcacaggggcgcggcggcggcgtcggagtcggaggacgactcgtccaccagcaccagcggcggcagcgacaagagcagcgtggtgcagagcttcaccccgtcgaccccgccggcgactgccaacagcttccgcaccgggaagcggcgcaagggcgtgccgcaccggtcgccgttcggcaacctcatggtggagttctagaccaccaataccaaaggcgcggctccgattccaccagaaacagcggtacaccactgtagcatacgcacttctacataccatctataggtgtttgccggatcgaccggtctacatacatagccagccaaaaggagctagtagtagcaagcaataaccaagggtcccactgcacgcccgcgcttctggacgagacgaggaggccggtgcaatgcggcacgtacgggtacggttacttccatagcagttacataatgcaagttcacactgtgctagtaacaacggtttgggtttggtgcctctgaaaggaaacgaggtagttgtagcagttactcttgtcgtcatcagccagtcactactaagttttgcaagttttacctatataggtgttttcctagttttactttttaccggcggtgcttgatataagtagtagaaatgtacatatacatataatactgtcacagatgggggggaatggtgtaggagtgtagcttcccagtgttcatattcgtgtttgcctttgttgcctgtaataaaaaggataagaaaagaatgctgctcctggatggccttcaatgtcaagggtttgtgtagtacttgtgttgcttgcttgattttgatgcttggtttctcttctcctacccctcttttattttcctctgtaccatccaccgccggatgctagaatccaccgtgcaaatgtgcaaggtgccatgcaggggggctgaaacggtgctagcaatggaatgtgattctgcggtacggcgaggtgagccgtgcccgctgcctaactctggttgacccgccggtcgatgccgacgttgtcgtcatcgtaggccgatttcgtcgccgctgggcgggccggccggccggccggctgggtgtgttccgcccatacggaaaggaagagagtcaccacccgcccgcccttgcccaaccacggtagggccctccctctcccagtcagacgcaataaagacggatcgatctagcagcccagatccatgggtcgtacggcgcccaatgatccgtgtactggcagggtccacgtgcggcttccgggcttttgaaagaatccgtcccccatgagagaaaa

SEQ ID NO: 4712 - DNA, 5059 bp, Sorghum bicolor
ctagaacttcgatgatatggacgcttacaacaatgaattataaaagattatgcccacagtttctagccttggatccatcatttttttccctttttccttttcttctcctacggtcctacctcccacgtctcctcctaacacctttaattatgctcttactttattccaaatcatagtacagttcatgcacgtacaatgacacgcgcacggcccgtgtaattccgaaatattgagttaatagaatttgagattgatggagccactgtagacactttgttgtcaatataagagcaacctcaataataaagtcaacttgctacctcaaatgttttttttcaaaacatagagtaatctaaatatgttagtatagaaaatgtgtaaacaaagacacatgaatcatagaaaaaatgtgtgagttcttcatgaagaactgacttatcattcgttctctctttttttattggatgaaatattctatacgagcaatgagctagctcttttaataccgttggagttatcctaattgtgagcttaccctatgatatgtgttgttagtatggacactgcactccctccatttttagaaggaatagaaattccacttcctaagtcaacaataataattttgatccaatatatatataaatttttgcaaaccaaaattaccaataattatgatgtttaataagtatgactagacgatccatgaagcatattttcatttttgaaatctaaataagacaatatttttctaaactttgttaaatttataattgtttgactcctaggtaaacatttttctcggacaaaggaagttccaccaccatgtggttagactttctgttgcaatggaagattttcaaacgaacctttaacaaagagagatcaagtttgacgtggacgaggaaaacatgtgagcaaaagaagcaaaagagtaaattttattttaccttacacggcaaaatcgtagctctatatgcaaagaaaaacgaccttgttaattagaaggcacacgctcgtactgtcttagaagcgaggaaggtcgtcaagaaaatcactttgttttattattggcaagcgaaatttccactctcatgtatggaattgatgcagtctcttctctccgctgcctccaaggctcatagtcaaaccgtccaccgtccatttccctgtcacgcattgaataatgttattccttaaaaaaaaaccccactacggcgaaagaaacaatgttgcattcgtgtgccattttagcccgcacgatcaggtctaaacctgagttattagcagtttttttttacaaagcacacttgccatcatcaaagaaatggcacatggatagcaccatttccagccttccagggggtaaaagccgcgcaatgatagtagtagtactcgtagtaggagcaacacatgggccttgtttagttcctaccaaaatcaaaaaaagaaatttaagatttcccgtcacatcgaatattacggcacatgcatgaagcattaaatatagacaaaaacacaaaaactaattatacaatttatttgtaaatcgcgatacgaatcttttattcctagttagtctctaattagaaaatatttaccacaaacaaataaaagtactattagcgaaatccataaacaagactatggtcagatacagatcagactagacggtccagcgtcgatggaggtcccaaggcgacgtctctctccggacagcgatgccgctggccgttggtaggtagttggacgcctacgccacagcacagctggccgttccgatcaggagcggcaacgttgccgtcagtgcgctgctccccgacggccgttaactccgttgcctttcagccaatggcaatcgcaggcgctgtacggcggtgtgtgccggcacaccgccgtgccgtgctcggtggtgcctgcacggcgcaggccgggcgcacgcggcagcaggccccccgggcgctataaaatggggcacccggtaggggagcaaggagtccacggaattgaaaacccaccgcaccatttcaacctctcttccctaacctcgccgcggcacagcggtttcactgctcccctcacctccgctcccgaacggccggtctttgcatggcagcagcagctagttccaaggggcgggcgatcgctggaagcttcgtcagccgcgtcctggccggcaaggccgcttccccgaggtactgagacgacgggccacaagcggttttcggttttgccctgcgattatggttttttgttcacctgctactgctagtactatgtttgaggatgcttgttcttgttcagttcgtccaagatctttggggtagtttagttgtagttgtagcagagcgatctgtttgcttatcgtagctttttgtggataactctggttcagtgtgctgctggtgccaagattttggtcagcagaaaatatactagaactcaggaacagcagaaaatctactagaactcatcttctcacatggtctgctacgcagatatggcaaccctctgttttggcctttgggaacatcgccagcttgtttaccgtagaacacaataatagaggggccaaccaagggggagcacatggaaatggaagcctggcacagtgccacttccgaactcatttagtatgccaccactccatctccgtagaagtagaaatccttgcatctcccaatcaaaccagatccatcatccgtgtagtgatgtcttcatcaaaaggccaataatctcaagtttaactagggttgaaaaaaaatctcaacatttatacgtcaatagacataaacattaaaatctccaatctgatttttttttcaatatttatctgaactttcagataaaaatcgatcgattcatgaaaagctagatttactccgccttcttcgctgttcttttcgagcgctttccacagtagatatttcctgtgccgttctgcccacttcagactgtcaaatctgcaagaacgactgcctgtcaggaaaagccaaacgccacgccactcgggcactcgcactgtccactggcaggcaggcgcacccacacaaagaagatgaggaggagcagtggagtttggaggcacatcaaagcaagcgacccacccgttggcctgctgattgccccctccttccatccatcgcaatcgcatcgctttcagaaaaatttctcggggacggatgggtctggtgcgcggtagttgtcgctccaccctctcaccactcatcactccatctaccggcttgccggccgatctgccatggctcctggcgctttggtttggttctcactcaaaggagacccctcctcctccgtatgacgggtggggccaggacgtgaagcacccgcatccgccgggccccacttgccgtcctttcgcgtccggtccgtactccgatccccatcgagccgggccgacgaccgatcagggccgtctgttgctggtcccccggacacacccaacacccccatcggacggtgcccgatgcggcgtggctctgtagtaccgaacgtggtacggaggtgagtgggggtggggatggaggtgccggccacctggcctcgcctcgctcttatccgcagtcgtgcgtgtcctcttccccatgtccatgtgcgcgcgcagccctgcctcgcgtggaactcctccgatcgtgatgcgttcgagggtgaaaagttttcgatattctaggggatgaaccacgagacgaactttttactgttattcaccgctcctcatctcatctgggtgacgtgtgtttcccgtgtgcaggagggccgtgcacgcctcggcgtacgacaagaacctggaggaccaggtgcggccggcgttcgtgccggacgatgtgatcggcggcggcgccgggaaccccgacaagtactggagcccgcacccgacgaccggcgtgttcggcccggcggcggtggaccccaagctggccgctgctgctggcgcgccggacgctgccgccgcgaatgctgcgggaggcacggtgctggaccagaaggtgtggttccgcccgctcgaggacgtcgagaagcccccacccgtcgcctgagcggcgctagctgtgccagcccacactgctgaattgctgataaggagagcctggcgctgatacacctatcactctgctcagctgggctccctccctgcttatcactgcagtatagtagcagtgcttgatagcggtgtggctgtgctaataccagcattatcaatataagtatataaatactggttttatagtagtgtagtagtagtatcaggcatggcgtgcatcagaactggctgtgatagtagcaacgtgatgctcgtgcctgtaataagaacaagcaggagatgtttgcctgtgctgcttgtgcctgtgatgtaccggtgttgttatcagtgttataagtacttgggtcactggtttgtgcctgtgtttcttacccatgacgcagttcatatactccatccatcccaaattctccattcgcctgttccacggcggaacgtcgacagcgtcatggactccaggactcaggcacttgtgtgatctgttgccagcttcaactaagaatcagatcagttgtccataaaaaaaaaagaatcagatcagttgccgcggttcacaaaatgtctaaaatgtgttatcgctaagcgatcatttgtcggcaaagcatggtttcaaaatggaaaaatcctggatgatctgtaacgcacttatggtcttttgatgttaattgaaagaccggagctatgacccttaaactaaaaaaaaaatcctggttgattccaccgaagtttaaaattacggcataaattttcatgtaccatgagctatctttagacgctacgtataaataaatctttttagttttcttaaatttgatatactttgattctccaagattcttacaatttagaatggaggagtactatataaatagaaaagatttgcacttatacatatattttctttttttaaaaaaagaaacaggaggggcatgcccctactgcggattgcattaaagataaaagagtacaggtacaggagcaaacgctcaagaaaca

SEQ ID NO: 4713 - DNA, 4118 bp, Sorghum bicolor
  misc_feature (3965)..(4112): n is a, c, g, or t
gcacgtatgttcctcatttctgtttcccttgtttgtcatgacatctatcaacatgaatatctaatttcaggcatgtttatgtttctcattgtttttgacaaactgcagcgaagaaggtgaacctagctgatattggcatcgttggtggccttggtgatgggtccgatgagaaggccatgccctcgtggaccatgggcaccggatctgggctaggaatatctgggattccaccatcaacacaaggcggtggcatcgagagcttagccaactacaacaagcatcaattcggcttcaaataagccttgagctttcccctttcatacaggaaaatatgtcacctgcggtttcctcctctgccggcctgctccttccatataccttattgatttaatcacttttttgtttttggttttggtgatttcactacattacattacattgcattgtgtcaaccaatcttggcccgtcttgtcacgcgtgtatgttatttatcgggtatgttggtaaaagcatgcaactacccatcacacaccctgtgtcaattcgatgataggtatgttcgccatgcagtatgtgtaattctgtgacctgcctctgtactttatacagtactgtagcatttcgcagtgcttaataatagaatatatgccgttgatgttgagtcgtggccgatgctgttcgatgtggagccggttgatgtggtgaacgttcaccaaagtgaaccggttttgtcaacggatgtttgagagttcgatcggatgccaattgccagcatgacctgtaaatggagccgtcgcatcaccgatcagcatcggcagatagtataggagttgcgtccacgggactaatcaggaaagtgacgctacaggaacgctaaaacaggtgctccggggaatctttcccgcaatggtctcattaccttcgctatccacgcagcatcaaatcgtggagtatcacgaatgaatggatcaaaacgaagtatcacgaatgaatggatcaaaacgatgtccgcatcgtcgtacgagaagagccaaactagagtcacgaagatgcccgaatctagtactaggcttagcattaggagtagtattctccaagcacggtttttaaaagcgttgagaatggcgattggtctcggctaatcatctgccatgtgtgatggaggttgggatggagactggtccgttgatccaacggcaagagggagaggcggtggtcactggtcagcagccccagctggcgcgaatattccagcgatatcagcgccgctcaaacatcttcgccgcatctcccgctcgcccccgggtcccaccggaggccgccgctgccgtccccgcgcctccgccggaatattccgccgttctgcccgcacagccaacccacgcaaagattcgaaaccgacgtggtctgcctgcgattcccctccttgccttgtccagtctgaacgttttgccgttcacgccaagatcagacggtatttttctggtgaaaaatcgacgcgtcccagtcccagccctacgtgtgtgtgtgatggggtgcccagccgccgccgtcttggcgcctgggcctgaaggcgcggcggccaagtggcgcccccgggttggaggcgtggccgagcgagatgcgcccgtccggcgtccgctttgttctattccgcgcgccgttgcgttgcgttgcatctgcctgcacggctgcacccccaccaggcaccagctgctcaagtctgtcctagattcctcacacacatgacgccctcctcctcctccgccacgccctgcgctcctcctctcgctctcctcttgtcctcacatacacctgtgctcacgacgctcgcgttacattacaccggccggcctcgtctccccactagggactaggaggcggtaacgttatattcactctcttgagcaagagcctcgtcgtctcactcctgctgctgactgctgagcgcctttggccaacaaacagggagagcggcgatcatgttgcgggggagctacggctgtggcggggcggcgtcacgggaccccaagccgcggctgcggtggacgccggacctccaccagcgcttcgtcgaagccgtcaccaggctcggcggcccggacagtgagttcatcgctctcgttttccttcctctatccgttccccgtgtagctcgtcttgatgacgattgcttgatgagccgagcctctgcagtttgctagtatggtgcttgtcggtgtgcattttttcagtccgatttctgcgctgcctggctttgagctaaacggccaagtctagagcatagtcagaggacagcttgcagtgttgaaacttggaacaccctaaactggcacagctgcaattccattgacatgaccaaatggcagttggagaaaaaaaggtgccacaagtcgcctttgaaaaaaacgtcacgacgcgctagaaaacgccaagttcatattcctcgtcaagtctgaatagccattctctagcttttcaagctcatatattcatctgaattttgcttccttgaacatacgacatacctattactgtggagtaaccatttcttgtgcttcctggaacagaagcaacacccaagtcagtgctcagattgatgggcatcaaaggcctcactctttaccatctaaaaagccacctccaggtctgaactctcttcactgcctcagcattactagtcacacacctactctccttttctcttgctccattgtactgaaacattgaggcttttctgatgtgcacagaagtatagactgggaatacagggcaagaaaagcacaggcttggaacttgccactggcggtatgagcctcgcacttcctctttttctgtcatcaggatttgacgcgcaagggttcctttcttatgatcgttatatcttgcttccactctttctgtcatcaggagttttctcacaaggcctcagttcaaccacagcgcatcctccaggtgttcctgatgaaggaaagagcacgaggtaactagcaattacctttagctgacaaatttctgactaatcatttgcatcacatttattatgtgaatcagagaaatagcacttagcaatgcactaaggtatcaaattcaagtccaaaggaaactacaagaacaaattgaggtaagatagattcacatcatttccatgagatttgcactccaaaactttcttccataaattttacaggtgcttatgtctgtaatcaggtgcaaaagaagctgcagatgcgaattgaggcccaagggaagtacttaaagacaatactagagaaagctcagacaaatatttcctttgacacagatgcatccaatggcatagaatcaaccagatcacagctcatgggcctcaaccaagctctatcaggtttcatggacaatgcaactcaagtatgcaaagaaaataggaagcaattggtgaaagctttgtcagatgacaacgataaagataatctaggctttcagctgtaccatgtaggaagtcaggaggctaaggaagtcaaatgcacaccaaaaactgaagactcgctcctactagacttaaatattgaaggaggatatgacctctcttctagaggaatgcaagcatgtgaactagaattgaaaatcaaccagcagataggataaatttgttcacaaagatgtcagttttgggaagttcactctttgctattagattattttttccctgtgggtgctgagcatgcttgtccaatgcccacagctcacaagtttcatttactctctgctaatgttatgtttgctgaaagaagcttttgaataaataaatgtgggcattgtttcaactttcaaattctgaattttacacatatgtagaatgtgcatacgagaatgagagagatgcattagtctagactcaaggtattttttttatgagcataagactcaaggtatatgcatatctagataattagtaacttgatgtgcatcaaatatgttcagtnnnnnnnnnnnnnnnnnnnnnnnnnnnnnnnnnnnnnnnnnnnnnnnnnnnnnnnnnnnnnnnnnnnnnnnnnnnnnnnnnnnnnnnnnnnnnnnnnnnnnnnnnnnnnnnnnnnnnnnnnnnnnnnnnnnnnnnnnnnnnnnnnnnntccccc

SEQ ID NO: 4714 - DNA, 4416 bp, Sorghum bicolor
gcgcggatcggcatgctgtgtctggcagtctgatcgcatggagagctttctctctagcgcaggggacactagagaacctgatagaatctgcagaaaggcacattttaaatttgattttcattggcatttgaccagaaaatagggctgtaggtgtggccgtctgtaactaatggtacaaaaagcaaataggttacctttgcctgcctccggacagcctcctgggtagcatcttctagtatcttcatcagaacagccatggatgcaacgtctaactgcacaaaagtaacaacaaattaaacttgcgattgtttacctcgcagaataaacgctgaaagggcttggttcgttttttgctccaatattgtctcatccttgcagttagatattgaaagtagaagtgtagatcgagctattgcttcggtttaccatgcctaaacttagttctttcattcttcagatagaacacagtttgtactaaaaaaacgaaatctattcctgatttttcttagttctccacaagacatagcagcgaaggcataatcaaatttcttacattttcatctgccggacccttgtgaagcaggctgtacagttttgtgagcgcctccagatcagacaaaatttgctccatctctgttttttctggcaatttcatttcaaaatcagaataagaaatgaataactgaacttattgtcacacagacatgtatctttaattctttatccccccttttccccaaaaggacagcaaagagcaaagattggttcagcaactaaccgttgttaagaaatgatgaactcggcgatgctgtttgatccattttctttggagacgtcaaaccaagagaaaacggaatcaccgaatcagaagcagcagtaagaggctgcaaaatgttgtacggtacgtaaggtactccataaaaaaattgctgagaaggtgacgcagtttacaagtaatggcacggtaacaaattacatttgcctgcttcaggagagcttggcgtgtagcatcatcaagcagcttcttcagaagggccctggacgtctcatctaactgcacaaatataagaacaaattaaacttgccatcatatatgcttcagaattgcaaacatatttctctaccaccacacacacaaaaacaaggaactatgacatcaaaatcgcagcttcccttttaatgaaatacacgcaccaagcgcgttagcaggaagaaaaaaaacatcaaaatcgcagcgcttccttttgagtcgattttggctaaaagaactgagatttgttttttggacttgttctcaccctttgaagcagcccgtatagcttcttgagcgcatgcagatcagaccacactttctccatccctgtttcttctggcattccatttgaaaattacagtaagaattgtagattaagcccaacgtctcccattccccaaaaagaaaaaaaaaagtagagacagcaaagacagtaaataacaagagtacaagactggagcggaaacttaccgtcgttgttgcaggacgaagatatggatatcaccttcggtgttttatccatcttccttaagacaaatgggaatcgaaagctgttaaggcttgcttgatgcttccgcttccagcggtcaggactaggtcccaagtttgatcctgaagcaggtgtttgtcagacaaaaggtaaggaaggaatccatgatttattattctaggggctgaactgctcgaaggagcaaggaaagcagtagcgctatcgccggcaggaagggagatgatgataagcacaggcagcacaggacagagacgccattagccggtccacagctacagccttctgattctgcccttccctgcaagcgaagcgacctcttcgtcagacatcagaaaatctattccgccacatcgatatcgctaccaccgtaggcgctccctctcctcttctcccactcgtcgtgtggttgcctccgatcctcccggccgccatcgatacagatcgagagagctaacgatgtcgtcgtcctcgtccaagtctaacttcttcggtcgcgcgtgggacagagcacgcggtaaccacgtctcctggccctgcacgcgcatctctcgccatcgccatttctgtaacctcttgttacattggtctctctgctcccctctgctcacgagaaggttcatccatgcttgcaggcaagtctgatgtcgaaagaatttgcaagaaagtcttcgaggacctggcggacaagaacacggggctcctggacatcaactccctccacgtcgccaccctcatggtttacaagtgagatcgccgttgcttattactgttagtaatcgcttcagtattagatcgctaatttgtctgtgctgactactcttccccattttcgatttcgccagttcaatcaacaagcagttagccggccctcacaaggaccctccttgcctgaacaccatcgccgagaaaatgaaggtatggttccaagtttcgctatgcgacgtacctttccctggccggaaagcctctccccggcgggcggcgaggtagcacatgtagcaggggggcgaccgagattgcgagggaaagaacgtttttttttttattattattatttctagggaaggaagaaccggcagttgcctgcgccgtcgctgtgtgcgtcgatgagggagcggcgcagacggtcctcgagagcgggcagcgcaggggaggcgcgcagcctggcaaaatagggagcggaaaaaaaaactacaactatttaaccatatagacgtaactggttaatagataggaaacactgtataacacataattgaccatgattttatatatttattcatattcatagatagaaaaccctgtaatttgtagccccaccctttttctcttcatgtaaaataaaataatgcttgttcgctgaaaagtactcactgaaaaatactattaaaatagtgctaaataagaaagccaataatttaaagtctatttgcttagctgataagttatggttaaaataattttcgctaattttttttgttgaatggctgacaaatttaatagataagttcaaacgaacagactattacattcagactcccctcgttttagtttacaagtgattaataaattgcaatccacaatatattgaatgagattatgggaagccagtagacccaatttgaacttacaaaattgacttcagaagccgcaatcggtcaatccataaagcttcatgccatgtgcggctgtgctgtgcatcccatgcccatggtgccaatgcgcacactgggtcacagcctcaccggcctgccgtccgaagcacgcaccccgccggccgctgaggcgctagcctagagtcacgagttcgccgcccaccgcgccaggatttggagttgttggggaaaatgaggagagacgggaagagaaaagaaaaacggcgcgactggctgcctggctgatgccgatgtgcctgttcgctacctgacctggtggggcggaaattgggccatcaaccgctcggccttactgggccatcaggtcgggagagaatgcatgcatgtttcatccttgagttttttgggccgtccgggtagtgaaagagatcagcccaatcaaaaactaaactaatccatcgctttgctctccgccaactgcagttgtaccacgacaagaaaacgatactgttcaccgagttccaggagctgatcctcgagtgggtgcacaaggacctgcggctggtgctcgcgaacaaggccgccgtcgcgatcctgggcgcgccgctgctcgccgtgacggccaagaacgccgccaggcaggtgccgaggataagcgacgccgtggagcaggtgcccacgccgctgctcgccaccgtcttctccgtcgggctcatgctcctgcaggacgtccggctgggcaagcagagggagtgaaaccgatcaccggaatcgcctcgaggcgctggaggtttcgctttcactggctctcacggatatcagcatatggtccgtcacattatacagctctgctgctttgtggtgataggatcaaagtctgatagagaacgatgtactattaactagtaaattattacaaggcgattggcgtctgaatggcacgtatacaaatgattgtgatggcatttgtaccagtgcaaagtgttctcagaaaatatgatttgaagcgctggtgcacgcacatctgcccactgcctagcgtgggcatgtttggatgctatccccaggaggcaggagcagctgcctggactggacgctgtctgtgatgcaacccgatcctgctgcctggcttggtggattgagtgtttggtttgtgttgttaaagtttaataggtattggagtatttttattttatttgacaattaatatctaatcatatagtaattagatttaaaagattcatctcgtaaattac

SEQ ID NO: 4715 - DNA, 4957 bp, Sorghum bicolor
ttgcaaatttttcagggaagtaaacaaggccttaactagttaaggaaacatgctatcagtaggtagctagaagtcagaagcaaattgaattagtcctctttttttgatgccatgcactgccaccggcagccggcgaactgattattgagttttgatgagcttacactccaagatcagtcatatgcatgatatatccatgctctatctattgtagaggtcattgaaagtgttttctccatatttacatcatcataaactttattcctaaacatattgaaggtgccgacaatattatgtagcaacaaattcttattaatatcatcatgcaagcttaggaacaagctcaacttatttttaactttcatagaaaagtgtataccagtaggtgtcatatcctcatcagcaaccatggaagaacttcagcaatgtccaatcagcttctataagcccttcttgacatccagtacagttgaaacaatactcgccacgagggttgtaatcaccacaactgccgactatgataaatgggtaatgaacccacaaggtggtctgagtggtttgttggttccattcaatctcaagagagcaacacaatgtacaattagcttgggttgtttgcaaccaattagaatcatcgtgaaggagcatggacttgacaacaatgaagaggtaggactatcccaaaaacaacatccctaatctccaccacaagcgacctcagggcgacaccaagtccagggagctagagatagcagtggatgaagtggctactaaacattgtgtagtgcagtggctagctactaaacgttgtgtagtgcagtggctaatagaacctcttcaacaagtcacggagcactcgtggccacatccaagaaagggaatcaaatattggcggagttgaacttcaatgatcgaaagcaacccgctttcttgtgctgtgctgaggtggaagatgacctccatggcgatctctagctaaatctcaaagtggacagttgttgttggcgttatactagggagcggcaaccacggtagatcgatggtgacaacgactattttctacgagagtggtggagctaggggaactcgccataggaacctcgacgccccaataatctttttttatgaagaaaaaggggaattatattaaaactcgacactgcatatccccaaattacatatgaaaaattttgaaataaataaggcacactagtctatgttgattttcccatcatcttctttctaggatctaaatcttgaagagggtcactgacccatcatccatgacgaaagggaatggaggagaggtactgatcacaagtggttagccgaaaaattgcacaccaagggtgcaagccttgggagttggaccaacgagtagggcggatgcaatgacaacgatagaataggaagcctgagggacgactggatgggagcagaagtgcagaacacaagggaagttgagagggtgaggaacaacgttaggggaggtggaaagggccgagaagcaagtcaatccttcatgcgatcgacaacaatggcgacgagaaactatagacatgtcaccgctgcattgttcatcgtggcctcatccctcctaaagcctaagttgatgagtggatttctagaagttatattaaaattttatgattgatcggtttggccatactacctccgttctcttctataaagcgcgcacacatattaagatttatttttttctaaaaatatcaacaatttacctaataataattttttactattaaaatataaatttgatatgattagatctgtactaaaaaacctgtacatctcactgaaaagctataactttgttataaaaattattttcatttaacatattcttttttaaaaaatataattttcgtaattagatctttaaatttttttaggcacggttattattaaaacattgaatataaaaagattaaataaatatttaaaaaaactcgaggtggagagggggccggcacgaagcgatgaggcgatatgcggaagctgcaagctgccatgctactgcgagagggagaggagtcaccgcaacgcgccagcgccaccgtctgatgtctcctgctccccgctgctccgtctcgctccctccgcctcctactaatgcctccactaccagcaccagcggcggcgggggcgggatgaaggcgcagcggcacccgacggcgtcgcaggtgaggcggctgtgcaaacagggccgcctggacggcgcgcggcggctgctcctcgacgcgctcccgcgcccgccgccgccgccgctctacaacgcgctcctcatcgcctacgtggcccgctccctcccggaacacgcgctgcggctctacgcgctcctcaaccacgccgcgcgccccgcgccacgctccgaccactacacctactcctgcgcgctcaccgcctgtgcccgcacccgccgcctccgcctagggaaatcagtccacgcgcatctcctccgccgcgcgcgctcgctgcccgacaccgcggtgctccgcaactcgctcctcaacctctacgcctcctgcatgcggtaccgaggcgacggcggcgtcgacgtcgtccgcaggctgttcgacgtgatgcccaagcggaacgcggtttcctggaacacactgttcggttggtacgtcaagaccggacgtccccaggaagctctggagctgttcgcgcgtatgctggaggatggcatcaagcccacgccggtcagcttcgtcaatgtcttccccgcagtggccaaggaagatcccagctggtcctttgtgctctacggcctacttgtgaagcatgggagggaatatgtcaatgatctcttcgttgtcagctcggccatcgcgatgttctctgaacttggggatttgcagtcagcttggagggtgtttgagtacactgccaagaagaacaccgaggtttggaacacgatgatcactgggtacgtgcagaatgggaaatttgctgaagctatggatctcgttatccggttaatgggatctaaagaggttccattggatgtcgtgaccttcttgtcagcactcacggcagcatcacagtcccaggatggcaggttgggtcagcagctgcatggctacttgatcaaaggaactcacgccactttgccagtgatacttggtaatgcactggttgtaatgtactcgagatgtggcaatgtccaaactgcctttaagctctttgaccgcttaccagagaaggacattgtttcttggaacaccatggtcactgcttttgtgcagaacgattttgatttggaaggcctgctgctcgtttatcagatgcaaaaatcatgttttgcagctgattcagtgacattgactgcagttctctctgccgcgtccaatacaggagaccttcagattggtaaacaagcccacggttatctcgtaaggcgtggcattgaggatgagggcttggagagctatctgattgacatgtatgccaagtccggtcgcatagaaatagctcagagagtatttgacgactatggtaatgtcaaaagagatgaagtcacctggaatgccatgatagcagggtacacacagagtgggcagcctgaacaagcaatcttgacattccgggcaatgcttcaggcaagtcttgaacctacttcagtgacacttgcctcggtgctccctgcatgtgatcctctaggaggaggtttatgtgcggggaagcagatccattgttttgctttgcgccgttgtttggacaccaatgtctttgtaggtacagctcttgttgacatgtactccaagtgtggcgagatttctactgcagaacatgtctttgctgttatgattgaaaagagcaccgtctcctatacaacaatgatttctggtcttggacagcatggttttggcgaaagagcattgtcacttttctactacatgcaagagaaggggctaaaacctgatggtgtgaccttcttggcagcaatttcagcatgtaattactctgggctggtcgatgaagggcttgctttgtacaggtcaatggaaacttttggggttgcagttactcctcagcaccgttgctgcattgtggacatgttagctaaagccggcagagtggaggaagcttatgaatttgtgcaggagctgggggaggagggtaacttcatttctatctggggatcactgctcgtgtcctgcaaagcacaggacaagcaggaattggtgaatttagcgacagagagattgctctgcattgagaagaagtatggccatgctggttacaacgttttgttgtcacatatttttgctgctgagggcaactggagtagtgctgatagcctgaggaaggagatgaggttgagagggttgcggaagatggcaggttctagttggattaaagtccaggatgcagcattacaaagctcccctaaaaatgaccatgaatactcattgctgcatgggggttgattaaagtagagatgaaatcatctgacatgtatcagtactgcagcagtggaaagcttgctgatctggtgtttggtcatgttctgtgacgtgatcagttcaggctatgacagattagctttttggttaattgcagcattaacactttgacaaaattggggcacttaggaacatttacatatataaacccacaaactgaactgccgcactacttgtgaacggtgaaatagccctgcaggttgagaccatgatgtcctcaacctagatgcagtgatgcaggaaggatatggattagttgaatgcagcgtgttgcaagccgcggtgaacagtggccagtgagtgtatacaagatactcaatactcatgtcacgaccagcaaagttgttgtttttagtcgcagtccaaggcacatgacatgcatggtgattggtgaagtgtacagcaatttgttcatatctgaagatgggcacagtcgcacagaaagcattcatgtaattactcaa

SEQ ID NO: 4716 - DNA, 13007 bp, Sorghum bicolor
  misc_feature (1110)..(1209): n is a, c, g, or t
  misc_feature (12387)..(12486): n is a, c, g, or t
agtttattacaccaaataggtatattaaaaaaaattcaatgataaaactaaggatggttatttggttgtagataccagtgtttttttataaatatgatcaatttaaaatagtttaacgatagctacaatgtcaagattttaaagacaatatagaataatatatagatatatggttaagtttcttccggacatggatatctatttttgttggttaaattcataatcctataccctacccaatggtggggcacagggccaggtggaaaatgaatattctggatcaaatttctagcataaaagtaggttttatgcatccatgaagtggtgtatagaaattccaaaaacattttaatcgcgtataaatgtattttgaaattcttgtaaaacaacaatatgatatataatgttgaatgcatttatgctatacattttatattttttcattgtgatccatttttaaaacacgttcatacatcaagtataatgttttaggaatttccaagtttttttggggatttttttttattttttagatctaaatcaattttttgaaacatcaaattttatgagctctaaatattgtatttgaatttgacacatcccaatctatctttagtattttttttcagtttttaaaaaagcttaaagataatttgcgtggttaaaaaccttatcaaatatttattgatttttaactagaaatataaaaccatcttcaaaattactgcaaaccatgagaaggaggtaattttgaatggtttaaaagtctgtatagaagataaaatatctgattttatttatcaattttttactaaaaataaaaccatcatcgaaatcactccaaaatgatgagaaagtaatttgaacggttttggaagtttgtatgggagatatgagataaaaatatctgatttttagagtttgaggacaacatcaaacatcgaaatcactccaaaacgatgaggagaaggtaattcgaacggttttgaaagtttgtatatgggagataggagataaaatatctgttttaagagtttgaggacaacatcaaactacggtagttgggagaatatcttatttatttatttacacgaaagtggtcgtcatcgnnnnnnnnnnnnnnnnnnnnnnnnnnnnnnnnnnnnnnnnnnnnnnnnnnnnnnnnnnnnnnnnnnnnnnnnnnnnnnnnnnnnnnnnnnnnnnnnnnnnccaatcctacggattgttgtggtagccctagggtagtgacagccctaacggtcgacgtatccacctcgttcggatcggtgtttgtaggaccgtagtcagagcttcctagcccccttctcatctctttctgtggttagtgttctgatgtcccgaaataaataatctttgaagtaattcttgattcttagatcaactagagaactctccggaaactttctctcttcccaccaaaaataattatatagttatccttaggcgatcttgaatcttaattagtacactcacgttccctgtggaaaattgatactctggaatactcccgagtgaaagctacatcggtatccgtgcgcttgcggatttttctgtttgcgtttaaaatacccagaaagtggtcgtcatcgcaatctgccgatctcatccagatctggcactaggcctgcaaaccagcccagttggcgtccttcaaattggcccatctaaataatacaggcccaaattgttctgttgctctctcttggtctcccaagtgcctcttcgatcctcgtctcgtcgaactcgagcacgcagccggcaggcggccggagagagcgccggagccagagaagccagcggccagggtattccggggaggcgagggagcgcgtgggggtaacagatacgagaagtgaggtgactcccataaatcctactatttcccaaatattcctttgtttcgacaccttttctctttctggaaaggaaattgtatttttcagttgggagaccctcgctcccctaccccaccgccgacaatggcggcgaaggtgcggttcagcctcctggtggcgatgttccaggccatgtcgggcgacaagagttcggcgaagaagcgcagccgcctgcgcgcgttcctcgaccgcgcctacgtgcccagcggcggtagggatgactatttcagcgcgctccgcctcgtgctcccggggctcgaccgcgagcgcggcacctacgggctcaaggaggccaccctcgctgccgtgcttgtcgacgcccttggcatcgccaaggactctgccgacgccgtccggctcaccaactggcgccgcggcgggggtttccgcaacgccggcaacttcgggcttgtggccgctgaggtattgtataccgatgctggtagctcctgaaatagcacttacatagccgacctcagattctctgtaattaaccctcgctatctcgcccttgtcagacaacaatatgaactctgttcagttgctaatttgaacctgtgagtgttagttcaacttatatagttttaatgttggattcaacgtagtatgtgtatgaattcggcaaacagcataagctctagccattgagtattggttcagttgctaatttgagttgtccttggcattttgtctcagcatgttcatatgctcatgctcagcgagtcagcgtttctcacagagcaatctttgtgtttggtgcaaacagcataagctgtcttgatctttatttggtttcacatgattggatgggtttagtatgtaattcaaaagtttggttcagttcaaaatgattatatctagattgcttgattgatgtgccatcttagttgttgcattggttgccacccaggtcctgcaacggaggcagggtttaacttctggtggattgacgataaaggaggttaacgatgcacttgatcgtctagctgcaactgagaacaggtagctaaggcagctatttgaatttgtgtatgacagaactgtcaggagttctttttcattcttgataggtccgagaaggcctcaatactttctaatctgatcaagaaaaccaatgccgctgaaatgaagtggcttctgatgattattcttaaaggtttgattcctgtgcccatttcttattaggtgagcttttatgcttttgctgcaattgcagtattttatttgcttttgttttttggcatgctttgttgtagatttgaaattggggataagtgagaagagcatatttgaagaatttcatcctgatgcccaagatttgttcaatgtcacctgtgacttgaaatttgtctgcgagaagctcaatgatcgaagccagaggcataaacgtcaggtgatagctctgagctctttttatcgaacttttgcttcccacaacttgactcttcatgtgcaacattgtaacccctgaaattttttatgttgtcaaaagcttttctcactcactgtctttcgtagttttgtgtgcttgttttcttggttgggctgagcatttgcatttgtatagacatgtaccactcatagaaaacacagtagtttcataacattttctgatgacccctgttacagggcgtctttacagtttggaggaccctaggccaaacacgacactacgggccctataggtttagcatttttcctttgtaacatgataaagtatatacatgtctaatatatggaatcatccccccccccttccacccccttctgtcatgggctctaggcccagagccaatcctgccatgttattacactctatcgcagttgtggtactcatagatatgatttatttatttatcttggggattccatgtttatacctttatgtgctgtctgaccaggatatagaaattgggaaggctgttaggcctcagctagctatgagagtccgtgatgcttcagctgcttggaagaaggtgcctgcccccacccacctgtttccttcagaagatatattcattgctaagtgaaaggctgctttacacttgttctacatttcttgaatttgcttggttatcatacccctccctttccccagcttcatggaaaacaagtggttgctgagtgcaaattcgatggtgaccgtattcaaatccacaaaaacggggaagagatccatttcttctctaggtaactgaattgattgctactacatatttacttcttgcatactgttcttgaactactggtttctttttttgtttgtcgattcttttttatttgcagtattgttcacagttcagatagcttctgcttgcttcactaactttatatgtgcatatcaggagctttcttgatcactctgaatacacacatgggatgtcaaatattattaaagaaaatatcctggttgacaggtaaactttctttttttttctgccaaaaagatcacaaagagtgtttgtacttctagtgccaattaacctgcatatcacaatatcctagcatttttcttttactatgaacaactatagcttatgcattattaagacttaagatttgcttcagaattttcatggaagaatatctatcacacaactatcttgtttgtcaaagtcaaaaattgaactaaaggaatgtatattatatttacttcaattttaagaattaggtatgatctcccctacggctgtagttagctagttctagatgagctcaaggtatttaacttgttatgagcttataagagtaaatcatgtcttgtttcccacattacaggcctcttagacaatataagcttcctttttgatatctgttggtcctttttgtagtccatttactgtgcaaacttccttggaactcactctcatgctaattgatattaataacgcagatgtatattggatggagaaatgcttgtctgggacactgtacttaaccgttttgctgaatttggttcaaaccaggaaataggtttttgatattccattgaaaaccagaaagttttacttctctgggatgttttatagtggattaatgttattcttttttgcagctaaggctgcaagggagggattggagactgatcgacaggttgttttcacaaaacctgtttttttttttctgtgtttcggagtgatccttctacaaaatttcctatctaacttaatttactctgtgcttgcagttgtgctgtatccttcgtttctttactagttcctgcattctactttttgtcttgatattcttagctatttctttttttttaaggaagactcttagctgcatttgtttgaatttccattttctgtttgtttcagtatctggatgttctggaactgtttcctagcacatgtaggccaaattttatttttttttaattttcttgtctgtcatgtttttcttgacactagcgatgcatagatgttgcttttgacatcctttatgctggagacaccagtgttatccaccaaagtttgacggagcggcatcaaattctgcagaaggttgtgaaaccattaaagggtcatcttgagattttaatcccaacaggtggtttaaatgttcgtcgcccttcaggtagctgatgacaattttaaaattgtatttttatttttctcatggatgcatttgagtttacccatttccaaaatacatgacattgtacaatggattctagtagtttgatctagtatgctgataggacttctttttctgcatttttaattttgttcagaagagtcacatgttatgttctattatatatctgttgtatacccattactttgcaatactaaacttatttgcaacctgcagatgaaccatgctggtcgattattgcacacaatgttgaagatgttgaaagattcttcaaagagactattgagaacaggtttctttgaaccttcttagataatagtcttagcaatcttttacgttaaaaaaacatttaatttcatccttatgaattatgattcttcgattcattaattgtggttagagatgagggcattatactgaaggaccttgattccaaatgggaacctggtgaccgaaatggaaagtggcttaaactaaagcctgattatatacatgcgggtgccgatctggatgttattattataggtaagcatctttctccatatgtgaagaacaaatgatactttttgaaactgttgattgagggtatgttgacacctttgttgttagggggatactatggatctggacgtcgaggacgagaggtgcactagacattctcatttttaaaatatgtatatacacatttagcttactattttagttttaacattagggttagctgggtgtgaatattataatgtcttgctagtgcatagtcttgtactcactcttaggtttattcttttcaagctattaaaaagtaaaaactgctgatcattgttcttaactgatttataggttgcacagtttttagttggccttgcagtcccttcagatgataatagttatcccaaaaggtaagcaaagtttctccacccactgtatatttcgtagaggcaatggtagatgaagatcatagtaaaaagcaaaatgtggtcatcctaaaaattcaaccatgggaagaagatgcttcctggctttgcattaaatatcctgggtccgtccagccctgttgggcgtcctctcaagtctcagcttgaggcttaccaactgagctattgcttggttcttagatgtggttgcctaataattaaataatgttgcagtaggatggttctgtactttgatgaagattggtgtgcatgaataccttttgtgtctttcagaatattttatatatatattctaatactacttatatgcattgcatacctgtgcttggcaaaacatagaaaacacatgtctgttttatttattgatgtgatgtttcttgtttgaggttttatatgggaagcattttgttttgtcattccatgatgtttcctcttccccacaacggttgagctcaaatttcattaccaaaagagttaggtggcttgggggtgtcagacttggaaaaatttggaagagctttgcgcctacgttggctgtggcaggagtgggtacatgactcaaaaccttggatagggacgtcactgccatgcaatgacctagaccgtctactcttcaatgcttcaaccacaatcacaattgggaatggcaacaagggacggatctggcaccataattggctagagggtcaggccccaagatacctagcaccccacctttttgagctggtacgccgtaagaacaagactgttcgctaggactacaaaatggcagttggatccgatccctcaggccacgaatcactacttctattcatattcaagaattcgtggccctttggatcaggattcaggcggtccagctcacgcccgatgtgcaagactccatagtttggagatggacaatattccacacgcttggcatataggattcagttcagaggcttgcataacaggttccatgctgacctcatttggaaagcaagggcggaaaataaatgcaaggtacatgcctggatactattgcatgacaaaattctcacggcggataacctgcaaaaaagagggtggccacatcatgagcactgtgtcttctgcaatggaccattggagacagggctgcacctgtccttgctatgccccttcgcaaaggccgtatggaccaaggtgttatcctaggaaaacattgatgtccagctgccccaacaagatccccaaggcctagccaactggtgggaggatgtggcgtgcatgattccgaagcaagaacgcagaacgtttaacggagtgctcatctacactgtgtggaacctatggaaggaaaggaacaggaggatttttgaaaataaacacaaaacggcagaacaggtcgcttatctagcaaaggaggatattattcagaggcgtagggccatatgtattgtagggtaaaaacaagtgcgtgatctgtggcgtttgtgttttggccctatgaccggtgctaatgggcactgaacgtgccgctgttgtacataaaactctgttttcttcttaattgagcggcagagctcctgcctttattttccaaaaaaaaaatcattaccaagtcaatgagacaaccatatactctgtgatgtttcttacttgttttctgtccttgtgtactcttttcaaggtttctttcattttgccgtgtcggtactggcctctctgatgaagagcgtgatgctcttgtcaccaaactgaagccttatttcaggtattcagctttgattcttatgtttcatatttattggtcagtattttgtgtaaccatgtttagttgaagcttaacaacatatttattacacttaaaggcactgaagtaccttcacaatctgtcatattgtgctattttttgaacaggaaaaacgagtacccgaaaaaaccaccaaaattttatgaagttacaaataactcaaaggagaggccagatgtttggatcgagagccctgataagtaagttttttagttctttgattgagtcaatcattttcatagatacaggaagcacatgatatgctaagtcactaattacattttcaggtcagtcataatatctgtaacaagtgacattcgtacaatcaagtccgaggtacctgatttaaaaaatcaaacacttctatgtcctgcagttcagtctttaaaagcattatacttgggaccaatttctcttgtgcaatcagctggtgtattttctcttctaactaacttttaacaagttctttcaaccttttgcaggtatttgcttctccatactgtttgaggttcccccgtattcagagagtgagatatgacaagccatggcatgagtgccttgatgtgcagggtaatttgtgttgcttttacttaatattttgtgtttgtaaccttagttcttttagtagcttacaataagctacatccctcctgatgccttaatctagattatgtctcaaggatgaattctctataacatgctgatcattgcagcatttgtggacattgtgcattcaagtaatggtacaacacaaagggtggcagatgataacagcctgaagaatgatgacacgaatcgctcaagaacaaacaaaaaagtggagaagaagaagtgtgtctcagtcatcccttcacatctcatgaagactgatgtatcaggtcttaagggagaaaccctgatatttgccaacatgattttctgtatcctttcctgtgttattctttgctagctgcacttatttttacaagacaaaagttcagaaaattgtgtaaagtaggagattattccttatcttatttagattttgtcaacattccatcatcttataatctcgaatattttcataaactagttgtggaaaatgggggatctttctccatgaatctgaatgactctgttacgcactgcatagctgcggagaagaaaggtatttacctttgttctaggagttccttttcctttgataatgggatattgaatacatatagtttgacgtatatttgtgtgttaactttcaggtatcaaatatcaggcagctttacggcagggaaggatcattcactatgagtggatattagattgttgtaaggaaaaacatcttcttcgtttgcaacctaggtttggccctttgacttaacccacatttacctcataacttattttgcaaaatattctaatgcaattttcattgtacaggtatatactatttcttgctgattttgccaggcacaaatttcctgaagagattgattcatatgctgactattactactgggacattgaaattgctgacctcaagcaggtacagtatttggtcctgtatgcagtatatccttttatcactacaaaataaaataacactttattgcacaggacaatataacagtaattcaaaattgaagatgtaacactgtgggctgaattagtgtaactaagtaaccatgcattcagccagttagtagaagctgcatatgatacaacactgaaccctaattgttacttgtagtttatataagctagattatattttacaaaaggtcttggtgggtgccaaaggtttggcacaactgaccaatgtaggggcttatagcttgtgtgcgatatggttggccgatttatttttggaatgtggcacgtaagtaattaagtttgaactgatagggttcatgtgttatttcttaatgcaatgattcacagctctcctatgtatttgagggtgcatccctcactaatgatgtgatttgcttcccataagggtctccaatcctctttagtttcattgtcagtactcagtactacttttccaaaatatggtcacactttggaaaacaagtgctagtagttgaactaaagaggtcgaggagacccttaggggcacccatttgcaccccagctcaactatacataaatcatataggagtaaaggatttcacctcttctaattttctcttcctaaatatggtccatcagaaactggtcaatgtcgggtctacgatgggaatatgatatttttccacagccttctgttgtttgtaacttttctctggcatcctaagtttgttattattttgtcacagtgcatttttgtacttagaagcatgtctttggtagaatggcgatgcaagagatgttcctgactgtacttgaaattttgacctcttttttgggcattctacaaggacaaattcacaatgaaccattttgatatttgcttgtaatttttcatgcgccagattttcagcaacatcgacaaagttgctggtgattcaaacatggttaatcagtacaaaaagaagcattgcatagatgagagattctgtttcttccagggttgctgtgtctacttgcataatgcacccttagtgtaagcttcatttattgtcaagtagtgtcatctttcacatgatacatctcctcatttatttttccaccttttgttcctggaggaatgcggactacaatgtaatatctgatcttgcgctgaagagggtgaagcaggatctaacaatgcatggtggtcaagtctgcagcagcattgctccagctactcatttggttgtagtttcggttttacaggcctataactttgataacctgtacaagaggtactgatttattgctttggatttcttttgtgacttttgtgagagaagggcaaatggaaacatttattgtaatccattggttgtttatgcagcttccctcctgctgaaagacgttatctgcatgacaaacgattacatgttgtcagtaataagtggttggaagattcagttgagaaacaaatgaagctctctgaaactgcttacagccttaaaccagatacactagaagaactagaaattgaaaggaggtaactggtgattgcccataacgacacttttaatattaaaaaaaattacatttggttgttgtcaatcttctgtctgtttctaatttgtttcagtgaggaaaatgttcagcctccggatcataagcttgaggaacacagggaagttgaaagatctcatgcgaaaaatgtaccaaggaaaaggaccaggccaaccagttcaagaactgcaagggctgctcctagaccagtccggcgaatgaggcctagaagaggaaaccagaaagcaaaaataggtgatgatgttgaatctgaagaaagtggccccagcgaatgtcaagatgatcaaaatttggacacagatgatacctctaagattgaagaaggtattaccagcaaaaagaaaggactccctccacctgcttctaaaccagcccggagaacaagggctgccagaggaaatcagcatacaaagatagacgatggcggatctgaagaaagcgggccttgtgaaacagggcaagatgatcagaagttggacacagattacatctctaatatggaagttgataacagtgataaagactgtggaccaccgcctggtgctcagcttttcacattgggggagcaagaggccaaaggtgtcaaattgaacaccgtggaagagaaaccagacagtcctttccaaagaacaactgctgctgaagcgatgagtagtgcgcctggtgacaagatagaacaaatggctgatccattgcacgccatgcttctggatatgttgccactcctgggcaagaaagggacagaagatgcaagtagggcacccttgccgaaagctgagaaggatccacctgcaggaggaagttccacatccaattctgagattctggcgccagatgctggtacatccggggttccagccccagacccgaatgcagctcctcccccgaagaagaaaaaagtgagttacaaagatgtcgctagtgaacttctgaaagattggtgagagagcttggtcagtgaacttctgaaaaaagtgagttacacttttactcccgtagtcgttatcatgtaaatacaacgccatgtaagtaaccatgtttgtagcgtcannnnnnnnnnnnnnnnnnnnnnnnnnnnnnnnnnnnnnnnnnnnnnnnnnnnnnnnnnnnnnnnnnnnnnnnnnnnnnnnnnnnnnnnnnnnnnnnnnnnaaaccggcgtgtggtctgcgacggatgggagaaggcgagaaggagagcaggtcaggtagaagggcggaggaacatggcgtgttgtctttggtctaaaagactactacaagtaaatgaaggtcttgtttagttctaaaaaatttacaaaatagacactgtagtacttacgtttgtatttgataaatattgtccaatcatgagctaactaggctcaaaagattcgtctcgtaaattacagataaattgtgcaactagttattttttttatctatatttaatgttccattatgctgtaaattattcgttaatttaacttttacgagatatatctaggtatataatttaaaagctatatacctagaaaagtaaaaaaaaacgaagcgggctaccggggtacatgaacgccacgcgcccgtgccggcggccggcgcgctgcgtccagccgagcaaacttgcagcatctcgcgttgggcaaagaaattcggccgccggacaccataatgtgacaatggtataatggt

SEQ ID NO: 4717 - DNA, 6268 bp, Sorghum bicolor
ttgtttttagtccctgtgtctttcaaaacttaaattcttagaacctatgctacttaaaatttttaaaagtctaaccaactttaataaaaccttgtcttctaaaaatatattctataataaatctaatactactaatttggtactataaattttagtattttttttagaaactcaatcaaattttttttaaaaaaaatgacttgagataactttagaaattaaaattttcagagataaatgaagtattgaaagagattgcttacatccatatactattgttgagctggtttttccgtagatattagaaaacgaaaaactggcagccaaggaaaagacacatgaaagttatggacagcttcttcttgctttaaggattgttattaaatcatgtgaaatgatagaccattatgctgctgcctccagtgcacagctttgtacgcctggagatacttgccaagggggaatggcggaggaagcttcgtggaagccttctagctgctcgggagaggaaaaaggataaccgagatgaaattaaaaagaaaataaaaaggcagcaagtcagtccacgattttcaaacgttgtttttgtgctttattttaaaataagcattttgagctcacttaagtcgtgtcacattgcctaacttaaagtgcctttttctactcaagatagatacaacaacagagaatgagtcgtctcaccaaaaataaataagggaaacaaggaaaaataaataaacaaacaaaacagaacaaagcacgattaatgtgatgctaacttgcatagcatgcacaatggagattaatgcttattaccgtccttactaaggcggtctttggcagtagaccttttaatctaatttatttgtcaaggcaatctatttatttattaatctcaaggatatgataatacttctcataaacatgaagtaccgtatataaaaattaatgcgtacacatttgacacgctattgaatcctacatggatgcgaccgaccacaaattcgccgataccttgattcgccaataataaataagagatatcagcttcatatattgaaatcataccgttgagctttgttagtgtcaaacagtgttaatagaacaaaaactatctgttaatatctcttatttattatctgataaaattctattatgaagctgttgatatctattacaaccatataaacaccttgtatgagctatttgtcgatatctattttggagtatcaatgtgtcatcgtaaaaaatcttcgatatataccggagattgtttaaccgaacactaatctaagttaagtttttatcttaattcttcacaaatcatgtagaacaacgtagtggattaaagtgcagtaacataaatccttaaattatttagtttaaaaaatatatactttttgaaaataactcatcgctatcgtgtatatatgggggacgtacatgcatggctttctacgtagccaataaggctttctacctaaattacgaaggggactctcaccattttctctccaaaagtctgtatcaactttcttcatttttttttctcccgcgcacaaagaatttactactagattagattagaggcaagtagtataataaaccgcctgcattgcatatttgcatttgttgtatacatagcgggggcagcagagtggagtgggcccctgtttcttcggtcgtgccgatttccacctccccgctccctccggtgtgggccccacttcccgcggctcctccactccacaatcatcaaaacagcaaccgccccctccctctccctctccctctccttctcttcctcctcatcacgccaccagccacaccacaagcgtccggcctcagaatcggatcaaagagcaagcaaccggggccgagagagagagacgagagattggagacctgcctcccctcccaccacactccgtcacacgcgagacggagacgcggcggcagccgagcccgagcccgagcccgaggccttgcataaaagcgcaaaagatctctcgctctcttctcccctagtcctcacccgtgtggccgtgtgccgtctccgcgagcaagttctctcttcatccatccatccgtccatccgtcccccgtctcgcttcctgcggcctgtgggtggcggttgtcgatcagcttaccctcccccggccggcgagctctccctgacatggtcggccggatggagcggcagaccgcgtcgtcgtcagcgtcatgctccccctccgccgccgccgccgcctcctcttcctcctcctcggtctgcggcggcaagaagcgccctgatatcctcaacatgatccgggtacgcctgaatttactcaccctcgctttgctcccgttctccgcttgtctggataaatttattttattttccattcacgcgtcgtgcttagtttacgtcgtgctgatgttgatcctgcaaaagaaatttttggtcaatcgaagcgtccgtgttactctgatgtgcataaataattcgtccagacagaatcgattaggtgctctgcaacgccagtttctggtgagaccatcacgattgaaaaaaaaaaatcattttgacggtttattctttctaccagtgaggaaattaactaatcgattaacttaagaagggtgcaacttgaaattaactaatcgattaacttaagaagggtgcaacttgctagttggagtcacaagatttcaaggtctggggccgcgacttccaagcaaagtcggacttttgcaacgagggctcctttttgactgggtacgcatgcggcctaggctaggcatgtcacgccagccgtaatcaacctgtgtgccttttggagccttgctctgtgagtctgcgtctcccagtagaagtagaggcacagcgaccccctcgttgcaaatcctcagctccacctgcctcttgagcctgttctaccgatgatatatcagcagaagcaaacgagtagaatgagatgtatcatgccatgaagtaaattactttgtttcctttttacaatcaagtaaaaaaaatagtactcgccttggaaaacctgccacttgatacagatgaaatcctgtggattacatttttttcctttctttttgcggcaaatggcgtgcaagtattaggaacttgcattgctcgacacttgtaccacgtgtctaatcagaaccatcaccatttgagacatggaccacggataaagtagcacctgaagtgttgcgatatctcaaactgaagcagggaagatatccctcagcatgatactcaggatgcggccatgtgcgttgtctactaggttttggatactaaacaaagagtgcaactcgtagtcagctacctgttgctgacctgttaagccaaaccgttactgcattgcaatttcagttccttgttcttggcctggggccctccacctcgatcttagctgggtgatacgcttattaatatcttcatgcatgcttatcaatacagttttacattcctatagtgtctctgaatagcatagctgttcttttgcaacatttctgcagctagctgtattggcaggcttctttgtttaagcattacttttatttgactttaggaacatttgggtattctgttctgtctaatactggtttcagatactactatggacctgtttagttggtggccaggcaacaccatccaaccccagaccaccaaaaatggacgcctgggattgctgcctttccagggtccaatccaaacaggccgaatgagccttttttgtcaatgtgtgtggaacacttgctgcctgaatcagtatttgctgtttagtcattgtgtatataacgcttgctgccggagtcagtcttttgctgatgtattgatgtgtgtagaacacttgctgctagaatcagtcttctgtcaatgtgtgtagaacacttgcaggcagaatgtactgacactatatttggttcttttgcgtggctgtacagaatgcagcctgtcttaattcatcatctactgataccggcaagggaaggagtaaattgtcaaccaacaaagttgcacatggattccacctggtggaaggcaagtccggccatgacatggaagactaccatgtggcagagtacaagtatgtgaagaaccatgagcttggtctctttgccatttttgatggccatttaggagataaggtgccatgttacctgaaagctaacctttttagcaacataatgaaagaggtaagtgttacttttggctttccattctgtgttggaaaccaaggaatccattttagctttaccattcactgtttccctattctggttgctgcagcctctcttctggtctagtcctcaagaagcaataaagaatgcatactgctctacaaacaaatttattctagaaaatgccaaacaacttggaccaggtggttcaacagcagttactgctattgtagttgatggtaaggacatgtggatagcaaatgtaggtgactctcgagctgttgtgtgtgaaaaaggcgctgctaatcagctcactgttgaccacgagcctcatacaactaatgaaagacagaggattgaaaagcacggtggttttgtaacgacatttcctggtacaacttttgttgtcttatcgtttcttttttttgaatgcagctgtgttatcgtttcatcattgataataagatgcaattaccttattatgttttatggtttgtttgcaggcgatgttcctcgggtgaatggccagcttgctgttgctagggcatttggtgaccaaagcctcaaggcccacttgagctctgaacctgacattagacatgtaccaataagctcaaatatagagttcgtcatccttgccagtgatggattgtggaaggtttgtgccagctgtttcctttattaatcttgtttgttctcatgcttatgaaaaaaaaatggtgtactttggtttctatttaatcctgtacttccctgggcctagattgaaatgcattaacttaggtcacttttgaccattgcattatctgcgacatgttctctccctggcccctgcaataagcaggcaagaaatggttagacactacgaaatcaccatggtctcaaaaaaaacataccttatgaaaaaaaaagacgagctcttgggtgattcgtctatgtttgatatattttttttgaaaagtatgttcgtacaccagtttaatgtactctgtatttcctttctgaatacaggtaatgaagaaccaagaagcagtcgatctcgtaaagtcgatcaaggatccccaggcagcagcgaagcgattgacaactgaagcattggcaaggaagagcaaggacgatatctcttgcattgtcatccgtttccgctgctgagttacccactctccacggcactgatctccgatcttcgcctcatgatagcgattgagacaatttgtgtctgtaatcatctgcctttgccgaattttttttcgctgatagaatctgctgtacctatcgtagttgtggacaagtctggaactaattaggacagtgaagacttgagagctggttggtgagtgtgtgcagtgtgcccattcgcctgtgcatatatacaccagcgtagactgtgcatccgttgactgggactttgcgggagtctgtcaggacctagtgcttgtgtgcttgtgatggtaatggacctaatggtggctaaggaacttgttgatatgtaatttggttaaatttagttttcatggctcgcatttcgtagggtagatgcatctgatttcaatgaaacatattagtagttcaggccatctttggaatgaaggatttttttcccctatatcctgcgtttttcttatgaagatgaactgattcccgtggagttactacattcttgtgaaattcgtgtgtcccaggtgttccaaaatcatggcttgtcgtatccttggcatgataaattttggtaccaatcagggccttgtttagttcccaaaaagttttgcaaaatttttcagattccccgtcacatcgaatctttagacgcatgcatggagtattaaatatagatgaaaatagaaactaattgcacagtttggtcgaaattgacgagacaaatcttttgagcctagttagtccatgattagacaatttttgtcaaatacaaacgaaagtgctacagtgttgattttgtaaaaatttaacaaggcccagactatgtctgcgcccccaggtcggcctgagcaccagacgccacatgccgtctccagcccacataaagccccggagctggagacggccaacttgattcggattg

SEQ ID NO: 4718 - DNA, 4799 bp, Sorghum bicolor
tgagccacttcaccgaaatatccttctctagggattgaaatggttcaatcgaaggatgatatggagcaggaagaatccggcatagatccttataacagtcgaagccacaagcctggatgagtttttggatggtccacacaccacagtcccacacagacggccaactttcccattcttctccattgcatgtatgcatcaatcattgtgcctccaatgacacggcaagtttgtgccatggaaaggtgaagtgaagggaccaattgggataaccattctgataaagatgcagaccgcgtccattccaacattgaacccattgagcagctgaatagagaggggtcttcaacaatggcagcacctttgcatcctgtacaaaaccagtaatccatggaacatccccaacctattgcaaagtcatggagatcttatctatattggggcctgaattatgcaatgtcagctttcttttccatcaaattggagcattctctccctgatcaaaaagctgagctttcaccatcagctgcccactccagacaaaaggggcgtgcctctttatttgatgcctactatttgttgtatgcacaaatattccttgatactgatactggacaaggagacctctgcagtgccaaggttagtggaactacgaactaagacctctgcagtgccaaggttagtggaactacgaactatccaaaggtgtaatcatgcaatacaagccactgggtagttaaagtgaccaaacgccgtacattgcataaatttgggccagtcgtacagagaacatgcacaacagagtcgcccctaatgaacagtcctctatatgcttgagagtccaactgatagacagatgagcttatttggaggtgatggatatagggcaatcgcctctgcattgtgtgatcttcttagttcagttccaatctgatgctccagtgcaatcacttttgcaagtttgttatttctaacaaaagaaacccctttatcttccccacatgttaggattgaatagatagcccccaaacaacacattcagatgcatttcttggtcgaaagagaggcttcagattcttagcaaaaggagatctgcagcttccaggaaaacagtgtgatacctgccgaagtcatgaaaatcacttggtcagtttggttcaggagcactctcatcaagcagcaaggtggagcaacgtcttccgtgtgcaataatagatacttgaactaacaacagcaaaaaaggagcaatatcctcaaagaaaaggtcaattttaatctcagggatgaatctaccagtcagttcatgaacaggttttagtcatctcttatcacagatgaataggcatgagtggaacatcatgttcagcccactaccaaaaagaactcaccatcaaattgcaagcctcaaaagagtttaatctaattaaataactaatgacagcatagtgtcaacactacaagatgctctgaccatacaagaaagcatcattgacccattcatgtcaccagccaccagtacattccacacccttgcttccgatattttccttgcttgaataggtgaatggcacccggtgccctatgcttttgtcatcaacgatccagcagttatgaacagtgacaagcaggagatatggtagctgactcatgatgatcaagattcagataactgagcttcaggctggggatctgtgctggatctcttttcatgttcgatgattcaacggtcattaagcatcatcataaagtggcaactaacagcagcactatgttgtgggagttcagtccttgatggtgataactggtataagctccggtatgagcaacactttgcactgcagtttttgacacaagaatgtggaaactgaaagtagcagaccctacccgacccacgagatgccaatctggcaaccatcccagtcaacacattcctcctatataaagcacaaaccatatgcctcccctcgcagctcatacttgaacatacagcatatcacaagacacaacataaccaatagccatgggggctgtgaagcataccttgaaagtgtttccatggctcctactcttcgcacaattggctgtagccactacctccaagtgcacaaatgccacaaatgggactgagactgacagcctgggtgctatgaaactgaagctgattgccattgcatccatcctcacagctggagcagctggtgtgctggtgccagtacttgggcgctccatggccgcgctacatcctgatggtgacatctttttcgctgtcaaggcatttgcagctggtgtcatcctggccacaggcatggtccacattctgccagcagcatttgatgggctgacatccccatgcctctacaaaggtggcagtggtgggaacattttcccctttgcaggcctcattgcaatgtctgctgcaatggctacaatggtgatagactcactagctgctgggtactaccgccggtctcacttcaagaaggcacggccaatcgacaacctagagatccatgaacaacctggagatgaggagaggactgggcatgcacaacatgtgcatgtgcacacccatgcaacacatggccattcacacggagaggcagatggcatcaattcaccagaggaggcttcaatagctgacacaatccggcacagggtggtatctcaggcaagtgcagtcccttgatgtccatgaacctcccttgcaaatagtactgataaaagttgaagttagtgcagcaaagaaaataaaaaaaaagtgtggcattactttaaatagaatcaagaatacaccaattttccatgagtagtgcataaccaatcaagataacacagcagtttgctgaattagcttcaaatgtctcattatggtcaatcatatatttacattgtaagatacatataattgtcattcatagttccaagaacaaaaggcataataatatttacagttcccaaaacatattaatgaagaaatatagattgggacaaggagataataaatacctaaaaagtgggtgttaacttgtgcttcagagcataaagtccctctccagcctgagagaagtgagcgcactgttcatcagctaagtagaattttcaggacaaaaatatattgaaataacaaagtaaatctctcaccatgcaggtccttgagcttggaatcttggtgcattcagtgataattggggtgtccttaggtgcatctgtgaggccaaacaccatcaggcctcttgttggtgcccttagcttccatcaattctttgaaggcattggcttgggtggttgcattgtgcaggtatatacttggaccataacctacaataccttaatatatctcgctgaaaaaaactaaccattctctatgctttgaccctttgactaaaataatgagaagctacagcttttatgaaaaggcacttttataactcagcgtgccagaaaatttataccaagtgccccttcagcagaatggggggataaacaagaggaaggaaaaaaaggagaatgtacaaagttaaaatgaaatattcttggacagcaacatggcacattatacaagtacaaactattgcaaatcaatttttatagtaataacagaaggcacataatatatcccaacactgatcaacaatcaattgttgaacagacatgttccaaaagctaaaacaaataaatctcaaacttttctgagagagaaaaacaacttttactaattactccatgcaaatagaccctagcaataatatgttaacatttattcaataaataaaataaatgaacacaaagaagaaagaaataagctcatattgtgcttcacaacaacaaaaaaactaacatcttctggcttctctttctcgctgcaggcaaatttcaagttgcgagctaccgtcatgatggcaatttttttctccctgactgcacccattggcattgcattagggattgcaatttcatctagctacaatggccatagcactacagccttcattgttgaaggagtgttcaactcagcctcagcaggaattttgatctacatgtcattagtcgatcttctggccacagatttcaataaacccaaactgcagacgaatacaaagcttcagctgatgacataccttgcacttttcttaggtgcagggatgatgtccatgcttgctatatgggcatagatcttcaaaccaccagaggatggctagagttgaagacataattttatttgtccaagagttctccattttctcaaataagacacccttgttgaagggttcatcacataaatccacgagttctccattttccatacatatagcctcagatggtcctttgtacttcataatgtgagattgcatgatccattattcattagcataatcctatatcctaaagttatgttagtcattagctgtaggtcctgtccagagctttcagtcgtaaagagagacttgaggccattttatcatacaatcaaccaatctgtatcttttagcttatcgcaatagccagaagaaacatgtaaaattcatagttaaacatatgacctgagaggtacaaactacaaaggtcatggatatatgcaggaaaatcaacagtagtacactcttctgagaaaaacatgtttaacaaatactgatcaaagtgatattaaaaggaatcccccttgatcctatgttgagagaaatcttcatagaagatcgatatcctttagaaagaatgccaatttaacaaaaaaaaaaggctataagagtttagaagccctttgtaaattcttagggatgtatacattactttgtgattagcct

SEQ ID NO: 4719 - DNA, 4869 bp, Sorghum bicolor
tgatgtgcgcctgtcatgtaatgctgtagaaacaagctcagcaagctgctgcttttgtgttcttgcaccggagctcttgtgcgttgacccttctaaacctgagaacaaaggaggaagaacctgtcccgtgaagctttctcgctgtgccgatcggtcgtgatattgaatttcttttggatgatgccgtcggaaagcataccgaaaagaagagtacggcgtgtgctatatttctcagcgagcatagtgggtttacccagtttatgggttgcttttgtcttttctagtggcgtcctgtatcaaagcagacgattcttaatttgttcagatgacaattaactaatcgagtagttaatttttgtttcctagggcagggtaccgagcaattaattactcgctccagtaatatattcgtatcctattgaaggggcatgtttgggatgcatgaagtgaaatagtcaggaactgaatctgttcagtaaaatccttcgatatcattacccttttcttcattttgcatcgaaacttccaagttttcctagtaatcctcgtagctggatttcaaattttcagcttgaaacataaaaagttgaggttcaaaaagagtatcttttagaagccctaccaaataggacaaaaaaaaaatgtttctctctctctctctctcaagccaccaaggagctacagctctctttgaactaaaagctggagtaaaaaaatagcttctatcacctcctcttaaaaatactctctgaagtcattttatcaaatgttttttacaaagggcttctgtttcactaaaaagactaatccactagaagagctcgctttaaaaggaccggtgccctgcaaaactgatcctacaaataaaagatgtgagctcttaacttgaatataaatgtccttcggagtaggctaagttcatctcatgttccatgaacttaaataacacaattttagttgaatctggacagatactcaagtaaatgatctaccatcttcccactcatactcccatgaacttaaataacacaattctcgttgaatctggaccgatactccagtcaatgatctatcatcttcccactcgtatacacagaagttagcattgattactaccgatactcgccaaaaggaatagaatagagctgataaaactctcaatgcaggcagctcggtctatgcttataagggcctgtttagattgggaacgaaaattttttgggtgtcatatcggatgtgtcggaaggatgtcgggaggggtttttagaaactaataaaaaaacaaattacatagctcgtcagaaaattacaagacaaatttattaagcataattaatctgtcattagcatatatgggttactgtagcacttaaggctaatcatggagtaactaggcttaaaagattcgtctcgcgattcttaactaaactgtgtaattagtttatttttttatctacatttaatgttccatgcatggagtaactaggtttttttaactaaaccgtctcgttcggttcgctgaaatttagcttatgctgatgtttatattaaaattctgtgagaaaaaaagtgagaaaaaactaccgttcaaaaagtgaaagcactgtttgccgtggatgtagcaaggagagatattttttccttcttttttttttacaacagtagcaaggagaggttgaccccaagaaataaacctaagtacttataagcatagaccgagctgcctgcattgagagttttatcagcttggtatctttgatttattcttcttctagtatctcctaaagagtctcactgttatcatgacccttatcaacaatacggccctttttagcatgtttattatcctctttcttgatcgtctttcccatcttttctctacttctcatacgaaatctgctgaaggatcctggagggattgaaacagcttgtgctaagaatggaatatatggaaaagaaggaagaaaaactagacacaccatgtcggaccagtgactcacaacaactcacaatctttcctcccacaggcttcgctgcagctttcagagccactcaaatccccttccccttctctacacacacgaacgcaagctcccaagaacgcatccaccattggatttggaagcttctccatgggacaccgagcctcgtagacgaagcagaggagaccagagaaatcgaagagcaaggaagcaagaagcagggagccatggcgttcctccttcccaagctcacaacgccgtcaggcccgtcatgcaagttgcccccgagtcccctcctcaagccccagctagcccagccgggccacagcggcggcaagatccaaggctccgtctccggcgctggcgctgcgcaggtcgcggccccgggccacctcagtctccttctcctactcagcgccccgcagcaggcagcggacccagcgtccaagtccacggcgaccaagaaccggggcaagggcggcggggatccgcaaaggtcggatttttacctcaacctcgggacggcggtgcgcacgctgcgggacgacctgcccgacgtcttcgaccgggaacccaactacgatatctaccggtgggtaaaaagagccattttcccttttgtgttgctatattttagttaattttgggttaagcctttgagaatcgatagcgattgttgtctgaattggatttgatagtttgctagttgctgatcatggaaaagtttccgtgctgctaattctagtttgttacttcgggggattaaggtcaaacatagaaattgagcaggtaatggtcactcggtgcttacacaaccctacataaatacaggagtagtgttcaacatgaaacataatggcgattgtttggtgatgcaagtcatgattctagaaatgaagtatactgattatttgtttatttcacctagccttctagtagaacggataatttgtcatctatgcaatattgagaaccaagaaacaatagatgagcaacaagtttactgcttggttctaagactaggctgttagagggcaatgagatgcaacagtcatcattttttttccatgactgtccatcaaggcatgcttttcattaagagtaaagaagttttacaagtgctgttaagccatagcttactgcccatagctgaacagacaccaacctaacaccgaaaataattacagattgtatggcacactattttgtgacaacaaattaagcacatggtggcgatctagtcttaggattgagagccattagggtgccaggacctccctttttgtttttggctgtgtccttttttgcagaggtcaaagtgtgtatataattggaattgtatcaactctatctaatgatcttgaattaataaaatatacaagtcatcatcaacagttatgctattaattatttctgataagaacactaggcctgaattttgcaatctcttgcaaacttattctttgtaggcatgcttctacacaaatgtaaagatgggaactgaaaataagtttatttttacatctattgcagtgaagacatcacatttgtcgacccactaaacacttttcatgggattgacaactacaagactatcttctgggcacttagattccatgggcgcctactattcagagaaattgggcttgatgtatcacgcatttggcaactgacagagacttcaatagttgtccggtgggagctgtggggcactccacgtgtcccatgggaatcatatggctgcttcagtgggacgtcgagatacaaggttgacaggaatgggaaaatttacgagcacaaagtcgacaacttggcattggacttcccacgatcagtagcgaaagtgggcagcattgctgacatggtagtcgccacaccaagccccaatttaacgttttggaatgtggttgggccaggtgatggttgctcatggacaaagctttatgaagccgtggtggaagctgtggaacgggaagaacatggttccactggcattggcgttggaggtctacctgtaccctgcagctttggctgcggctgtggcagcagtttttgaactgcagactactgtagcttgaactgctgcagccgcagctacagctgcaaccagctcaaacgagcagccagctcaagcgaataggccatcacttgttcataggatggaatgagctccagaactagttgcttggtagttcctaggggaaatgtatagaatatatatgggcacatgaatcacgattctactaatatctctttgtatattgtagctatagggcagttaatttagataaaacacatactagatggctatattttgattgcccttgtggcattgtctcatactgggcactttcactgctttcttatgcgatacatggattttgactctgatttgtccaatattagacagtttaggatgtagaggaaaatcgaacaacatcagtagttgagggaggtcaaaataagactttccctcactaaatgtgctgtgtttggtttggccggaacataagtgggatttttctatcctcattagtagagtcaactaagtcatatggcctatttgaataaatcatattgttgttcctcacaagtgcaaaagaacatatttgacaaagcttttagagcagtttctgggctaaatataataaaagctatgccaaacatttttgacacagaaactttttatgttgatctcataaattattctctaaaatgaattaggaggctggagctaaaaacatcttctcctgattctagagagtcatagataatcattttccagtgcagaatcactttttacatagaatcaggagctagataagctctaccaaacagaactatagcactaaatacttagtcacagcgaagctacaataaactccgt

SEQ ID NO: 4720 - DNA, 7778 bp, Sorghum bicolor
caaaatagacactgtagcactttcgtttgtatttgacgaacattgttcaatcatggactaattagtctcaaaagattcgtctcacaaattacaggtaaactatgtaattagttatgtattttatctatatttaatgctccacacatgtattgcaagattcgatgtgacggagatctgaaaaattttacaaaactttttgggaactaaacaatattcgagctggtcaaaactgctcgcttccgcttatctgccgaatctgtcagccattcaacagtgtttttccctcacaacaaatcagcaaacaatactttcagccatggcttatcactttatcaaccaagcgaacagagcaacatgtgaaaagtttttgatactgtagcacttttcatttatatttagcaattattatccagccataaactaattaggcttaaaaagattcgtctcgcaatttacatgtaaattgtgtacttaatttctattttcgtacaagttcacagtcacacatgtaaattgtgtacttaatttctattttcgtacaagtttacagtcacacatgcagcctttagggaacgatcaaacataattgaacgactagtgtaggggtatgatatgagtaagttgtcaagggtctgtttggtttgtatagataaacttttaactctcgttatatcgaatgtttggaaatatacatagagtactaaatataaactatttatgaaactaaaaacatagctaaagagtaatttgcgagataaattttttgagtctaattagtccataattagatactaattactaaataaaacaaaaaagctatagtacctattaaaccttaacaccttcaaccaaacactctcttaaacgtctttagggaatttgacacagaagaacaccgtttgttttaggaaaccttctctcaaatgagtaaaaccagttgtagggaactacttttgtttcggtttgctccaaatgctaagcattcttccctttatgatatgataaatcataaataatactttggatccattcatttgttttataaatcatattttttatgatatgaaaaacaagaagccgccggtcttatgctttggatctattcatttgttttatatatcatattttttaactaataatatttttttctaacaataaatcataaataatactttcagccaaacttatcggcatcgcaatctactgctactcaccaggtcaccccgtgactcagccacgtgacgaaaaagttccgatgacgcaaatgaagccgaaacgcagctgactgctaaccagctgctgtggttgggagttcatcagtagtaggagtttgtagacaaggtagctggggtagaaaattagctccatctgagtacttatctaacaaggcgccaatcgatcgggcatcacctttggctttaccatctctttctctttctctttcacaacgactcctcggccttggacggatccgcaggacaacggcactcgcagcacctgcgactgcgaagctgctgcaaccagttcgtggcaagcgatcgagcttgatcttgttgcctcccctccgcccattcctctgccgcacaggcttgttctattttggatacaaggagcgatggccggactaacaaaacaagtatcgatcgatcttgttaaccccctcgctaatcctgatcaataaatagctcaacttacaattaaactggagttctttgctcacacgtggcccccgactgacgtgacctgagacgtcttgttcatttgaacttatcagacaaattactcaacagtattttctattatgactacaaacaaataaggtggtcgctgaaaaaacttcatcatcaatcaatcaataaagaaaatcgcatcaatcgccgtacgcgtgcgtgcatcctccctcgtccgatttggcgttatcagagcggagcacggggagagattccctggacaaaattgggcacgtcttcctccgcgaacttcgccttcctcctcgccctgcctacaactctctccgtgcccccctcgggccctcgcttctcgcgctcttcttcctctgcctgcctgcctccaacaactcgtgagggcgccgccgtccgtccccgtctccgtctccgtctcggggagcgaggatgatcgcgcgacgcctgctccgatccaatgcccccgcccaggtgattatatatccattcatgtaccttcagtccgacgctccgagtcctagtagatgcatgcaaaagatggcttctttctcgggtacagtgggcagaatttcacaggcttctcatcgcctgagtggaagaaaactttgttttggatagaaatcatcggcgttcatcgcttcagggaagcgaggacgtacttcctgtggctgtggctggtattggatggataatatgctttttttggttgcaaagtagtactctggtcgcgcccttctaccgttttcttggagaaagtacgataaattatgtacggcttattctagttctaattaccagctgcttcgaggtgcgtagtagtcgaggtatcagattatactttaggaatccctgattttaaaatcgcgaactgacaaaaaaaaacccagcgttttgacaatttttcgtggaaaattagtagagtaagtatgctcccaccttaaatttcccccctttttgcgcgtagattctgaaacggtcttttcgagtcctagtgtcgtagtaccatgtgatgcaaagctgggttcctttatattcgggatatgcaattcctttatttgacttgcatacacaaagtaagatgctttattcagtgctgcacatttactgccttgaggtactatgacatgatcttttccgttatctaaaaaaaaggttctatgacatgaatattcgacctatttgtgtggttcagacatcacttgccaaagtttggccattgtcggagctcatatgcgaccctttttttcctgcctcacaggcaagcagcttattgaagcatgtaactggcactgcgagtttgcaagggcatgcggatagtttgttggatgcctcagtcagacattttagttcagctccatctgcacagtctgcctcaactgaagaaaatgggtacgcagttggaattgtcacacagttgtgttctgttacaccatgtaaactcctggctattgctgatctgcaaagtgattcttccaggtttaagggccatggcatgttggcaccttttacagctggctggcagagcaatgatttgcatccactgattattgagagatctgaggtcgcaactctgaactttagaattagtttttgtagtattaaattatggaaaagtaaatttagaatgccacctattttattacctatcttacatttaggtcctgtctggttcccaagaattgagaggaattgaattgaaaaataatctaataaaataatgggaagcactttccagatattggttttaattaatgggatccaaacagtcattacagaatattttgctgtctagcttactatttgtatatgcagggttcctatgtttatgacattaatgggaacaagtacctggattctcttgcaggattatggtgcacagcgttaggtatgtgcacttgattttgtgataatgtaccaccatttatttctgtgtctttagcaatgtctttgcatctgttactactgcatcatctgtgttcattatgtcttcaggtggtagcgagcctcgattagtcaaagcagcaactgagcaattaaacaagttacccttctaccattccttttggaaccgtactaccaaaccttcgttggtacatttcttgaatcactcgtcaatttttggtttcttcatattgaaaccagtgtccctatcctagttcttttctaaaaaaaatcgcttgcgagatctccaaaactaattatcggagttttaatgctactttcaggatcttgcacaggagatccttagcatattcactgcaaggaaaatgggaaaagttttcttcacaaacagcggttcagaagcaaatgactctcaggtgtgactattgatagcacctactgttttctgcagtttacagttcagacccttgataccatcgatggtgttgctgtcactgttctttgcttttactgcaaataactgaaagttcttaaatagtgatttttgcatcagctgctcatatttaaagaacttttacacaaaaactaaaagtgaattttacatggtgtttacaaatcactaaagaactatgtccgtgctctctctttactgctagtaaaatggcttttggttcatcgatcatggtattcatgtgtccattgtggcccaatttgtctttgaaatatatatacctagctagtagttggtagaccttgaggctttatattctatcattttaatgtgtttttcccttttctttggtataaacatggttttgtttctcacaggttcattgctgatccttatattttacaggtcaaactagtatggtattataacaatgcattggggaggccaaacaagaagaaatttattgcacgatcaaaagcgtaagctttgtactgtaatcaaattttgttcttgaattagtgcttcttcagttaagaattgtcataaatgtcggttcctgatcaaaatttgcaatgttctctgatgtcaagttatgttctatgaaaatctggaagcttttgagattccattcttactgcttgttacacatgttgcagataccatggatctacattgatatcagcgagtctaactgggtgagtactgtcatactaaaaaagccggttcaccagcatacatctttaaagcatgtccaacggcactcataaatagaccttcaatagttttctgattgcaactctatctttagtcttcctgccctgcaccagaagtttgatctaccagcaccttttgttctgcacactgactgccctcactactggagatatcatcttcctggtaatatgatttaaaattttgctagatgaattccaaaaagcaaaacttctgtataattgagccgcatgttttgctaataaataattcggtgcgaaacaggtgagacagaagaagaatttgcgactagacttgccaccaatttagagaatcttattctcaaagaaggaccagaaacagtagagttcttttcaccaaagcttgaatgttgtcaataggttcaaaacttaatgtctccctaattatgtgctatctttgatttatcagatcgctgctttcattgctgaacctgtgatgggtgctggtggtgtcatccctcctccaaaaacctattttgaaaaggttatatactacgagttccaatactttgatagctcttctatgaacaaactgaacttcttgaaagtatagttgcttaattcacccatccctctttgcctcttctctttccttccttcatctcattgtagtggtgttgtttgtgaattgctattgttggtgtattaaacaaaggcctacatcaaggacttgaattcttgttcccagtgtttattctgtgtcactttgttttctgtcaacaggttcaagcagtggtcaagaagtatgacattcttttcatagcagatgaggtattgaacactttctatgaaatcaaacaatgtcaaatatgaaggaaaaaatataatttttgtgcagatattgttgactgataaaacattctaggttatcactgcatttggaaggttggggactatgtttggatgtgattattataacatcaagccagatctagtttcattggccaaggtgaattttgagtctcactggacatatgaacagtgcttatatgacattctgatgtacagagattaatgccaattttactgtaacaggctctttcaaatgcctatgtacccatcggggcaactcttgttagccaagagatatcagatgtgattcattcccagagcaataagcttggtaggttacaatttctgtgagaccaacgtattgtttctgcaatggtgtgtggtgagctttcctgaaacatcgcatttgctgacatgttaccttgtattacaggttcatttgctcatgggtttacatactctggtcatccagttgcctgtgctgtggccatagaagctctgaaactttatcggtatatatgctgcacttttcataacacgtatttgagttatttatctgttgttcctgatgaatgatttgcaaaaaaatggcatcagcgaaagggatattcctggtcatgtcaagcaaatcgctccaaagttccaggacggaattagggcgttcgcagacagtccaattattggggaggtacgcatctgaatttctgaatcaccaaacctatgaattcctgaatcatcaaacctacccagaggctctttctcttggttcaaatacataactaaaatgctcctgtactccagatacgcggcttagggatgataatgggaaccgaattcactaacaacaaatcaccgaccgatctattccctgccgaatggggtaagtcaatgtagcagctggtacacagtagcatgacattgacatgtaacagatagttagagctttactaatcctgttccacgatgcctagagatgccatcatcctggaaccaaagcgcttcctgaatcccccagaaactaaaggtctgtatgatgtcggatgatactttttcaggggttggtgcgatctttggagaggagtgccagaagcgcggcatgttggtcagggttgccggcgacgcaatcatgatgtcgccgacgctgatcatgacacccgctgaagtcgacgaggtgtgccatcagcgattcacagtgtcaccgttgtcttcaagcctcggtagtaacccagtaacatcattggctttgccttttcagctggtgagcatctatggggaagccctcaaggccacggaggagagggtggcagccctgaaatccaagaagaactagcaaaagggcgaggacgacgacgataacaccgggcggagctgatgtacaggtgaaataaaagttggtggctgcgagatggcaataacgcaccggaacggtcgtcgctgttcttgaagtgcaaggtcgcagctgctcggtcactaagcaatggtgactgaccttttaaacaggacatagatgtttttttccccctaagcaatggcaatatctcaaatgtttgctgccctgtacttcctgaagataatttgtttcaagtatacccttactggtagaatattcagatacataactttgtaaggcaaaacaatagtaaatggtcccaaataaagtgaaggaattacagggctgaacccgtgtactgtgcactgctgcttgtaacatcggtgtgcatgtaaagagagcaaggcaatcagagaggataagatcgcctttggtaagcaacaaggctaataaattagataacctgcacaagttatcacaaacagttggttaagcaaaatgcctcgggtagtcaggtggcagctagtacacaaccacaacggcatggcatgtgacagggagttagtgggttgctaatcctgttccaaggtacaatagaaatgccaccgtcttggagccaaagcgcaagcctgaatctactactagtactagaaagcagagagcaagctgtacgatgtgggatgatgcttttttcaggcgttggttcgtgcgatctttggagaggagtgccagaagcgcggcaggctggtcagggttgccggcggcgacatcatgaagtcgccaacgccgatcatgacgccaggcagaagtcgacgaggtttgccatcagtgtatcacagtgacagtgt

SEQ ID NO: 4721 - DNA, 5849 bp, Sorghum bicolor
tgtcgcggcgagacaacaaacaaaagctcacgctgttgacgtgaacgatccgggcatgcatgcatgcacgcacgcatacggacgcagcaacagacggggaattctccggttctcccaccctgccccttgtactctccacgcacgccactgcccactgccccctggcctgacatcaccggaacgcccaggccaccagaaaaaaaggggtccagaaaaacccccacagccacagggataggggtcaaacggccggccgctgtaactttcacccagggcccggccggacggccggcagggcggcggcggctttcgtgctgaggtcaaagcaaaagggacgctcgatcgaatcaaacgtagccggccggcggccgcttcattaaactagtagtccgaaattcaccggccccgggcgccaccgcaaccggtcgccggccactcgcgtcgcgagccctgcctgtcacctcctcgcgcggcggcgactgctcccgctttgaccgcgggaggcggattagcgtagggagtggtggattagggcgctgggatgttaaaagaggagacgtgggtgcagtgtaaacaagccaactttcccgtttaccggggcggtaactttaccgccatgacaagacagcagtccttatccacaacggacaccctggcacccggattgaatacaatatatatggatggatgggagtcataaaagtttattattagtactactagtagtaaaatactctgctgctcaggtatttccagaatttgcttcagagccaagatatatatataaaaggaaaaatgcttgctgctctccgggcggctgctgctgctcactctctcaggtcaaatcacctttgattatgcgtcccacattacattattatcgcaaaagataatgtaccaataatgtaagctgccagccagagaaggaaaaaaaaaccacgcgcgcagagagagaggtcgatggcaatgcgttgtcgcttttcgtttctgtcgcgtttcaacgtggggtaaaaatggtcgtgctgcgttggcctaccacgcccttggctttcggtcatcgcccactttgggtcttgtttacttgcaaaaaattttgcaaaatataaatagtagcgttttcgtttgtatttgataaatattgtctaattataaactaactaggctcaaaagattcgtctcgtcaattacgaccaaactgtgcaattagtttttatttttatctatatttaatactttatacatacgtctaaagattcgatgtaatggaaaatctaaaaaattttgcaaaattttttagaagtaaacaaggcacatggttggagattcttttccgcccccagccccagccccgtcccgtcccccctcccctccaccaccactccacgtccacgccctgaatcctagagagagggaggccagccagccagtcgcaagtacactgtgaaaaaaacattccattataacaacagagaaaaaaaaaaagtgggatggcaagccaagtacaagctctgcgacgtgttcagctgctggatctatccacgtacgtgcgcgccagtgcaatccattatctagcagtactatttatttgagattctcccatttctgacacaggatatatatatacatgcattttgattgaatcatctaaaatcacacaggttttgaaatccctgcgatggccggcccttagagccgccaataggcaccgtccagatccaaccaatcggttaaactctttttttgagtctcaaattacgaggcaggaggagccgtccaatgggaaggtgacaatttttatttaaaaacgcaactggctgattttcgagataacagtgggattaagcatggtaaccgaggtaacagtaaaagcgtagaaaagggtaaaggtaactagcgagcgatttggcactccaaccccggggctaagcacatgggtgtcccgtccatatatatacgcctttccccccccaccggctgcaggcctcgccccccatgccctccccgtctcactgacggtggccccccacccgcccggccccgctcgtcggcgagccccttcccttccttccccctcgctccatcggaccaccgctgtcccgggcaagagatccggccaactcaggtgagctctctcgccgcgcgcccggcgccgcccgccgagcgggcggtcgccacattttcgttcgcttttttttgggcgaggtgacggtgacgcggagtgtaaccgctttcctcgtcgtccgtacctcgcaggttgctcggaaggccggcgagccgcgcgtgctgggcgccgggatgcaggcggccggcgccagccggtggcccggatctcgccggcggcgcgtctcggcgaggtgaggcggctcaattctctcgtgttcatctcttttcgtttccgttccaaagcggggtgccgttttttttcgggttgttattgttgtctgttagtattattagtttttttcctttgctcttatcggtttcagagtgtgtgcaaactgaaaccgaagtggtgagctgcaaagaaacttatcttttgctggcggcgtagttccttctggtggaggtctggactctggagacaatggcagtgaattggttggggaaaggtgtttgtttcctttctcctttgggaggtggagtgggttggagccagagagtccctgatttttagtgcattttgttgtagagtagccacatggtctgtgttgttttctgctggttgatgaaccgattttcagtttgaaaatagggtggtactttgacggcatcttgtaaatctttgctagtttcttccatgttcgtagagtgaagtcttttggccttctgccttgcgtctggaacgataataatgactaaggccttgtttagttcaccctgaaaaccaaaaagttttcaagattccccgtcacatcgaatcttatggcacatacatgaaacgttaaatatagacgaaaacaaaaactaattacacagtttaactggaaatcacgagacgaatcttttgatcttagttagttcatgattggataatatttgtcacaaacaaacgaaattgctacagtacccaaaaaaaacttaaacaaagcctaatggaatcagcgggggagcatccgtatattttattttcttcagttttgagacaatgatagcagaaatgtgccaagtaaagggctctcccatctccgcatttcttttgggaaacttgtttaagactgtatgcgcattaagctttgttaaacgaggaatcagtcgagttagcattgtgttggattttttttttaatcttgtccacctgttttgttacaaatgtagcctagtcatggtaacgactcatcatgtgcttgctcttgtgtgatttattgattgattgatatgatctgactgaattaggagtctgtcgtgcagcagtattcttgctgccttcctgatactgttatcaacaacgaaagaagagtagctttacatcaaagaaaatttgtatgggagattatctttgagatttttagcgctgtagtttagaattttagttgattctggatacggcataggttgagatcagcaatgaagatatgtcttagcaagcgttcaaatatgaagttagtttttttgtggcctagtatctgccatggaagtataagtatcttgtatctattatatactctgcttttaatccacaatttgtgtgaaacttatcaaagaacgttatgcattttctgatagtttgtctcttgatttttccagtgtgggcctctgaactttctgaccttgagtcctcgattttgtcatagatcagacaaataatggaagagttacaagattgcaactcgaaatgcctggttgccctcccgggctctttggttctgcatctctttaggctgtttggccagcaggatcagagttcatggcagaagtacatactagcttactttctgttggtcaggaatgactacttctctggggagtcgaagaaacactcagatgtgttctgtgatatttcagaattagatttctttccatatgctacagatttggatagtgaagaacttgaactgaaggagcagaaacctatttcgaaggctcaatcaggaggtgattcaagtagcaacagatcaaatgattgctacttcccaggccttcatgatgacctgtctcaagactgccttgcttgggcaagcagatcagactacccttccctttcttgtctgaacaaaagattcaatttgttaattaacagtggatatctgtacaaactgagaaggaaatatggcatcgttgagcactgggtgtatctcgcttgtagcttgatgccctgggaagcatttgatcctttgcggaagcggtggatgaggctcccaagaatgccatgcgacgagtgcttctcctgtgcagataaggaatcacttgccgtcggaacacagctgcttgtctttggccgtgaatatactggccttgctatttggatgtacaacttactgactcgcagttggtccccatgcactccaatgaatctgccccgctgcctttttgcctcgggaagctcaggtgagattgctattgttgctggtgggtgtgataaggatggacaggtgctgagatctgttgagttgtacaactcagagattggccactgggagactatcccagacatgaacctgcccaggcggctctcttcaggtttcttcatggatggcaagttttacgttattgggggtgtatcgagtcagagggattcattgacttgtggagaggaatataaccttgaaacaaggacctggagaagaatacttgatatgtaccctggtggaaccagtgcatctcaatcgcctccccttgttgctgttgtgaataaccagctctatgctgctgatcagtcaacaaatgtggtcaagaagtatgacaaggtaaataacgcctggaacatagtgaagccattgcctgttagagctgactcatccaatggttggggtctagctttcaaggcttgtggcgatagattgctagtaattggagggcatagaggacctcgtggcgaggtaatactgctgcattcctggtgccccgaaggtggggaagatggtgctgactgggaggttctatcggtgaaggaacgtgcaggcgtcttcgtttacaactgtgcaataatggggtgctgagttacctttgcttcagtacatgccgctggtttagaaagccaaccatttcttgctgccatttagctaccctttataatgacttgtaattcagaaatgacacaccccccatttcgccgagctctcagttgatgaatgttttgtagagagcatagagcattgagttcagtttacctggaactactctttttctgttaaactcgttcagaattctttgttcttgtccagtatgaattttatgcagtattctttattcaccattgttggaaaatttatctgcgtcattgtcctgagacaaatcttaggcctcgattttcaatgcaccgtacttccgtactgatattcagaaatcttgtagtcagcgcaaacaacagtcagaagtcagaactttgttgtgtgcaatactttcagatttatattagccatactttcgtattatcctataattcgattattctgttcacacctaaattttaattgcaaaagtttgaccagtgatctctagtaggaaaaaaaaaggttcagatttgtcccctctgcagaacaacctcatgactggctgacagcagggtacacttgctagcgacagacgttgaactggaactctgctataaaaaaacacaagctgatgtgaacgtgaatatgtgatctctgaataatgcaatacatgggggtcaatctcgcttttaaaaaaga

SEQ ID NO: 4722 - DNA, 5044 bp, Sorghum bicolor
aatcggtgacatgccaacgtccaccgctccggcacaccaccatgcaatgtcaatgtatgtatgtatatatgcaacggagtggtttgccacagctgacagcaggagcgtggtttctctggccattcagaatcggagcttctcggggcatcctgcaatggcggtcacagggcagccccagccagtgatctgctgttcatgtgaacgtgacgacgaggagcaagggaagtagtagagggcagtgtcatcatctgcttctgcgtgcaggcacggccagtcggccacggcaagagaggaagggaggaacagggccatgtgttgctgccaccctccatccatgtgacccaccaccaccctcccaacaatttagctgaatcaaggagggcccactgcccagaaagcagaggaggaggaggaggaggaggagcactgacactgaacaagaacaaggcaggatgccattttttaatcagtggataactcaactttattattgtaatataaacctaacattgctttgtatgtcatgaggcatgacaaattcgtcatactataataagtacgtaagtcatataaatgctacagccctaagaatggtcctgcttcaaccgtctcctcattagtcattactgataaatggactcaaatctttcttggattgacagggaaattggttggggtagcttgcagtgcagcccatactataccattgcctaattgccatctttgccatcttaattcatgattagataataattaccaaaacaaacaaaaatatagtatcctgaaatttttctcatcagcaaacacggccgaggagtttgcttctttgcaatatcattaattaaaagccatcacatcacatcagctgcggcttctctgctgctcgcgtacacgtcagctgggcgagcagacagcggagtgctgtgctccagtagcgcttgccgctgccgccgctccacacacacacacccaattcttcattcttttcccctggtttccctcctctttctgcctgcgcttttgtctctcttgtgccgctctccaagaaaccaatccatccatccatccgcccgcctgcacaaggaatcgatccagactcgccgccggctcggctcgatccctcgcgccgccatcgcctttccgccccaacgggccgggacgccgctgccgagggcgacgcgtggcaggcaggcaggcacagcaagcgcgccgcttcaccgacgtctgcgccgcctgcccctggctggggttggcggaatgcgtcagctgtagaggacggccacggcaccttttcagcctttttcctcgtctcctctccttccttctctcgggctcgatcggtagcgtctgcggctgctgtgttccagcagttcagcctccggcagcgcctgctccacaaacagttggcactcgtgtctcctgtgctccacgggtcaaggggggctggccaatccatccgcccatccaagaaatcgttcatccccagaagacaaagcgatccacttggatactagataggccctgtccttgcagtgtcgcgtcccctctcgattcccgcgacaggtcgcagtgaatcagcggcctttgaagtgaagacccctgctgttcaccgatccgacgaaggcagcactcgggcactgctgcttcccatttgccgaactcggtctagcgcaggtaaggtggccgcagctgagtttcatcttctttagcctgtcgttttcttgagatattgtgggatccaagctgatgcagcgtgcgtgttcttggttgggatctcagtttctgcggcggaggagtaggggaagacggtgaaattctgcttctctctcgttggtaagtattttagctgctttgacgatttggatctaaaggggaaatgacgaacatcttccttattatatgctacctctgcctattgtaattgctgtgtttaaggcttcttttctgtttaattttaggttctgtggactaaatgagacctgcaagagctaaaagtggcaatgattgacgttcagatgagtccatttgtgctggctgtggtgagcattgcatttctcaacttgtggttcctgcaagctcatggaagtgaattgcttctgagctgtggctcgaacggcactgttgatgctgatgggcggagatggatcggtgacataacccctgagggcaattttaccttgagcagccctgggattgccgcgtcacaggttgggaagagcaattccgatgaaatattcggaccgctttacagttctgcccgtttctttgacgcagcaacttggtataccattagtgtgctgcctggaagttactgtgtcagattgcatttcttcccttcaacattcgggaatttcagtgcaaacaattctgtgtttgatgtcacagcaaatgatttcaagcttgtttcaaaattcaatgtgtcagaggagattgcttggagagcctctgtgagcaattcagtcatcagtgcagttgtcaaggagtactttcttgtagttggtgctcatggcctgaatattgagtttgatccaagacctgggtcatttgcctttgtgaatgcaattgaggtcatgctggctccagataatttgttcaatgatacagtgagcaaagttggtggtgcaggcgtgcagcttccgcttggcttgcgcggtagaggtgttgagacaatgtaccggctgaacattggaggtcctgcacttaaatcggccagtgatcagtatctccataggccatggtacactgatgaagcattcatgttttctacaaatgctgctcagactgtgtctaatgtttcaagcataatgtatgtatcaagcaacgactcatcagttgcaccgattgatgtttacgagactgcaagaatcatgagcaataacatggttgtggacaagcggtttaacgtgtcatggcgattctatgtccacccaaactttgattacttagtccgccttcatttctgtgagcttgtctatgacaagcccagccagaggatcttcaagatctacatcaataacaagactgctgctgagaactatgatgtatatgcgagggctgcgggaattaataaagcatatcatgaggacttctttgacaactcaacacagcaggcagactcactttggcttcagctaggccctgattccatgaccagtgcctcaggtactgatgcacttctgaatggtttggagatattcaagctcagcaaggattccgacctttcttacgtgcttggtcatattgacacgggcaaccaaaggagttcttcaaaagggggaaagaataaaggtctatgggaagaagttggtattggctcagcatctttagttgcagttacaagcgttgttctgttctcttggtgttatataagaaagaaacaaaaagctgttaagaaggaggcccctctcgggtggcatccgttggttctccatgagactatgaaaagcactacagatgctcgtgcaaccagtaaatcatccttggcacgaaatgcctctaacatcggtcataggatgggaagaagattcggcattgcagagattagggctgccacgaagaattttgatgagtccttaatcattggaactggaggatttggaaaggtatacaaaggtgagctcgatgagggcactacagtggctatcaagcgtgctaatacactatgtggccagggtctgaaagaatttgaaacagagattgagatgctttccaagcttcggcatcggcaccttgttgcaatgattggctactgtgaagagcagaaagagatgattctggtgtatgaatacatggctaaggggacactgagaagccatctctatgggagcaaccttcctcctctgacatggaagcaacggatcgatgcatgcattggtgccgcccgtggccttcactacctccacacaggagcggaccgaggtataatccacagggatgtaaagaccactaacatcctgttggacgagaattttgttgcaaaaatagcagactttgggctgtccaaaactggaccaacgctcgaccacacccatgttagtactgcagtcaggggaagctttggatacctagatccagagtacttccggaggcagcaactcacacaaaaatccgatgtgtattcttttggagtggtgctctttgaagttgcttgtgcaaggcctgtgatagatcccacattgccaaaggatcaaatcaacttggcagagtgggcgatgaggtggcagcgccagcgttcgctggaagcaatcatggatcctcgtctggatggcgacttctcatcagaatcactgaagaagtttggtgaaattgcagagaaatgtctcgctgatgatgggagaagcaggccatcaatgggcgaggtcctgtggcatcttgagtatgtgctgcagctccatgaagcttacaagcgaaatgtagagtctgaatcatttggaagcggtgagttgggattcgctgatatatcctttagcctccctcacatcagagagggggaagaggaacgccactctaagccatcaagtatcagagaggaactagacacatgagaacttctgacttcagcaaaactcactgaaaaatcttgctttgtagccatgatcttgatgtaaagttgtgttatattgttctcttagttttttttagctgtcagttgcttcttattcctttgggcattctcctgcttgacaagtgtagaataatagtgttttcttttcttgtgtagattaccaaaccccgcccaaaaaaaagacacagaagtgtcaagattttccttgacatctgtatcatgaaatctgcataaccaccgtccatgtactgctacctgagtgacctgtataaatggcactgataactatagtggatatctttgaagatatattgttgacctggcttctttgtaccaatgcttatactgctgcctgagtaacctgtataactggcactgataattattatctttgaggatatattgttgacctggtttctttgtgccaatgcttagtggcaacttcttatttagtaattagtactccatccggccgaattt

SEQ ID NO: 4723 - DNA, 5880 bp, Sorghum bicolor
ctaaaaaattttgtaaaattttttggaaactaaacaaggcccaaatcaaatggctagaggaagtgatcaattcaatgacctcggctaggctttcgtacccgctactcatacgtacgagtatgtcaatctgcagagaccagagaggaacacacagatcgctcacatttccaaggccgtgtttagttgcggaagacctactttcgtttgtttgtggtaattattgtccaactatggattaactaggcttaaaagattcgtcttgtaaatttcgaccaaactgtgcaattagtttttatttttatctatatttaatactcaatatatacgtctaaaaatttaatgtgatggagaatcttgaaaaattttaagtttttgggcaaggcccaagtttcactaccagtacatggcgcgagaacagtcatcacaaaaccacagtgaggtcacccaccagtgtaaccgacgtgacacggtgcatgccttgccaacgcaaggagaggaaactttggtcaaatcttgcgaatgccggagcgggtagagtagaggacaaaagtatattcaattttcatattggcagtggcagcatccgccgtccggaaccggggccttgtttagttccaaaatattttgtaaaatggacactgtagttttttcgtttgtatttgacaaatattgtctaatcatggactaactaggctcaaaagatttgtctcatcaattccgaccaaactgtgcaattagtttttatttttgtctatatttagtacttaatgcatgtgtctaaagattcgatgtgacggagaatctgaaaaattttgcaaatttttttggaactaaacaaggccgaggtgcgtgagcgcatgatgacatgagatgggccggcgcggtgaaagtgaaaaatgccaagacacgggcatgcagggcacgagcacgggccacgatcacgacgctgacacagaaagatgtggcggtgccggtgcagcagcagtctctcttctcgccccatgatccctccgtgctgtaacgactgcggccgggactgcttgcgtgctgcgtggtgctacacctagggacctctgtttgaccaccttagtttatacggagtgctggtagtactatttggagctttggactgtgggggcggtaaaggtgcacacatctcgaggaaagagattagctttcttaatctctgttgttagggcactcacaatgcagactctatcatagagtctaaagtcatttattacctcgaacaatgtagacttagagtctaaataagacttggagtcttattttttctatctctttcttcaataaatatgctgccacatcatcaaaataccataaataatgtgtaattaattgtcttgaactctatgatagagtcttgcattgtgagtgcccttatggtagtatgctgataggagtagtatatcagtacagtactactcatgtgaagtgctaaaaggaggagtgaagataactttgtgaaaaatatagtaaaaaggcttgtgtgatttttttgaacttaaggcttgtgtgattttttttttgaaattaggcttgtgtgatttactactactgataaaggccgagcaccgtaaagaggatgaacactttctgtgtacaggccgagcaaaatgttgccactgttgactaattaacgttgtttgtacgaatcctagttctctaggtgcacagcagcacatggacgagtttctagcgggtactcgttgcgtgtggtcaggtcatgtgacgagacacttgtatttccatggaggaaagaaaagtaaagcttttctggaaagaaatttctcatggtcatggctagagaaaaagcgagaaactgacttgtggactcctgtctagcgtctactacttgtctagtagcataagctcatgaatggagacatgacatcgcgttgctagtagatcgttgatctctggtcactggtctttggacctctggtgcccactgcccagtgctctccactctccttctccctccctcccctcctctctcttcactcttcagtcttcagtcttcacccccttgtttgtcgctggccactcgtcgcaccctcctcggcaggccagcagcagccagcagcaaggaagaatggagtacgagaggattcatcagaaagctcaggtatgcgctctacgcgaagccgcaaaccagtgcggtagctggtttgatccgacctagtacttcactttctgttgcttgctactcaatttgcttccaagttcgtcaagtgaaatgtcactcttgcctggctgccatttctttccgtctcttctccccctctcctcgagaatattatgttcctgcgtgttggtatgctcatctgtttcattttcaggctattttcctgaaacttgaaggatgctgtaagtgggtagagttttgaatgccaatagctgagtataatgtttctggtttagagagcttccggtcaatctgccttctcaatggaggcgaaacccccaaaatccagctctgaatacaccctatttccttatgagcaaaagcatctttcggaggcagtgagtgaatgcgtagctagaatgcttattctgcaggattcaccgttggtacagtatatcctagtattaggcatggcatttacgatggcttaattaattttgcagcatttttaattatttttttacatcttgttccaggttaacatatagcagtacccttccacagttcaacactaaatttcagtattgcctcatctcgcagttctttttccccctccaaatacctcccagttcttcagagtaatagaatgccctttggcctacacccacattgacgtatttgcctccccccccccaacaaaaaaaaaaaattagatcggtgcttacgcccgtacttagcggcaagcggtccctcccttgccccccacccgaatacccacccgcccttcctggtccccccttcccccccccccccccccctccgcctcctttttttaaaagtaactaccttgattgtgaaattgtaagctggggctttcatcatggaaaaaagacttacagctttgaggttgctgcagcctggtgctctttccccaacaaagctaaggatgaagattatgggagcccacaatcgagttagagtcatcaccagcaattcatcatcgcgaacgtcgcctgcaaaaaacatcgaggcttcacaagcgcagaacaggctactagtctgtgatgttctcgaagaaggtacagacgaattggccattgattggattagttacccttttcccctgacttagtcaataactcatctgtcttgttccgtaaccagtttcagacagcacatcagatggcaccaaacacccttcggcagtcaacaaaactgaagccgtggaaaaggattcagcagtggacagcaataaagttcagaacatttccaagagttcagttcctcaaccagcaacaggcagctctagcatgatacacccagtgagacctgtggaagaagacagtaccgaatgtgacagtggtcttgacaatgctagcactagtagctttgagttccatggagttgagaagacagcgacgcagaatccagcacatgggtatttatctagacagacttccatttcctccaagtggaatgatgcagagaaatggatcgtgaaccggcagaatgttaaccagaacatcaccaagggcacagcacagaaccagacagtaaaccagatgaactctgctgcagccaggggcgccattgtgcccaaaatttctggtcgtcctgtgcagaaaatgaagagggtgaatccagctttgtctgctccgcgcagcatattagagaggttatcgtttgcttcgtatcagcctaagttggttaggcatgcagatgtctgtccagttagtaatgctagtgctaactcagagtgtcacaaggcaactgatactggttcatcaattgaaatgaagccctgcaatgaagcaaacggtaactcttttttcttattttggccagaagttaactgtagcatgaaaaaaagtatagcatattgaagttcaaaccttatgtcttcaaaactgacactgatttgaacgtgtgaattgttacacgcagctattccagcagttcagtcagtgtccgtgagagatgtgggcacagaaatgactccaatacctagccaggaaccttcaagaactggaactccactcgggtcaaggacaccaactcgaagccctaattgttcgataccctcaacacctgtaggagggaggtcaatagcatctcctggagaagaatgcacagatgatggtccatatttcaacagaaaaggtgtcgcacatgcaaatgaattgtcagatactgaaacgaggcttaaaacaaggcaagaaattgctgctcttggtatacagctaggaaagatgaacattgctacatgggccagcaaagaagagctagaactagtctctgcggcaccaagcattgctgatttggagcgcatgaagaaggaatatgctgctcgtgctgcatcatatgaggaggcagaaaacactaaacatacagcaaggtattatttctccgaaatattttatcattcttgttggttttatctgctattgacttacaaagagaactaaaaaactaaaaaaggtcttagatcttggtcttgttcatttcatcttgtaatggagattgtattcctcagattcaaaaaagaagaggtgaagattgaagcttgggagagtcgtcaaagaggaaaaattgaatccgaaatgagaagaatagaggtattgactcttcttttaaaaaatggactgtacctggctttctctgcctacaattcttactcaaaatttgaatgcaatgatctttcatatgatgttttcaatggaacaatcttgcatactatgatattttgaatttaataatttggatgtggtagtaacatagaaaaacactttatgacaggaacatgctgagagaatgagaagcgaggccatggcaaagatggcagaaaagctagagatgacacgccgcattgctgaagagaaacgagcttcagccaatgccaaaatgaaccagcaagcagcaatagcagttcagaaggccgagaagattcgccaaacaggacgagttccaggatcaagtatcctatgctgcagtggctgcttctgtggaccttattagtagatagtagtattcgacaactagtattggtttgggataatagtggtgggaaatctgaattccaccctctagaagtcagcattccttgattttagcatgaaagaggaatgtctgaggtattcagatgcaaacacattcttgtttgtcttgtatgtaaattattccagtgtttttaacttggtcagtgtagaaggtacctccagctgatccttggtcaatgaagaaaagtcctaaatgggtatgcatagcagtggttcactgcctagaaccacggtcgtcagcccgtgctagtgcctgttcgcttgagctaatctgtcagttttttttttcacaagaaattagcgaatacttttgatcatgacttatcagcctgccaaaggttggcctgtacaaatagtgcaatattagaaataaaacagctagatcgactcgattgctccggccccgccgagctgctcggatccggcggtgtcgtcccggatcagccggcgcgcaggtcggcaggtacacagccacagtcgtcagcgaatccgactccttccttctctcagatatcgattgcagatcaagttcggaatcagatttgattttttcccctctataaatttcctaatgcttgggtttgtatctgcagaagatctatctatccacaagcactccaacccccagggatgtctactaagcgtcgatggcagggcggcggtgacgacggaggc

SEQ ID NO: 4724 - DNA, 3202 bp, Sorghum bicolor
ccaaacatatacacaactagtatgttttttctcatccattttgaaaccaaaactcatcatcctgcgcttggatcgttttgtgcttatatacaatctcgaacaaaccaaatttaactgccaatgtgtatattctatagtttcatcgcgatgttcacattttagaagtcttctatgcaaatttaggtagacattctcttcgtgccaagttattgttatctttgattgtcataagccaagcctcattaaacatacaccgatatcttcaccattcattttttatacattagtgcccccacgaaatgtgttttgacgtatatatttgaacatctaaatgatattttttttaaaaaaaacttggtcaaagttttaaaaaatgtcttgagactaagccaaagtgactagattgaaatatatgaagaaagagtcattaacacgtgcttccaattctaaaaaaacatgctacaaaactacatattgatggttgtatgatttttttgtgtctatatatactaatttcacgttcatattttgtatgaacgaaaaaatctacatgtgtctctgtggttcctactggattgtatcacctataaaatattgatggttgtctatttgactgcatcacctataaaactaggtatcttggttgttagattattgaaaagcatctaaataaagcaattttgaaggtcttttcactaatatgacattaaaaagtttacataatcccataacataacaacaattgactatataccccctaattataaaacatagtattatagcccttaaaacattaactaatacacaaatgctccctctctaatgattttgtaggcccgtttgtagatcgtattccaccacaggcataagtagtcatgcttgcacatggggttgtcggttgtctctctcttcctaccctttttcagtcctgcacatctactcgatgtgcaccatgttgtctcctcctccacgtcaaggcaccccttgatgacattgaactctttgtatcgtgctatgtccttgtcattcaacccctcccacatcaatcgctcacttctcgctttctcttctcccacatcatcgctcgcttctcgctttctcctcctagggctaccaaaaaaactgaaacacaatttgacggaggatgtgggaggagccgaataacgacgatgtaggcatggtgcttgagctcaatggcatcgacgagtaatgtgatgtggagaaggatacgagatgtcgtgtgttccttgttgaacggtggatcagactacaaatagtagggggtggaggcaacaaattaaatcggcatgcttgcaagcataggtaggctagtatagcgacatatggtgtcaaaatggctctacgagatcattggatgggtcatttgaactttattgtatattttaagggttacaatatcgtatttataatcgagggattatgaagtcagcacttaatatgttgtgaaaccacctttaaaaagtcccagagcgttatttagataattttcaatagtttatttaagggatatagtataacttatttttggggtgagaggctgtttctttttaaggagaagttaggccttgtttagttcacccccaaaaccaaaaactttttaagattccccgtcacatgaatcttgcagcacatgcatgaagcactaaatgtagacgaaaataaaaactaattacataattttacctgtaaatcgtgagataaatcttttaagagcctagttactctatgattggactatatttgtcaaataaaaatgaaattgctatcatttaaaaataaaaaagttttcgaaattagatttgtggtccgacacaaccacgcctcgttcggtcgcaccggacccaagtccgacccatcaccctgaagcccaaccacagcagaaccgtccgatcccagatccaacagacgaaacccgccatcctcgaagccctagcgccgccaccctatataatcctcgttcctctcgcgcgctgcgctcccatttccgcagcctcccaaaccctaccggcggcgcagcagcatcaccaccaccgcccgaagatggtgaagttcctcaagcccggcaaggccgtgatcctcctccagggccggttcgccggccggaaggcggtgatcgtgcgcgtgttcgaggagggcacccgcgaccgcccctacggtcactgcctcgtcgccggcctcgccaagtaccccaagaaggtgatccgcaaggactccgccaagaagacggccaagaagtcccgcgtcaagtgcttcatcaagctcgtcaacttcacccacctcatgcccacccgctacaccctcgacgtcgacttgaaggacgtcgcctcgggcgggcccgacgcgctctccacccgcgacaagaaggtcgaggcctgcaagaccgccaagtaccgtctcgaggagaggttcaagagcggcaagaacaggtggttctttaccaagctccgcttctagatgccgggcgtcccgcatagtgtctgctttagttgtcaatttactgtattgggaactccttaagctatctctgttttgctattgccatgaaggcttcgtgcttggtatggatctcggagaagattttgttaaaaacatgtcgatgatgtgttaaatgatgccaaaggatacatctggttgaaattttgttcagaatcactgcttgtgatgtgctgttaatcttcttgttgagaatcactgcttgcgatgtgctgttaatcttctgcgttcttagtcatccgggtctcagattttgttgatgcatcttatagttctccatcactgaatgctcctttgttgacatgtgagtgataactgatggtttacagccctttattcatgattataatggaagatggaaatgcagctagaatttattcatgaatataatggaagatggaaatgcatctttctagctggaggggttcttaatcgttgagtaattaacacttagaatatgttgatgcatcaaaaggattatgttttcctggattactctttgagtttgttgctgcctctgctggtacctgccgagtgttcataaaaggacaattcaaatcatatcatatagatatagttatgcacttatatgaattgttggcactgaattgaagattggtaattgctttgattaataattctctctttggtctaagttgtgtggagctcactacttacctatgtatta

SEQ ID NO: 4725 - DNA, 5038 bp, Sorghum bicolor
acttcaggaattattttcactgcttcctgtgccaacctactagcattgaaattgagggagacacataaccaaattgtgacctcgaaatagtccttcacttctttatatatgtgctgtgtgaaagttgtcttcccaataccccccggaccaacaattggaagcaccactaggccatctgaaaaatattctccatgcttaatgccatctataatgatctttttctgattatccctcccatacaacttaggttctataatgtccggagtggtcttcggacggtccattgcactgttttgggttgtggtacggttggagcctaattgctcgagcttaagaatagcagaacccaacagctccatatcaagaatggtggagaccttggcagatacaggccttagcttctctacaatgtctttcatcttactggatatctccaccctgtcaaacttcaactttggtatctgcacaacacgttttccctcctgactttgaatcttggatggacaagcacaacagaaccttgcccatccatttcctgcttgttggaggcctccagcatgtcagagtgagcattataacggacacatggaaatcagcagcatgggtggagtttacctatagtatgcgcagcccggcgagcgctcaaagccacctttgacatgcacccgccattctcgtcgctctggatgttgggtgaatttggtgtggagccgatggcggcatgcctgccacaggaacagatgacagagaagcatccttgctttgcaccatcttcatgctcatcagggtcgggatcgccacggcttgcttgacgcgagcccgaggagagcttcagcttccttgcaacagctctggcagtgtggcgagtgtttaggacgaggtcgcgcacgcagcccccaccgtggacgtcggcagcatggtaggtgccgtcgagctcgtcctggatgcgaaagtagtcaagctcgtcgagcacatcgtcggcaccatacgccagctgctgcagcttaagtagcagctccttcagcgcagagctccggatctcccttccctgtgcgttgtcgagcatcccctgcgcatagaggagctccatcttgagggcgtccatgttgggaccaagcccggcactggccgcccatgcctccagcaagccatccgtgatggggcctaatgcctttcccagcacccaacttgccgcgctgacagcgacctccatcctcagggctcaggcgacgggtggatctttgtggatgcggcaaaacgaagaccaattagtttgcaaatacaactaggcagtaggcactgctgatgctagctacgaatgccataaaaacatgcagacgtgaatcattgctgcccaaccaggaagattagttctacttttcaagaagaagaaagtaaggtgcacatacaaacggtcggagactcgtcagcacgcagtcggagagcgcagagcacaccccaacgatgcagaggatctgggagcttgctcagggagagaatggagatggcaaagagcagatgtgcgaaggagctgatgcgccagagctgcaagcctgcaagtcaatggcacgcgcggcacgccaacgatccgatgagctaaacaaatcgctgcgaacgcagctggcagcactacgtcatgacatttgactgtaatagacgtggagaattaagtaggacacccgagcttggaatctccaccagcttcttattctactctaatactctcatggacagcgatggcagagccgctgaggaagaagaagacagcgacaagtggcttaccattggttcgagtgggaacaagaaccaggcttttctccgggctacataacaatccggcccacactagtgaccttcggcccaggcccaatcaagaacagagctagtattaaagaaactcgtcctccgactccgagaccttccaggttccaatccgagagtcggcaaacgtggaggcctcccattggatggcgccggatgtgcttctctgttctctcccagtcccagattcatcggcctgcagcagagcaacgcccctcccttccatctccgagctgccatgccgcgccatggacagcgaaactccactgcgtaatccactaccgggaccttctgaagtgatctccttggcctgaaacttggaggcgagcgaggtgccatggttctcgtggtgctgggctgctctcctgcatcgccgcgccccgcctgcactcccaattccaggtactggacacagtgctggttatgactcgttttctttggtgctgcttgtcgactgggacaggttgggtagagggctgctggtgctgggaatggggagggggacggacggcaaggttatatgctattagaatctcaagcatatttgggtgttccggaatattgatgccaaatgaaaatcccactttattaatgatccaatccaactatgctgactagtacctaactcaacaaagccatcctatgtgtgaccatccttgtcactgctagcctggatagatgctgacgagttcgtccacattacagaaaagagcatggaacgttgcagtaaaacttactggttttctggatgccttttcacactgtgtttgtttatttgtctcggcttggtaggagaagatgcagcgccaccagacagaaaatcatcagatgctctctgaatgaggaaacactactgagcaaacatggagtagtatccaggcagttaatctcatgccttgctgcttcgcttgtgttcgtctctccacctagtcaggtacctatctggatgttccagcatctggttagatccacctgtaccatatcagatataaacacacaagctcttaggagatcacaaagaggattctctttgcattatgtttgtagcttcaaatatgtatgtacacatactaagagtaaagatccattcttttctcaaaaagaaacataatgaagagcaaagatgcaccagagtccccactacaacaaggaaattgttttttttaagaaaaacaaggaaattgttaatttcagtacacactacaatctacatacaaggaaatagttggagtagagtactgattaaagtgatatgccacgatgtcgatgaactcttcttgttgatcaggctattcctgcagaaacttttgcccatccaggcttgtgccagattgcaacagtggcagccatcgacaatgcttcagttcctctgaaatttgacaacccttcagatgatggcagcgcagggatgatgatgaggggtatgactgcaaagaactttgatccagttcgctactctggtagatggtttgaggtagcctcgctgaaacgtggatttgctggtcagggacaagaagactgtcattgtactcaggtattgtaatccctgaaacctcaaacagattggcactgtagctcttgtccacatgatgctgcagtaatatattatcatcagtcatgctgcagtaataacagactgctttaagataggttatcatatggatggtatttccaattttccataccctttgcatatagtcaataaatggatgttgcaccatttttctggaaccacagggagtgtactcgttcgatgagaagtcacgctcaatccaggtggatacattctgtgtccatggtggacctgatggatacatcactggtattcgggggagggtgcaatgcctgtccgaagaggacatgtcaagtgctgagacagatcttgagaggcaggagatgatccgtgagaaatgctttctccggttccccacgctgccattcatacccaaggagccctatgatgtccttgcaactgactatgacaattatgcagttgtgtctggagctaaggatacaagctttattcaggtaaggaactgaaccatgaacttctgaaggctctttattttgcggttttgcctgtgttccttgaaaaaaaaataatcttaacatcaaaatctcctaagaaatgattatatagtcaacagaactaggcttaatttatttgttttatctcaaaataaactccattgttttatgaacacttgaatattgaaaagtgtgtggtgttgaatgataataatattaagcaagtatagaaagtatacctgtgtaatggtaaacacatcttatctgatgcactcgtaatttgaaacaccataagcactaaacatctttctgccattgatcagatatactcaagaacacccaaccccgggccagaattcattgagaagtacaagtcctatgttgccaacttcggctatgacccaagcaagatcaaggacacccctcaagactgcgagtacatgtcctcagaccagattgccttgatgatgtcgatgcccgggatgaacgaagccctgacgaatcagttcccagatctcaagttaaaggcaccagttgcacttaacccattcacaagtgtgtttgataccctgaagaagctgcttgaactgtacttcaagtaaaacaagtgtaacattgttcagtaaccaattgtccacttctccacttggagctgcaatggaatgaagttcagtttgttctgaccgtttgctaatctgaattctgctatatgctttatcagaagaacatctaacattctcccaaaaaacatgacgatactgaactatttgaatatccagtaacctttggtggtgtgagctagaaaattagaactcaccatcaggaaatcaacttctgctgctggatcacttgcatgtgcaccgacattcaatgtctctttgccttggtaagcagagggtaggtgcagcgctgtgacgtgaatatcatgagccttcgcagtgacttgttagaattccagtaagagttgagagaataatagctgaaaccaaaggaggaaaagaaggcgatgaatgtataagattaagatttgtatcagttagctctttaagtagattgtttttttttctagtactatacaagagcgcaatatataggattaagatctgttcttcagctactgggtttgttcttttctgatgtttttgtacgccattgaaattgtttgtacctgatatggcatcgagttcta

SEQ ID NO: 4726 - DNA, 13788 bp, Sorghum bicolor
cttagaggtctaaggcaaggcttacacctagaatccagccaagtctgggcagaggtatgggttcaataatgacaccaccaaggaggtatgtggcgcctgatgtgtcatcgtcgtctgcccagccacaaccgagctaagcttccacctagaacaccaagggggtgtagatgcagctatttgcacgcgctctggccccatccatgagtcccaccgccgaccggccatccgagaggacgactagcaccaccgccatgacaaccagggcaaggcatcctggccgggcaaccgaccagctagaccaattgttggctctcgcctagccatggtccaagtcagattcgcaaacgaggatgcctgtcaagacaccaacgagcaggaagaagctagccacggcccaaccaggtttagcggggcccagggcgggataagaggtgtcgacacctaagctgagcaccctgcagcgctagacggcagcaacaggcgttggatctagagcaatagccgccagatccgcacacgaggaatctagatccgccgcttggcccattcaccggagaagacaccatccgaggccgaccgctcgacccacgccgtagcatcgacaaggagaagggtagatctagtccagagggacacagatccgggccactggctagcgaactcttcggagaagcgccggggaagttgggcgatggaggactaggggagggaagaggacatggcaggctccatttaacaggccactgcagggaggggggcccctaggggcgacgcgacgatcgcccctgagttgcccagagatagcacttgggagaagtctggtatacggtcaattggttgagtataacttattagaaaaaaaatagttaattcatgtttagcctattatctgatgatggactaaactttagtccgatgatcgaacaaacccctcagatttatgtgcatctttgatgacaattagactggtctttaatttctgcaagttgaactaaaaaatatccaagtccactcacatttcgtagatctaagatcgaactcatgagaaaaagtcaaagcacttgtacctttaatgtgtgctcattttttggtggaccatttgaaggagtcaaaaccgaagccgattggacctctaccaaacaaaggctaaatatagtatgtcattatgcaaatacataatttacggaaacataagaaaaatatatttaaaaagtcttacaaacatttttaaataagtaataaactcagaagactatttaaaatatcttatatttaaaaagtcttacaaacattttttaaataagtaataaactctaaagactatttaaaatatcttactatctaaataccaacgtataatactttgctcgaaattctatgttggtctctgggggccaggcccacacgaaccacccctagctacgccactgattgtttttgccatggttccattgatccaagttgataaccataaaagggctgtttttccattacctatggtgactatcattggtgtgttgaagagatcacgattagttttgtcacacaggattcttataaattagaaagaatattaagagtctcttcaagttgctctaagttttcatctaattattacaagagatatcctatgaaaagttgacaacaaactagagaaccatctagaggacttcctatgccagctaacatgtttatcttttgtttgtaataacaggtcagccatccgtcgactttaaataagttcgttgctttcaaccactagattcttaagaaattagacaataagctagttaagaaagattcaacatgccgtgattgaccacggaatgtgattggtgctaaattaaatatgcaactaaaaaactaagcgggcaccaacgtgattcacatatatcagtatgggtaccatgaattttcttgagctactgcaacaaacatcatctctagtaccggcgacgagaatgccaagacttccgtcgtaccctgttaccctgatattcctccccgtgttcttgctttcgttcagagcctcggccgctggcactgcatctgacacactcagcagcagcagcaacatcaccgatggcgagacgttggtctcatccggcagcaccttcaccctgggcttcttctcccctaccggcgttccagccaagagataccttggcatctggttcaccgcgtccccggatgccgtctgttgggtggccaaccgcgacagccccctcaacaacacctcgggtgtactggtggtcggcagcaccgggagccttcgccttctcgatggctctggcggccacaccgcgtggtcttccaattccaacaccacgacgacgagcagtcccggtccatccgtggcgcagctgctcgactccggcaaccttgtggtgcgcgagcagagcagcggtgacgtgctctggcagtcgttcgatcacccgtcgaacaccttgctcgccggcatgagaatcggcaagaacccgcagactggcgcggaatggtccctcacgtcgtggcgtgcatcgaacgacccgaccaccggggactgcaggactgcgatggacaccagggggctcccgggcatcgtctcgtggcaaggaaacgccaagaagtaccaaacgggcccctggaacggcctatggttcagcggcctcccggaggtggcgagggtgtcgaacacggatccgtaccccaacgaggtcgtcgtccgcgccgacgagatcgcataccacttcgacgccaggaccgacgcgcccttctcccgcctcgtgctgaacgaggtcggcgtggtgcagcacctggcgtgggatccggcaaacctgctgtggaacatcttggtgcaggcgcccaaggacatctgcgacaactacgccaagtgcggcgcgttcggcctgtgcaacgtgaacacggcgtccacgaggttctgcagctgcgtcgtcgggttcagccccgtcaacccctcgcagtggtccttgggtcaatacggaagcgggtgccagaggaatgtgccgctggaatgccacggcaacgggacgacgacggacgggtttatggtggtgcggggagtgaagctccctgacacggacaacgcgacggtggacacgggcgcgacgatggagcagtgcagggcaaggtgcctcgccaactgcgaatgcgtcgcctacgccgccgccgacatccgaggaggcggtgatggtagtggctgcatcatgtggacgaattacattgttgacattcggtacgtagacaaggggcaggatcgtgatcgtctctacctgaagttggccaggtctgaatttgatataggtaagcaccaatttcgattttattaaatcttatttttttctaggtaaatattctttttcatcggtaacaactcagaacacaagcaaaccacgcactccacattcacacaatacatgcacacaccctctgggtgcgtggaaacgtgtagtatcaccgaaagcgtagaagcgtgtaccataaaatttctagaaaaatcctagaaaaggtgcaacacaataaaaaccttctagcttgctaaaagtttgtggctccacctcttcctatatcagcagtaaacctgttcacctctcttaaaaaggaagtccttgtcatgaaaagagtttcatcatctgtttttcaacaaatttctgtgcagctgaaaggaacaggaggggtgtggcaaagatcgtgcttccggtcaccgcatctctgctagcagccatggctgtcggcatgtaccttatttggatatgcaagcttagaggtacagacactttactactcacgattaattggctagtgaagtggaggtctctctctctcctagttaactttttttattagagattttttttttgaagaatatttttttattagagatttagagtgcatatattatcagactacgctaatacgattttattgcaaggcccacgtcaaaataatggtaacgggaagaaagtaatgccaagtaccgagagcacgtcaaatgaacttggcgatgaagaagatcttgagattccatcttttagctttagagatattatctctgcaacaaacaacttttctgagggtaacatgcttggacgaggaggcttcgggaaggtgtataaggtaactacagtgaaattcctacacaagtgttgtacgagacttttgtcatttcgtgaatgaggaaatcatgcagggtatgctgcccaataatagagaagttgcaatcaaaagacttggtaagggttctagacagggggcagaggaattcagaaatgaagttgttctaattgccaaattgcaacacagaaacctcgtcagacttcttggttgctgcattcatggagatgagaggctgctgatttacgagtatttaccaaacaaaagcttagattgcttcatttttggtagttaatctcatattttcgagaaataaataattgtttgctatagttaccatgtaaaatttgtctgcgtacttatatagtactactttacacatagatcctacaagtaaaagagccctcgattggccaacaagattcaagataatcaaaggaatttctagaggacttctttatctccaacaggattcaaggttgactataattcatagagatatcaaaacaagcaacatactcttggatgcagatatgagcccaaaaatatcggattttggaatggcaagaatatttggcggaaaccaacaagaagcaaatactattcgagttgttgggacatagtgagtaatccatgcatcatgcttgatatgatttttttccccttcttttaatttccttatacttagtggtaactttttatgtagtggttacatgtctcctgaatatgcaatggatggcgccttttcggtcaaatcagatacatatagcttcggcgtcatactcttggagattataagtggtttaaagatcacttcgactcagttcactagcttccctagcttattagcatatgtgagtattgtgttattcttgaaattttcacagttcgataaaaatgtgctaacatcttccgtaaaaaaatgttgatatcctagctatgaacttggttgaattggttcaggcatggagcttatggaaagatggtaaggcaattgatcttgtggactcatcaattgttgagacttgttcaccagttgaagctttgcgatgtatccacataggactcttgtgtgtgcaagacaatccaaatagtaggccacttatgtcatcggttgtgttcatattggagaacgaaaccacgttaggttctgtcccaaagcagcccatgtacttctcccaatggtatttagaagcccaaggaacaagagaaaatgcaaatagctccatgaatgacgttagtatctcagtgttggagggacggtaagtggttagtaggttacaattgtttatacattaggacaagagttggaggtcattcgtatttaggacacttattgcacggaaatggaactgtatacttattgtttaaacaaagctaaggccagcttcttcgctggcataatggtacaaggacgtcttgtcaaactgttcagctgtgccaccgtaccgttgggtctcctttgtcgtgcaaattttgttctgatattgccccagtgattgaacatggtctacgcaccttcctattagaagaggacaacaacaaaacacagaaggggagcaaagaactcccatgatacaagcacgtcatcgttcaccaactaacaccaccaccaatctgctaaactccgataacctccactccaatgacgaccattaaggttcaagccaattttttatggaaactcatcacatgcactaagatctatgctaaggttgtcagatacaaaatcatggacagatccacgcgagtggctagggctgcatccccgttcgtcggccagaaatcttgggaacaagtcttcatgtctagcccattagcccgaggaaagagggtcacggcctcattctgttctatttttctatagccaggtccagcacagagtatccttttcaggttgaatcgatgccacttaaaggtgttgtcccatttggtttgatttgccatggaaaaaagtgagtctttgcagtaagttttgaggcgtaatacatacagtacagctcacagtcagagctcaaggtgagaacagaatattgaatagtaccacatatatagttgttaaattttgattttcaaatatacagggaatgccactatcagttcctaatatgtaacaatcgcacaacaatttgcaatataggagggccctttttgtacatggctagtaagattttagacccctcatggtctgttttctggattcgccactgtacaaaatccattccatatgatggtgcttcgctcatgaaaacatgtgggccaacatgtaaaacataagctccatggatggcaaaatagtcggccaccttattacaatttctattacataatgacacggtacaaaaagaaaactccaattgcatcatatctatatgaaccattgaagcctccacgctgctctgatctacaattttgacttagcccgttgggttaacctttgtatctcttcatgatagtgcatctgcagcagtgtttgcataccctaacttgtattaaactgcaaaatcaaaggtgattagcttactagcccattgatgttgtggtatagtggattgcctctgatcaagcaaaaactccatactctagtgatctactgaagaaagttgcgaggactttaccttggccacccagctagtgctacatgtggtcctctcaaccaacgtagtactaacttgagggtcacaaaaaggtccccggagtcaccatccacaatctccactaacgcaactaaaccgcaggaacaagttgcagaagttgacgccataatccaaccatcaagagttatttaactaggaagttcacgccataacatggaaatcctcacatctgccatcaggaggggacaagcacgtgtgcgctgttgctagaaaaagaatgttgagtcacccacaggccatatggagtgccaaggtagcacatagtagcaagaaaggggtggatccatgccgccagatgtgccacgcctcctactcgatctacggatggtggtgggaaggtggaagaggcggtagtgggaagagaacccatgatgtggaggagatgaaggggaagagagaagtgtgtggcacgaatgagagaagaggttgtgtggggtagggagggagcccaatcgtggctaggggtttgtctattatataatgtaggttggtagtggaccgagacaagttggcctctctgaggttgacccacatttgcaaaggctagcctctaagatgtccatctctattaatggatttttagaggtggtattttggccatgtttggttgcttttctaagaatcaattttagttagaaccatgatttttaataagctacgcaccaaaagaatcaaccccaagatttgtgttgtttggcaatcttgattattgtaccaatcctaagagtaaaatgacttatatgcccttaggccgagagcattttctaaatcgcgccttgcccttttcaccctatcgcctctatcgttgacccatccatcaccactgccaccatcaatagcgcctcctgtagtggccaacatccgtccctacttggcccatagccaccatcgtcgcctaacgcgccgagtttcccttcaccaccacatccttcgttggccttgccaccatcgttggggacacaaggtgtgtagctagctccttcctgttccttctcgaccatgctatcaccatgcacgtaggggggtggccgaggggagcgagcaggggaggataggggaaagcaagggagcgaggtatggggcaagccatggagctccttccttgcacaggggagtgagacagcggaggggaggagcaggtggaggaggctgatagaggggagatgactggtggggcaacagacaaaaatggcccacggtagaagacctccctcgcggtataaaggttgcattgtgtagtttaaagctcacttactttcaccactgtggctaaaataatcagagaagaatctaggcgttcgggtgggattttgaattattttaatcctgataaactctaattttaattggaaacaaacacaccctttattaagtatcttcgtaaataagccgtttgactctaaaaatcatgggatacttttcgaagacatgaaacaattcaaagttttcatggacccctccaggactagtagccaaccactggttagtagggttcctcagttggcatccacatgccgaaaaatgccagggttggagctacgtagagtagggagtgcgaggacatccacaccaaaactaaaaaagcagtgattatgattaaatcttcatgggaaaaataaaaaaaatctatacacctacacaacaagtacacgttccttaaatttgatcagagatttgcaatcgatgtttagttcccctcatgaaaagttttttttttgtctactgtagtactttcatttgtatttggtaattattgtctaattataaataaactaactagacttaaaaaaattgtctcgtaaattacagacaaactatacaattagttatttattttatttatatttagtgctccatgtatatgctgtaaattttgatgtgatgagaaattttaaaagatttttaaattttaggtgtaactaaacaagtctaaggtgcgactgccgaccactcaagcacgtccaacccgctgcagacggcagttggctcctcccgtgcacatattggacttgggatcatccaagaaaagaagccaccgtttcttacatcccagaccacgtttgctgactccagaaacacgaaatctaccagtggtgccagggtgtgaggccgactacggcgaagtcgtcggagaccattgcagtcaccactgtccactacacgtccacaccgctgcttgtctggtctgctcaccggtgcttgggtagtaaggtcatcgcttccttacctgttagtatgtgaattaggcctttttagttctttgggtgtaaagtttttggtactatagcattttcatttatatttgacaattattgtctaaccatagactagactcaaagaatttgtctcgcaaattacaaacaaattgtgcaattagttatttttatctatatctaatgctccagctatgtgccacaagattcgatgtgacgaaaaatctcaaaaaaaaattagattttgagtaaaactaaggccttatttagttgacaaaattttttggttttagctaccgtagcactttcgtttgtattcagtaattattgcccaaccatgaactactaggtttaaaagatttgtctcgcaaattacagataaattgtacaattagttattttttaatctatatttaaatattttatgcatgtgctgtaagattagatgtgacagagaatcttaaaaataatttagaactaaaccaggcctaaacaaggctttttattgcagactttgccatcattctatctacgcttgtcctatttatcaatgtgatatacgaaaccactgcacgcttcgatttgacggacagaaaaccggtgcttccatacttccagttttcaagaaaagcccttaggccatgaaatggttgtccttatctgttggtctgtgaattaggccttgtttgactttgccatcattactgtaaggttcattcttcatctgcagtgttctgcactgacacaactacatgataaattgttttcttcacactgcttcataggccagagaacaagaaaagccctgatagatatgatgtatagtgccatcttcatcctcatattcttgagttcactctgtcgatccgacgatcagctgacacatacaaagccgctctttcccaaagacactctcatctcggcgggcagagactttgctcttggcttcttttctcctaccaattcaagcaacaagttatacattggaatttggtacaacaatctcccagagcgcacggtggtatggatcgccaaccgtgacagcccaatcaccgcgcctacatcagcgaagctcgccatctcaaacaattcagggctggtgttgtcagactcccaagggcacatcttttggacggcaacgagcaacacaagtggaggtcctggagcttttgcagtattactcagctcaggaaactttgtccttcgatcgccgaatgacatggacatatggcaaagctttgatcaccccaccgatacaattcttccaaccatgaggcttatgctaagctacaagtcacaaccggcaacacacctctttgcttggaagggccctgacgatccatcaaccggggacatctctatcagcatggatccgggctcctcaggccttcagatgttcatttggaatgggactttgccatacttccgttcttctgttgttagtgatgtcctagtatcccgtggcgtataccagaccaacagtacctcagccacgtaccaagcgatgatagttgacacaggggatgagttgtactatacgttcacagtcttagctggttcaccctacttgcgaatattacttcactacacaggcaagacgaggctcctgatctgggaaaatagcacatcatcctgggcagtcattggtgaggcccctagtgttggctgtgatctctacgcctcttgtggcccgttcggctattgcgatcgcacgaaggcaatgccgacatgccagtgccctgatggttttgagctggtcgacagtctcaacttctctagaggatgccagagaaaggaagagctaaaatgccgaacagagaactatttcttgaccatgcctaatatgaagattcctgacaagttcttatacattaggaatagaacctttgaccagtgtgcagcagagtgcgccagaaactgctcctgtatagcatatgcctattccaacctaagcgctgctggcattatgggcgaagcatcaaggtgtttggtttggactcaccatcttattgacatggagaaggccagtcttttagagaacttgtacatccggcttggcgaatctcctggtacgcttgttccttctttccaaggagtaatatttgtgcacagtgtgccgcatcatcgctcctctaaggcctgtctgtaagatactagtaagatggagatttctccaaaacaacttagattagttcaactaaacgataacagcatactatatctctttatactgttttcgcagatgcagccaaaaaagaagaaaaagttatcaaccaccagtttcagttttcatgttggcagcagcaaattatgcaaaacctccttttctaaaaaaaaaatgcaaaacctcactgaacatcatgatatcaatagccaaatcagtaatctccacagtaactgttcaagtggtaattatgtcgttgaatactcacaggtctgtaatgaaactccccttggtaagcgtaggtttacttaaatgcatttgtaatgctgctttcctctcaatgaaaaatgtgcatagcaggtctgaaaaaaaatcacaggtccatattttagaggtaaagtatccacagaccagtcaggggaaccctgtgcaaagtaaactcacataattgcaaggaatgcttgatgcaataaattctaacaggatacatttctatgtacagatcagaagaagagcacttttctgaaaattttgctcccaactatagcatgtctgctgctactaacaatcaccgctcttgtttggacatgtaaaggcagaggtatatagaaaatgagcccacgtttttaaaaatgcgatgttaatgtgtaaatgttcaatgaaaataaagtgatctgttgatgtaacaggcaaatggcataagaagaaagtccagaagagaatgatgctagaatacttgagttctacagatgaagctgggggaaagaatatagagttcccatttattacatttgaaaacattgtcacagcaacagacaatttctctgacagcaatatgcttgggaaaggaggttttggcaaagtatacaaggtactagtaaaaagtttcaccttgaaatttacattactcgaaataaaaatactgatttctgaatgaacaaatcatctagggaatgttggaaggaaccaaagaagtagccatcaagagactgagcaagagttctgggcaaggtgccaaggagttcaggaatgaagtagttttgattgcaaagttgcagcacaagaacctagttaagcttcttggttgctgtgttcatgaagatgagaagctgttagtttatgagtacttgcccaacaaaagcttggattacttcctctttggtacattgagttttaaatttttcatacagttaataaaatcaacaaatatatatatatatatatatgcacatgtgtcttctgatatgcgtagtttcatattattcttattagattctgcaagaaaatcaatgcttcagtggcaaacaaggttcaagataatctatggggtggctagaggaattatgtatcttcatcatgactcgagattaacaataattcatagagatctcaaagctagcaacatcttgctagataaggacatgagcccaaagatatcagatttcggcatggctagaatattcagtgccgaccagctccaagcaaatactaacagagttgtagggacatagtaagtatcccctgcattgccaactcttcatatagaattaattcagtttgcagtttcacaaacatccaaaccttttggtgaaatcatttgcacagtggttacatgtctcctgaatatgcaatggaaggtgccttttcagtcaagtctgacacctacagttttggtgttttaatgctggagattataagtggtttaaagatcagctcaccacatcttatcatggattttcctaaccttagagcatatgtaagtaccgggagattctcgtaattccgagccacccacatgaaaaacaatgatcctaatatgagattgtatcatgtttcaggcatggaacatgtggaaagaagggaaaatagaagatctggtggactcatcagtcatggagaattgctcccctgatgaagtttcacgatgtatccatataggactcttgtgtgttcaagacgatccgagttgcaggccactcatgtcggtggttgtgtccatgctggaaaacaaaacgacgccacttccaactccaaatcaacctacatattttgcacttagggactcctaccgacctgaaaaggcagttgacaacaaggaattctctgtaaatgatatgagtctcactgtgctagagggccgttagatgtttggttttcataactgattgggaggaaaaattaaaccccactggcatattcatcgcaaaactaaaactaaacgttcagtccatgtgaaggttatgtgaatgtcggtaatttgcaatttgcaatagtgtaataagtctgcctaataactttataaagacaggagaatttcttctctcatctcacgtggtttactgttcgtgtggatccgatttgaccatatggattagttcgtgaatgatacagtaggacttgagttatagacttatacagattatatttcattccagccgatgcattccaattcccattgaggttacccttcccttcagtagctcgcatgcttagaagaagaaaattatccgattgcttcagtgcagtacagttgattgttaaaagcagtactagtattctttaccctaacatatggttgctctaagccaacatatttttgaacaagacgattaaacttgcatatattatcgaagttgtttat

SEQ ID NO: 4727 - DNA, 3800 bp, Sorghum bicolor
gaatatgtattacatggggttgcaatcttgagcaaccgtgttcttagcctatgcacgatgcgtgctggtggagaacgtggtgaccgcacacgctagcgcccgaccgtgtcctgcagttgctgagtcttcagtcatggcttgtattctgatcaccgtggaattaagagagagagaaaaagaatgcaaacatttattaggtatggaaacctccattgtgcaagatagttttcatacatgatatgaatgctttggataacgtgtgtagtttctaccattggaactgccctcacaatgcaaactctatcaaagcactcacaatacaaactctattaaagcactcccaatgcagaaaccatcgtagtttctatagatattaattgcagtgccacctaagcattttgctgatgtagcaagagagttattgaagagtggatctaagttagaaaccatgtctacacaaaatccaagacatgaagtgatatgattggctaaaaatagagatagaatgaatgtgattggataaaaaaaatattctatagaaactatccatcggaaccatagtttctataaaaattaataggtatagaaactacatgtagtttgggagttctcttagtttgccatcatcggttagttttaggtctaatttggcggacctcttcttcctaactcttaagcgttactttttaatctccgatgaagtgattctgtagagaagcatgatggagattaggtgaaaactaattctgaaatgtttgtagtggtgattaaatggagagcaagaaggagtgatggagagcggatcttttttactctcagcccgtaagtagttctccacaactccccactagaatccaattgcattttaaacgtttagtaaggatttgtggaatctgttttgaagaagctggggggtgaagctctgctaaactagcccatagctatttgctctcaacttgtagtgtagatggagaagtaattctcattagctctccatcagttatattttaagagtttggtagggattcataaaagacgctcaaaacaattaggagtggacctctgtcaaactagcctttatgcttcgacgcatttgcaattaaattgatgtagtgttttaattgaagaaacattaagtgcgctaaaatggactcttcactttagctaggagaatgcacctcattcttgctttatgttttgacgacaacaaaacatataagggcctgtttagatgagttagggcttaaggctagttactaggcagactaaaaatttagcttaaatcaggcaaaaattgttttagctaaccaatgattagccttcgtatcaaacaggccctaaattcgtatcaaacaggccctaaagcagacctgccatgtgacgacgccgtatgcattcaggagagtgagagaaatggatggcatctgcgtggtacatactccagtctccgcgctccatccggtcctggacattagtatgaacaacagaacaagttgaagtgttgctgcttcatgtgactgtgaacgtgtatacaatatactgtagtaggtttcatgtaaggccttgtttagttcaccccgaaatccaaaaagttttcaagattccctgtcacatcgaatcttacggctcatgcatgaagcattaaatatagacgaaaataaaaactaatcacacagtttgactgtaaattacgagacgaatcttttgagcctagttagtctatgattgaacaatatttaccacaaacaaacgaaagtgctacagttttagacaaggcccccggaaagaatatcatccgccggccaccatgcataattatgtcgtgtcaacaacccacgacgcaacgactgcgacgttgtcccttctccttttttctacagtataagtactatcggctcgttgggtccttggctactagcggagccgagtggacaaggacaataatacagtagcacatatggtacgctgcggcatcttcaatcgtgtcacaggcgacggacatggcggccagcggcgcgctccccgtggtggacctggcgccgttcttcaccgacgacggccacgacggcggcgtctcccgcgccagcgccacggaggccgtgcgccaggcgtgccggacgcacggcttcttccgcgccgtcaaccacggcgtgccggcccacctcatggggcgcgcgctcgagctgtcggccgcgttcttcgcgctgccggacgaggacaaggccagggcccgggcggccgagggcgccgaagcgcctctccccgtgggctacgcgcggcagccggcgcactcggcggacaagaacgagtacgtgctggtgtttgatcccaagcttgggttcaacgtgtaccccgccgagccagccggattcaggtcagtcgtcgacgagaactccagatgcaaagtttaatttgcacgccgaaattgcagtattgtttgttcgtcaggatttctaaaagcaaattcttaccaaattgatcaatccagagaggcagtggaggagtgctacgccaagctcacagagctggggctgctcatccaggaggttgtgaacgagtgcatgggcctcccgccgggcttcctcagcgactacaatagcgaccgcagcttcgacttcatggcggcgctgcgctacttcccggcgacggaggaggaggtcaacggcatcagcgcgcacgaggacggcaactgcatcacgtttgtcatccaggacggcgtcggggggctcgaggtcctcaaggacggcgactgggtcccggtggagcccgtcgacggcagcatcatcgtcaatctaggcgacgtcatacaggtgcgtagagagaacgcgacactgtcccagttctccatgtgagtccgcagcgcgcgtgtctataattctatatagacttttcttgctctatttggattcatgaattctataattttatatcgattatcaccatgttacatttatatcgttgtaacgaaaacactgtacttattaagttggatcaacaacttggtttaaattaaaacagcgacgaggccactttgtgtaggtgctgagtaacaacaagctcaagagcgcgacgcaccgggtggtgaggaggccggtgcacaggcactcgttcgcgttcttcttcaacatccacggcgacaagtggatcgagccgctgccggagttcacggccaagatcggcgaggcgccacggtacagggggttcgtgtacaacgagtatatgcagctgcggatgaagaacaagacccatccgccggagaggcccgaggatgtggtccatataacccactacgccatctagcttgtgaattgaaacggggcttctctatgcgcagaaatgcacacaagcaacctgctcatttgtgaggcggtacaaacctagctacaaataatggtggtgtcagctcttgttaagatgcctgtggtctgggcatcgcaccatgctatgctatcattgaaattgagattaaataaacaaaatatcaaggtacggcactgtgtcgtcgtcacgtctactccctgcatccaattctatgaatatagcaccaattccattcagggccgttcggttagcccgttccaggcgtggaatggccaggaatgattccaacgctattcaaattaatgaaaacaacttgttatccaaaagataaagaaaagactatttgatctccctcaactattgcataagtttgatttacctccctcaatcagaaaacaaaatttttagactccttcaactattgaaaccatttgatttatctccacaggttgttttgagtggtttttggggcgccaagt

SEQ ID NO: 4728 - DNA, 4595 bp, Sorghum bicolor
ctaccccgaaacgtcgaaggtcaattagaccgagacctccaagctccttagggcggcacaccaaaggaaagcccgacgcttcttgtcaatttgctgcacagcccagggagacaggcaaactgcgatggtagtgtgcgttgggatggccgaaagagtgactaccgtaagcgttgctctcccagcaatgtttagcaagttccctttccaggcgggaattatgttagcgactgaatttatgagtgggagctcttccgacctgctcagtttgtggacagagagaggaacgcccaggtaacggcaagggaaatgcgctatctggcagccaaaccgagacacaaagagctgcaattgttctgtggagcactgaattggtgttgccacgctcttgtccatgttggtgaatagtcctgatgcatgtccaaagatgcgtaacatttccttcatgacatccacatctccttgaaccggggcaaggaagacaactagatcatcagcatacagagaagcccgacaacctgctgcctttgatggaaggtggctgaggtatccattctgatccgcaaaacgaattaagccattgaggacctccatgactagcacgaacaacataggcgagaggggatcgccttgtctcaggccgcgggcgtgacagattctggcgcctggtcttccattgaggaggattttagtgcttgcagtggagagcaatgccgaaatccagtctctccaacggcgaccgaaccccatgaattccagaatttccagcagaaaagaccaggaaactgtgtcgaaagccttcgcaatgtcaacctttaacagaatggacgggcgcttgacggaatgcaggtaccgacaagcaagctgcaccgaccgaaagttgtcgtggatgcaacggcctcggatgaatgcactctgattcgggcttaccagagagtggaggaacttggcgagcctgttagcaaggcacttggctaccaacttggagaagctgtgaattaggctgatgggcctataatctttaatcacttccggcgcatccttctttcttaaaagaatcatgaaactcctatgcactgtttctaaaatattgatgcgttggaaactgtgtcatgaaacttccattgaggatggccttatgcgccgagcaaaataccagcttgcacccgctagtatcctgactattactctcaccctgtttgtccggcaaaccatagctgatcggaataataccattgtttaattcttcctccctgagaagaggctgatgatgatcactttcacctgcaagtttttttctacacaaatttccgtaagtacaacacaatgaaaatatagtaatatacaaatgcacgaacgctcaataaaaaaaaacaaattcataaatgactgagaataagtgcataggagtatatattatttctaagtttccatagacttcacatagcagctgaagtaaccatattttaaaaaaatgtgatccaccagggggtgtcgaactaaacgcagatgtcatgcttcgaacccgagcgggtcaagagttttgacgactcttggagttcaacgttctaactaggtgcaccacaagaagcttggcaaattaaccatatttagcacaccatttcttttactgctcaaccaaaaaattttctaccaagtctaaagagccccctaactaaacctcaaaaatctgttataaaaaaaatctgtcataaaaaaaaactacacctcaaaaatctgagaaataataagaccagagcaaagtgattcacacttcacagtgacaacactcatacaacaaatctcttcttctactaagatttatctctagtcgggattttatttttcttcacaccgcctcttccactgatcacccgcgaaactaccgagccgaacgggcgaacctcatgtcgcctccaccgtgaaccggggacaaatcacacacgaacgtaggacgtacgcacggccaccaccaccagctgggccttttccacgttcaacaacgtagcgtaacacccgcggccgcaccttgacgagacaagatccggtcctcctccgatcctccgtcttcctcccagctagcgcgcgcgcggccccggccccggcccctcgatccatccatcgtctcggatccctgcctgcctgccagtgcatgccgcaccctggaactggaacggagggcatggcagcgtcgccgtcgccggaccacctcttcggcctgcgcaacagcttctacatcggcgcgtaccacgccgccatcaccagcagccagtccctccccgcgcacgcgctctcccccgacgacctcgtcgagcgcgacgccctcctctaccgctcctacatcgccatcggctcccaccaggtgcgtgcctgccccccggccgttccacgtacgccattgctcaactcacacctgactgacccggcctcctggtgtcgtgcatgcatgcagttggtgatcggcgagatcgggcccagcgcagccacgccgctccaggccgtcaagctgctcgccgtgtacctctccggcgacgccgggaacagggtcggtcccgtactccatttgcagccaatgcgatttccccgtgttctattctgtccgtctgaattaccacttgtctgaatgttcgtcgtcctttggtactgtgaaatgcatttcttccctgtctgactttctacgtgcgccctgtgatcctggttcaaggaatcggtggtctcgaggcttcgggagctcctgtcagatgcggctgttgggaccaatccgatcctacggttgatggccggcaccgtcttcatgcacgaacgcgattacgccgaggcactgaagcacaccagctccggtggcagcatggaactgtaagcgtatacccattcttccgttcagctttgtttcctcatctgattactgatatcatgtgctccatcggttcatctctcgctgaaaccaccctcaatttggtggtgcaggcatgcgttgaatgttcagatataccttcaaatgaataggacagaccatgcagagaagcaactcagggtgatgcaacagctggacgaagaccacacgctgacgcagctcgccaatgcatggatcgaccttgtcatggtaggccgcacagcacacacatttcccacccatggttctcgcacacatttcagagtttcagttcggcctcttttactttctgaattctgacgaagaagaactttcattgttcttcaatactgtacaccatgactacgtacttgccatatttttcagggtggctccaagatccaagaagcgcacctcatcttccaggacttgtccgagaagtacccggcgacctgcacgattcttaacgggaaagccctgtgttcgatgcacatgggcaacttcgaggacgccgagggcttgctgctggagtcactgaacaaggtcagctctggtgatcccccagtttgcccaaaaccagcattcttcgccaaataggagtattcaacagccaacaccgtagctgcagtactgaatatctgcacatgccaatgttgtgcacttggccacttgtgattctgaaacagaatccttgacatgtttgcttgtgcttgcacgaaactcctgaaactgttcaggacgccaaggatgctgaaactcttgcgaacctcacggtgtgcagcctcaacttgggaaaacctgcaacgcgctacctcaagtaagttttcccataaagtcttttcctagcgaccttgttttgtttctgcctgacaagtctgaattcggatcgcctgaactgaatggctgaaagcaaaactggtattttgcagccagttgaagctagcacagccagaccacgcgctggtgaagcgaatgtcctccgctgcagacagcttcgacagagcctgccaagcaatggcatgaaatttcatttgctccattatgtttattttccctaggatgaatcggaataagatcgtgatcttctgtctctgatgagaagcaaagcagctagagcttggttaactttactgctcgcccatgacctgtctgtcaataaatttgtcatggtaggatcttgagttctcgactatatatgacagttaagaaaggctatatatcttctgatgcattagtgtaattatgagcccacgttttgctttcgagtgctctgatggagcctgcatgagacaccaaacacgctttcaggagaagacagcgagaaaagatttgcatcaaccgtgtgttgtgaccttgtgggctaaaagtggcgcctttttgacaaaagtgtaggttgagaattacaccctcagtccttaaatgtttgtcgtttttatttctcgaaaaacaattttgacacatatgtatattaaaattaataatatttatgatatataattagtatcattgatagatatttcaatctagtttttaataaatttatttagagataaaaatatcgcatattttctataaatcaagttaaagttatccacacgtaaatcgtggcgataaacatttagagacaaaggaatacataagtacactccaaacctgccacatgatgttctattgtggctggccactcgtctgatagtgacagtgtggcactaatggcaaggactaa

SEQ ID NO: 4729 - DNA, 8980 bp, Sorghum bicolor
aagatggatctaaaagtgggagagagcatttagatggagtgctagagataaacaagtggatgggtcagatctcatttgtacctaattgatatagtttgacaaatttaagggcctcaaaaagttttttaagttctagacctagatgccactctaagacaagttcgtgaacccgaaaatacgtttttggtatttgggaacctagatgacaccacaagataagtttaagtagtgaaaagtgcattttaagagtttgaggacttaaatgacgttatcgcaagacaagtttaatgactgctaagcattttattctatatatgatacaacaaccatcgccaaacagaagcatcgtaaatgttttcgttttgatgatgatgatgatgatgatgatgatgataatgatgatggagagtcgatcttttgcacgacaaaaacgagggacacgggacgtacaagccagtcactttctcgtcagcagaagggagatggtttaaacgtggcaccttcagctagcacattattatcacggcggaaacgcacgcacgcgcgtggtgtggccgtgtaacacagggcagcaagcagaacaaagtcacgtactcataccgccgtgcctaggcctagcctttcgtttccatccaatgggctaccgtcacgacgacacaaactcttgagtgccgtgcgtgcttaggctaggtcgagcatttctttttttggcgtgatatttttggttggcgctaacaagaatctattcgtttgtctcaaaagccatgactgaaatcgctgatttagtattgcacatatagcagcgacgacgcagaagataaagcctagcttatgtcagagataacattctcttctgtctcgcgtacaattaatactttgagctagctagcttgaggtgcgtaacgtaatacgcatgcatgctgcatgcgcgctgacggaccggacgcgatcacgcgatagatggtctggtcctggcacttggttgtagtagtatatgacgagttgacgacggtacgtgccccttgtgagttgttgtgatgacgtgcatgaatgcatcccggattggcttctgacttgcgggcgcgcccgcgctgaccgttccgctgcgctgaggatgccacgctactactacgctagagattagggaacgcgctcgacgacggctttgtttaatttgttgatcatctcgtgttgtgccgcagtatgtacgtgtcataggatatggaattattagctatatatgcctctgaggagtctctgactttgaggcggcggcgactgtttcccgccgctatctggccaagctctcgctgatcgagcatcacattaacaattgcgaatgatgatgagcacgcacacgcgcccgagtttaagcaagcatcgatggatacgtatgcgtctagtctttgaggacggacggacgtgccgccatccgttttcccatctgattttgatcttgacgtcatcgtgtccttgacgacagcagagctgatcgattggaggctggttggagtccagctcaatcgcctaattaaatttgcatcgcatgcatgcctacctccgtgaagccgtgaacgtgatctctagagcgttactacgccctagcgctgctgactcatcgtcgcctccccctctgcatgtgaagcatcaacacggcacgggacacaaagccgagctgccaaaaaaaaaaaaaaatctggattcaggaacgtcaattcaaatattttttttagaaaaggaaggtcagtttttttttgagaatcgaaaaggaaggccagttaaaatcttaccgctgatggtcacaactcacaagtcacacggagtttgttattgttgaaaaaaatattaatcaatcctctcgtttagctgggccagtgcagaaatctgtcgaaaatatttgcggatcgaacccaagacccacatgtcaaaagaatgaaagcccatgctttcaagccagcgcgggcctcttcaatttcgggcccaagtgtcaagaaccatcgatgggccaccggcaaccgtgttattcattcggcccggctaaactcctgggtgggggaaagggttttctccggccgttttcccgagccgccggccacaagaccactgccgccgccgacgccgacgccgacgcgaagaccgaccgcaggtccgcagcaagcactcgcggatactactactgcctccgtcccccgctgcacccgctgcttttcgtctccgcgcagtcgtccgatggccaagcggctcgctgccgccgagaaagaggtaggggcgtcgcgcttgcagtcctccgagccgggcaggcctccttgtttcgcttacccgtttggtctgcttccgtttgtgcgtgcgcccaggtgctcgtcgaggtggtgcggttcacgcagaagaacggcctcagaggctgtgacggcgggtggaaggatttcctggcccggaacgacaggaagtttggcgcgtcggtgagcgaccccaggaagcgcaccagggatgtgctgctcgccttcctgcaaaccttctccaaggatttccagaaggttggttacccttttgttttcttcttcagacttcggttcagcatgcctggtttcactgtcagctgctgtagtaagcggtttcgtactggtgttgactgtgttgagagtataaacctcgcgacgctggttacagtacttcggcaaattggtgaagcgtcataaggaaagaagtgatgttcagcagtatatgactgatttccctgatgaagtttctcccgagcaggtgatgtgtatgctagatcatgcctttttcgaatttctgcattacactgaataaggttgatgcctgggtgtcaagcatcagttggtcaacagttgtattgatgtacatgctaaatgcagaaacttgttcaactgacggcagagcacccggagtacagaaaacactactgcttcccatcataccaggaggtatgagcttttattgtgtttctgttaatccatggatgatgtattaggccctttttggactgtatattttccttggtgatatttttttgatgtatcctattcatgatttcgtgacgaattcttaaacagtggagtccagtaatcttcaggattgctaatactctgtctagagttgcaccttgtcttgtactgttcacaaaggcatgctttttgctagtcaaaattctaaaacaaatgaccgatttatactttcatctccatgatggatgaacccattttgtgtccatattgtattgcttgtctgataattgataaaaacaatgaaactgttccataaccagcaattactgatattttcaggggtggaaagtattgaggataggagaagtctctagtttaatgagctcaagtgctatgttggcaattgactgtgagatggtcctttgcagtgatggcacagaggctgtggtcagagtatgtgttgtagatgacaagctcaaggtagtatattatttaaacaagtatgttaagattcatggaactatcttgtgcattaatgataagaataaagtcttatgacattaagtttctgtcaaaacttacaaaatacatatttccttggcattttttgactatgaatgtggtatgaaccctagtccatatcgggcatagggaggataaccattgccaagaggaaggccgggcaaagtcggcatggagggagactagaatatttgggggtaattgattgtttgttgttcattgcttgattcaatctcaactggttacagggtataaatagaggagctcagcccctaggcgcccagcctctagctccttgtttctctccccaacattaactctcattaactctaatctcttccccaacattaacccctaattggcagcttaactgccattgattacagcagcatgcacctcctaggttaccgtcctggctgcatcttgagccctgggatgcccttggtactagcgcctacatcacatctctcccccacttgacgagcagctcgtcctcgagctggaagcttggatagtggccgacgaggctgtcgatgtcctcctggatcccatgggaagaacccaacagctagctttaggatgtagcagtcaaccaggacgctgggcctgtccagcaacaccaaaacagatgacagaacagaggagatggctggtgttggtggcggtgccacatccagctcatcaagcctagagattttttggtgaacgtccgccgctgtcatgagcgccagctggacagcgtgtggatcgtgaaggcgcagggttgatcgctgcccgcatcttccttgtggtgtgccttaccaagaaccctcgcactgccgcctgtagccataccgctgcttggagttcatgctctgacttctccatgtgagcattgtagcagttgaacatcacgacgaagcgatccatcacctctatgagacgacgagtcccctcaacgagggcagtgattggctcatcacttgatggtgatggattaccgacagcagaagccataggaaaggatccctgactcaggacatgaggtggcgaaagtcgttggtgaggctagggcggatggcatggtggctgctgggtttggtggcagagaagaggtggaagaggagcgcctggaaaccgataccagatgctatgaaccttagttcatatcgggcatagggaggataaccattgccaagaggaaggccaggccaaagtcggtgtggagggagactagaattttgggggtaactgtattgtttgttgttcattgcttgattcaatctcaattggttacagagtataaatagaggagctcagcccctaggcgcctagcctctagctccttgtttctctccccaacattaactctcgttaactctaatctcttccctagaattctaagggcatgtacaacccacagatagaggttcgtctctaagcacctcaaatcaatcatacactcaggcagaaagacaggccatacaacccatagacgggagctcgtccctattgtgtttaatgctttgcatgtagctaagatgaaatataaataaatttttgtacaccattgtgtggctatttgatagaaaatatatcaagaataaatataagcaacatgattacagtattttttttagaaaccatcaatataataattatattatatatagttgcaacaccttttatccaatttcctttgtttccatagcattgccataagtgcttgattagatacatttgattcgagagagatgaactgcaccaccaaagcacattgggcatggtgatgacaaattaccatggtgttcttgatctatcaaccgatggcaaatctttatctttcgtgattgaagcagtttcagaactggaaatcgaaatggaagtgcaaggtactgaatgaagaaagtcaccactcgtgattgaaggagtttcaaaactaaagacaccagcctgattgaatggttttcaactctactgaatttattcagcagtaatagtacacactcattgtcacatgcctgaagaacacaactcatacacagaatcaatgaagttggattagtaaatcgtaaactatatctattttatggaaaatcaaacaaatctctactccattctcatttctatacacagaaacaatgctacctaaaaaaataaacatcacactgatgatagctgcgaatgcacaaactaacaaacaccttgatggctagaaatcccacccaagattgacaacgaggaggggtctcagatgacaacagcgatgcggggctggtgttgtgctaggggattgaggtgagagggtcacctgggacgttggcggaagctcgccggcaacggcgaggcccgaggatgcgagggcagggatgaggcgtcgaggcagtagagagagggttggggcaccggccggtcttagccaggttcctacggcggcagcgtcgccccatctgagcagcacgatggaggcggcgtcaccggtggagacgaggaggcacgacagaggcggcaccccatctagtgacaactccctcccccgcgcgcccaaaccacgcctgcatcggatctgtgcgctgtcgagtcggagagatgagccgtaaaacgcctgaatccacctttcgtgcctcggagcacgggccttccccgtcgtctcgtgagacgacacgacctccgtcatcaagccacggcagggtgatttttacaaaaatagaggcgacccgttgtacgtgccctaattgcatgcagctggctgtgcatgcgccccttgggttttaacccctaactggcagcttaactgccattgattagagcagcatgcacctcctgggttaccaccctggctgcatctcgagccctggaacgcccttagtactggcgcctccacatcacagaatcagtgaatcatgtcagagctttccatctttgttctaaggtctcaccaaattctccctttttcttctccaggctaagctggacatacttgtaaacccctcaaaagctattgctgactacagaacagacatcactggtgtatctaagaatgatttagaaggagtcacatcatcattagttgatgttcaggtatgttgtctttaacggcttaagcattttctctgaattttatctcatggaagttatattccttctctagaaatcgctgaagagaatgttatcgaaaggaaatattttgattggccatagcttgcatagagatttatgcggtaaggtgtggttttcattttgggtctgatctatctgatgtatcaatcggatgtgtactttgtgtttacttgaatatgcttaattggtctcattcttttctcttttgcagtcttaaagcttgattactctcaagttattgatacagcatacatatttaagtatgcaaatttacctactactgcatcaccttccttaaacagtttgtgcaaggtattggcataaagtcacagcacagcatctgtcttcttatctgcttttgcttttcgagatgaaaaagttttgactgatggtgccagttaaaacttagttcagaaatcagaatagtgactgcgaccccactttgtcttccctatttctcccctgattttgtacacaatagtgcttgatataactatatgtagggaattttctacttctgttttaacggggttacttttcaatgatatgtgattgtatgtaattatgaatgatgccttaatctgttgattctttgtcctcctaggctattctggggtattctgttcgagaagaaggagaaccacataattgcttaaaggatgcagaagctgcgatgaatctagttcttgcaaaacttaagaatgggtttaatgaccccattgaaattgctgcaagtagtgtaagtgcaaaaaaaaaaaaaaagttcttaaatctcaccaatattacagatgatgccaccttaattctttgtgataactttctaggtaattgaatctgatgtggtgaagttgcttgctcatagaattccagtgtacctgccttgccaagagctgtgcaaaattttctctgggaaccccaacattgatgacaaggttaccttataagttttaattatgcaccaaatatgtgtgtttttatgcaattatttaataacaattctttccttttcaacagattgattcgcgaatacgaggtgaattttattccacatgtatttcattcaatgacgtagatgaggtagagaaggcatttgaagaactggatggccaaaagactaaggtacatataaggaccacagaatcattttcacaattgaatattagaacatatgaggaaatacactactttttattgtcttttgcttaccatcttattggtttagtatcatcaatacttcctccgtctcataatagatgacgttatgggatgcgtgctgatcaaactttctcaattttgactagatttacagaaattacatgcaatatttatatctccaaataaatttattataatagtatattcaacgatctatccaatgatactaattatgtattataaatattaatattttttatatataattgatcaaagttttaaaaaagttgatttctcggtaagcgagaatgacttctattttgggatagagagagagagagtagattattaaccctctgccctttatccttctctttaaacatgcaggactcaggtgggagacttcaaaagcatgtagtgctgaagcgtgacaatggagatgtcgtaagcttctacgttcggaagatggtatacggttcctggcccaaacagctcgaagttccaaagaatagaccagagcctacggaggattcagagccaaagaaagagcatgccgagggagttcagcaaaaaaagaagagaaataacttcgtgagagataatgaggatccagagccaaagaggagaccagagcctactttggatccagagccaaagaaagatcatgccgagggggttcagcaaaagaagaagagaagtaaaaaacacacagacaaggaaaatgcgtcggtggtgtaatgaataacttcgtgagagatactgagatattcctgttacttatgaatgcagagagattggcgatgctgtactctttgagaaggtcattttgaggtgtttgatcatggctttgggaaacccctttgaagaagggctgttctgggcttctgagttctgaccatggggaacctttctcctttaccatatagcatgccagtttacctcatctccagtgcttagttgctgctctgctctggttacgtgtttctgctacattgctagtcgtccacttactgtctgctagtgttaatttgcttattgcattacactgacggagttgagtttgaggttcagaaggtaggatattgttagggaattttgtttgaacagatttgactgctattttgtacttttgtggtaaggattttgctccataatttgttttcacgagttggacattgctattggcacttgttatcacgcgtgctatgcatgatttactcatatttactgtaacagta

SEQ ID NO: 4730 - DNA, 4165 bp, Sorghum bicolor
aaaagagattaaaattcattgaattgaaagatagcctaactaacgttcaagcacagttcaagtggtaacctactagagctagttataccacgtcggatagctgtcagcgctgtgatgcaactatgcaagtaagacaagtttgaactgtcattcacttctcaaatattaagaacaaggctatctccagaaccatatagtttagtgaagaagtgaagacaaagggacgaaaccctttcaaaaaaaagacaaagggacaaaactctggcacgaggtcacgccaagtttgggagatccgcaatcatcttgcatgggttgcaaaaaggtactcgatcctatatgagcacgcctttgtttctttgcttggagttcatatttgcttatatttaaaatgctgttgctgctgctaagcagtaagcactccgcttacagcaaactgcaaacatgctgcgcgcctaatttgctgaccctggtcatactacttgcgaccagccgtggccacactattcacacctgagcttaagactaaacggggatttgggtcatgtttattgcttgattggtggttgcaaagtcgtatgctatgcaccgaagctccactagcttagcgagactgtcccacattttggcagtggctttgacattcatgtcccgacctggagtacaaaattgcaactggctggatctcgcttgatcctcgctccaagataccaagcggggagcacttgaagagtggccctttttagcagggctttcagctctaaccttctctagcttttcagatgatgaagtgccaaacattagctcataaaacagctctacaagagaaggtgaacagggaataaaacatttttagctcataaaacagtccttggtatttcttgtaagcacttccttttttttttaataaattacagtaggggcttggccctcctgttctcttcaaaaaaaaaagaaggtgaacagggaataagccgttttataatagagaagtgaagcctgtttgtaaagaacccctgcctacaaatacaacgttactttgtgtaaacacaactacattaattgggaaaagactactaaattctaaaagttttgcgtaacaaacttacatacatcatctcgtttcaattagttgtgttttagtgtgaccaaattatagacgatatgcatggcatcacataaacactcagcttacctctggtattagcaggccgctgtctccaagatcatgcaggtagtaatcttgtaggtagaagtacgttacagagcacagcagcagcattcttctgcatgctgacaaagctttctttcgctacatgtaacatgtgtcccctcatttcttgctttcgggctgtacagcactaagtttttttaaaaaaggaagataaaagagcaaacagaggatgtaccaccactgtccaaactgtacatgactaaacctgacaatggtttgggttaaaaccgtttttttggtttggttttacttttgggttgtattggtttggattgaaacgggcttgggccagtttggtttaggccctttaaagtgggctgaactggtttggctgtaaataatagagtttataataattttttattctatctatttattttttgcttttgtttatggttaaatataaacaatagcatgaggtgctggtgaaatagtgggttggaaatatattttaatgggtgtagcgcataagtggtttggtttggtgcggatgattgaagtcatggtctaatttggtttggatttgactttcacatatatatgttttggattggtgtgggtttggtttggatctcaacccactgtcaggtttatacatgacagataataatgagataacaatagcaacatgtaaatttcaaaaaaaaaattcaaaacaatagcaacatgtaggtagtatagacactgcgcagtaagcattctggtgataccgcgatgcctataaataccatggcgcgtggaactatctttgcacaccacgcactgacagctccagtcacagaagaactctctgtgcttagcgggcggcttatccagctccagctaccagcaatggcgccctgccggcagaccttcgcccgctacaccatggcgctgctgtttgctgcggctgctgtctcagcgcagctctccaccgacttctacggtgagacatgccccgacgcgctggacatcattgagtccgccgtgagagccgctatctccaaggagtcccgcatgggggcctccctgctccgcctccatttccacgactgctttgtcaatgcaagtgccattcataagccgcctccagattttctttttcttttcttttctcgagattatctagtattcagtaatgaagttacattaaacttccatatatgagtctgaactgaattaacgaactccagttagatcttctcaacttctactgttttagggaattttgcttaggcgtagcataacagagcatgctggttcagacgtccagtactcagtagacagttttacgtcggtactgttaactttacgacaagtcagttaaaaagtggcgcgcactctgccgcgtgcttcgatttttcaaatcaaattgtctctgtcgtttctagaagacggtttgcctctgagtacaatgatggagtgtcttttcgtggactaaccgttgactgcaattgcaaactgactttacagggctgtgacgggtcagtgctgctcgacgacaccacgggcttcaccggcgagaagacggcgaagccgaacaagaactcgctccgtgggttcgacgtggttgacgacatcaaggcgcagctcgaggactcctgccagcagacggtctcctgcgccgacatcctcgccgtcgccgcccgcgactccgtcgtcgccgtaagcacagacaccaagactagctagctgcatgcttcttccatttcatttccatgcatggtttacaagctagctaattaactgacaaccgtctcctgtgcattgcagctcggtgggcctacgtgggacgtggagctcggccgccgtgacgggacgacggcgagcctggacgacgcgaacaacgacctcccggcgccgaccctggacctcggcgacctcatcaaggccttcgccaagaagggcctgagcgcgaacgaaatgatcgcgctgtcgggcgggcacacgatcgggcaggcgcggtgcgtcaacttccgcggccgcctctacaacgagaccaccagcctggacgcgtcgctggcgtcgtcgctgaagccgcggtgcccgagcgcggacggcaccggcgacgacaacacgtcgccgctggacccggccacgtcctacgtcttcgacaacttctactacaggaacctgctgcggaacaagggcctgctccactcggaccagcagctcttcaacggcggctccgcggacacgcagaccacctcctacgcgtccgacaaggccggcttcttcgatgatttccgcgacgccatggtgaagatgggtgccatcggcgtcgtcactgggtccggagggcaggtcaggctgaactgccggaagacgaactaaatgcatggccggtgtcaggtttggtagtgttgtgatgggagtgatcagtgcgtgtagtgtgttgtggtctacagaagtgcagagttatctgttccttctatgatggcgtagtctgcttcgaacggttgtagtactacacgaataaaacgaatgataagactggttttggatctcaccatgccttgtttggggtcctgaatttgttctggttgatctgaatctgatcaacgtacgcattgcgagtttagaattttcagaagaaaacactccaccgaaccttgagttttggccaccacacccctttgccatcaagcccaaaacttatagcttaggcctttttggtacaagatatgggcctctctgggccaacatgaatcgtatgcgactagctacgtggagcaatttcctcaaacaaacaaacaaaaaactacgtggagcaatgagaataaacatttggatgaacacacgttctgtttggagtgaaaaacaaactatgttcagacggctgaaaataaatattcagacggctcactagctgtgtggcttgaccctctgtgttttcagatcgagtagacatttgaacatacgtgcttctgaatagcaacaaagatgttaacatca

SEQ ID NO: 4731 - DNA, 9565 bp, Sorghum bicolor
gattttagggtaaaaataaacagggcacaaaattgaggggcaaactaacatttattcgtatccatatgtatttactatataaaagtttaagaagcgtaaacctaggccttgtttagttctaattttttttgcaaaatagctactatagcatttcttttgtatttaacaaatattgttcaatcatagactatctaggctcaaaagatctgtctcgtaaattacatacaaactgtacaattagttattatttttatctatatttaatgcttcatgcatgcgccgcaagattcgatgtgacggagaatttaaatttttttgcaaaaatttctggaaactaaggccttgtttagttccaaaaaaatttataaaattttccaaattctctgtcacatcaaatcttgcggcacatacatggacaactaaatatagataaaaacaataactaattacacagtttgcttgtagtttgcgagacaaatctttagagcctagttaatccataattagataatatttatcaaatacaaacaaaagtgttatattgcttattttaccaaaaaatttggaactaaacaaggcctaaacaagactctaattcgctacaaagcacactcattcactcacctctctcaagagttgagacgcacttggcccacttgtgaccaaggtttttaatttcgttatcgcaaaaatttcggccaccaccgaaattaccgaatttcgcgaaattcggccgaaatttcgccgaaattttgttagagactagcacatgaagtatgcttttatttttaaaaaaattagatataaacaagtatcaatatgatttatgattacacatctattgaatagaagaatatgcaatataaacaataaaaaatatgagtttaaagttatatagcacatgtattagtatataataaaatttcagatttttctttcggccaccaccgaaattaccgaaattcgcgaaatttcgacgaaatttcgccgaaattttgaaccatgcttgtgacaaagctatacatgcgggccacaagtttatccactgcgaaaacccgagccgactggtcgttgaatgagcggctcgaacacctatccggacaccggcggttaccagtaaaaatgtccacgcgatcagactgggacgctgaagactcgcacgctggacaatgcacagacacctgggcccgagttaaccaaaaacggagtggatcccactcctcattctactgccacaagtgttgaaagggcggttcacaggcagccccacgtcacccggacaaggcaacggtctaaggctatctccaacaacaggacctaaatatgagacccattagatagtttgggtcacacacagtaaaagggtcatggacctaaaacattgcctattccaacagccaacccaaaagaaagacctacaaactgtgtggccagtttttcctctttcttctaccttgtgtcgcttgctcctcccgaacaagcactcccgctcctccaacggtggcacaggctcctagctcttctcaacgacggcgttcccagctcctcacaatagcctagaacagatcccttcctcacgatagcctggagcagatcccttcacacagctcccctggtgagtccctgctcgagactcgagagcacgctgcggcctctttgcgtggacgagctccagcagcatccccagcgtggtccctccgttcaccgccgtgctcgagccgcctccatccccaccgtgaacaacaccttgccatggacccaccaccaaagatttgcgtcgtctgtctctcgagacacttatttgcgtctcgcctcagctggtatgcaaaatgagttctctatttgggtcttctgttggagcatgttttatggtatgcaaaacactgtgagcaacctattttgcgtttgcattgtgctattggagatagtctaacgagcggccctctgctgggtgggctccgaacacacaagtaaagacagtggtcccacttgtcactggcagtattaccgccacgctcccgctaaaggaagtggccgtagcagttcgcggcgcctcttccaaaaatcgcctcacgcttccgtttcgaactcttcgtcgcctcacactgctcctcctccccatccctccgcccctcccatggcgtccctcttcggtgctcgccgccggcgatcgccggaggacgacggcgaggacgatagatccggcagcgggagggcccagcgccgccgcctctcaccggaggatgccgccgcgtcgccggcggaggcgggcgcggcgacggggactagccccggttggctctccggcttcgtctccggagcgaagagggtcttttcttccgttttactgttctcctcgcccgaggagaccggctcgggggaggatgaggaggaggaggacgacgacgaagaagaagaagagggcgtcggcttgagtaatttctccttccttcctcgcgtccacgctctccttctctcgcccccttgctccgtcgttcagttcagcgagccgcttggctgtctgactgtgcgtttgtagcttcgagtaccctgcacgagttgctgctctgcttcgacttcgcgacctagggtttcgtcttgacttgctcaaattaggccaggagatttcgaatcttagttaattcggtgtcacagttggctaaagggtgggttgggtcatctgaattgcgcatagaattttactccagtagagtagaatttccataggtgccatcaggggcaagcatggattggtatgaaatgccgagttactatatctttgtagtgcatactatagattaaatggatttcattgaagtggcatatggcttctatcaaccaaagttcagtattagtactactaatccatctggtacatatcacatcagtcaatatgtgcccgaaatcagaattgaagtcatgaattcaatgacctggcaccatgctaattactccttgaaattcaggataagtgagcagagttttttttttactttcagagtgaacataatttgggagcttcaggtacttggatggaaattgtgtgattttctctatgtattcttcagtgtagaatttccgtacctcctattttttttccaagtaaagtggttagaggatctcagtcttcaccttagtaatgctggacaatattttagctaataagcaggatcttaataatgttgtacttccttttaggcttgtaccatcatgatattaattacgacgccttattacagacaattttttgctctctgtgtcatctgatcattgccttttgtgtactgctgactattaattgtgtcctcacatcactatatatgctgtccacactcagatgaaaatgaagatattcatgacactcagggagcaatagttccttttagtgagtcaaagcttgctattgagcaaatggttatgaaggaaacattctcaaggtaatcatattgctatcgcccttttatatgtgggctaacatgtatagtgtcattttttttctggacaacctaccacaattaagtgtggcactaaaataattctttctattgacatctcgttcatcaagtctgttgatggtgcatccttagattcattaaggttaagttctttgtaatccttgttgtgtatactgtgcaatggattataatggacaaactttaaaattcatactcatcttgcagctgataatgtagatgtatgtagggacccttaaatacctcaaggctaacaaaagcttgcactgtaaatcattacatatgttatgctaccttacccttatgtaaatgtaactgctctagatgctatttattggcaagtgttgtgatttttatgctgggtagatccatcagtattttaaacctgatttattggtgatatcttcagcagatgcactaccccttggaacaattagtgttttctttttctttttgcagggatgaatgtgataggatggtagagctaataaaatcaagagttagagattctacttttcctgaagcccatgagtatggaaagccagaagaaatcccaagtaggaatgcaggcattgcgcatgactttacaggaacatggcgctccttgagccgtgaccggaatttccctgaatcagttccactctctagtatgagaatgggacctggtagtttttctccaggttctccactccaagcatcacctgagctatgcagtgcagcagttacggaagcaaaaaaatggttggaagagaaaaggcagggactgggcttaaagcctgaagacaatgggccgtgcacattaaatactgatatgtttagttctgtgagtataaccttctattctttgtaaacctatttgtttttggtgattcacgaacttactactggttatggttggataaattgtttgttaccttttatgtatggccatctcatgcagcacgatgactctgacatgggtactccagttgatttagcgaaatcatacatgcagtcgttacctccttggcaatccccattcttaggacgtcagaagtttgacacatcaccctccaaatactctatctcgtcaacaaaggtaataaaagtaatttatgttgggtcaaggtcactgattggaatttggcattattttgtggcaatattttgatcatctgtgagatattcttagttttacaaaatgttactctcttataagggcagttccattgtaaaatttatttgagaatgtaaaggcgatccatggcagttcggtgactctagcgtggacatcgttttgatggccccatacatgaaatatagatcaatttcgctctgccctcctctctctcatagcactcatgaaatgagctcctgggttattttattctctcggttcggctcgtgtttgggcgttgattttagctaacacatagtagtcgaatgctacaatgtgtgaagtgctgtacacagatagggttttgctcacactagagcttttctaagattgatgaacttcacaactttatatgaccatcagcacttgaactactgatgatttgttatattgatctgtattccatggtcttgaatgagatgtgatggagctgctactggtcactttcaaccgtcttaaatttataccatgaaattactgcattctatatgaactgtataaattctcaacatttctaagaaaataaaaaccaacttcactgaagttggtaagaacaaaactcatgttactaggcagggaaacggtgtgttacatgctatattgctataggctttccttttcttaatcactatcttgcttgacacaatgacacctgtctggttaagtgatgcctcagttgtgcttgcatattcactgctaaccaagtattttaccttgtaaaggtaaccacaaaggaagactacctttccagcttttggacaaaattggaagaatcacgaagagctcacattggatcatctggaggttctgctgatgctcctaaattctggaattatggttctggttccagattatttgagaataacacctctatattctcattgggcactgatgagaaagttggagatcttaccgaaacccataatggtgaaatttctttacacttatgggctctttttttactccaaattcactcaggctgcatacttggatatttattcttttctactgatgcctcactttctttatttagttgcactttttactgtgaaaatctaatttgttgtatattggctacagggtctgagaaagttgcagcaacagaaccagtcagtggatgctccttacttattacaccaactgaagatataactgatgtgagtaattcatgatttttgttttatgtttgttgcattatacttgtatacatttgggctcagtttagcacagtactctgttgtcagtagcaacactatttacatagcaagtggcttgtacatttattgataagagcacatgatgcctttttaatcttccaaaaatagtaaattctggtcaatgtgcataccaacctttttgatacattgtgcactaagctgttgcccctagctgctcctattaaacaatacatgatcacttatgttacctctgcctgtattttacttttctcagtttgcctgtattttacttctctcagtttgtagtataaaatctacttgcctctgtttgttgaaaatgtggatatgaattcaggaaaaaaaaaattattcattgacatgtgtcctcaaaacctttttctgtagtttgtttcacaagtattattttgtatttatcagtgcatttttgttgtactaagggtattactgagcccgtggaccttgcaaaggacaatgggaatgcgctccaagaataccaagttgcatctgaaattctccccggtaaaatctccttatccagttgtccttgactcttcaccctggttatctcatgatattctacccagtttttagccatgtataatgattatagaatttgtgaatatcatgttctaaaatattgtattgtggtacatgtgcagataaagttgcagagggtaacgatgtgtcttccacagggtcagtttttgcattagaaaattcttactgcttaatttagtttttgctgcaattgcaccatcatttataagcttactgattaagtcatatatatgtagctgtaaattcgacttacagttacattagcctgaacttatttgagaaactgattttgtactttagttctgcatagatgtttctctatgtaatatctaattccaactttgaagtttaaacatataataacttttcgcaaaagttgtgtaattaacctaaataatgatgcttatgtgattacatggtcgatgccactatcagtcacgtatcgtatcactcttttactgttcttcatattggaaagttttgcactcgtgaagtcatgtaatcctcagttccatgatattgatagcattagcttcatatcgtcgttctggattattttatacttatgttattttggtttatctaccgtaaactaacatagtgtcatttattccttgaatttctcatgtttggtgtctcagaattactaaggatactactgcccatagtggagatgttaaagctcccacatcagaaccacatataggggaaacacatgtcaactcagcttcaggtatttagggatattccttgcttatacagtcaaacaaatcttgattatagtttgtcttttactccactcatatttttttatggggttaaatcagcttggctttgtctagactctgagctcgcatcagattttctctaatgaactgataactgatgcatgtagagaagtttctgagtttcagcaatttttgagccacattaggccaacatttttttttggttcgaataatggtcacaagtctcaaccactgtgttgcataggttttgcaaatgcgaaggctagacataactagctaaatatcaaccttaaccatttgtgtagccattgctagcatttggttggtttagtggtacttaggagtatcattcattagttagatgatttctaacttaatcatcagccacccacaatttgccaaattagcctgctggttgtccagctgcaataacttttattggctggaagtccagtagtctacttagattatccaattgagagcagggaaccattggccagaaatcatggacaaccttgcctgcaaggctcaggaaagacataattgctgttgctagccagtaaatcctggcttcagttggaatgccactacacacacatgcttggggcgacctatgttgaaaaaaaaataattacaactcctggttccaggtttatatgggttttacaaccattctgaggatggttgataaaaaaaacattgtgaggctttatgctgtttgaggtttggtgaaagcttaaacattggtataaaccatataggtagttctttttatgatgtgtggttataccgctgtagcctactgcctgtaggtacaacgaatttgttagatatcccaaatgcttctggatgctacttgtttttattaattaaagggcgccatcttttggttagtaaataatcttttggtatgaattctgaaagtgctacagcagaagcagaatccaagcgattgtttatcactttatcttagtaaatctctactatattttggaagagggggtactgtgcttataatgcttactggttttatgcaaacttttccagaatccataccaaatgatgcagatcccccaacccagaccaaaatgaatgggtcgaccaagaaaacattagtcaacgggtaaccacaactttgccgattctcttttttttctttcaccttttttgtttggcagttgcatttatgtaaccaagttccctgggcaatgcagtcttttggatcaatcaaatggcaactcagggctacaatcttcaggaaatgataatcctagctacactaactcgagcagtgctatgccaccctctagtaccgaactaactgagtctacagcccctgctacagatgttgattctgttaagaatggcccaggtacaaaaccagaacaaccagctaagcgggccttgagatcatccaatgttcaacaaggacggaaaagggtgttgcgaagcacagcaagaggaagagcgacgtagggtcattgctgcactatattgttgtatactagtattaacggcccaaaagggcaacatgatacctaggttaattagatctagtgccgactggtcgtttccacggtacggtgcattgtgcatcaacctgtatccatgttgtattatcttaggccttatgatgaccacgtgtactagttagagttgatcattaggaccagaagctgtttgattttgtttcagtatctagctttggttaagtctctggtagtttgtgcagtcggaaaagagaatttgttggttgtattgcagcagacaactaaagtgttctagtcatcaggtacgtgtactgtgtagtgaatccagcagcagagctgttcctctctgtatggtggacgctggtatttgaggcgatgtaatcattatgtaacctttgttttgtgctattgtgttgtggttgcatgagctgctttttaccactatggtttctgatctgatacgtgaccactgacgcgcgccatgttcataggaggggggctcgtcttcgcatgcacagcacagcacaacccaggttgtggttgttgtgttatgtagcaagcaacttgtgtgtatgggccaaacagtggcctcggatcgtgctgggatactgcgaaacggatcgctcctgaaggttcgttcgtgacgtcctgttaactgcccgccttgactgttcatacgagcaaacactgtgcactggggggggggcacagttgccttgcctgcgtgtctctgaagtcacagtgcctgtcgtcgtggccactagcattgtgtcgtctgtcgtgtgatcgatgctgctgatcctattcctatacctatcgatgggaagatgctcgagagaaaatgcaaatccaccaccatccactccaccagaatggaaacgacaatgcgtcgggttctcgcaggaattcggaccaagatcggcatccgatcggtcgatcg

SEQ ID NO: 4732 - DNA, 2811 bp, Sorghum bicolor
atatatataatttgcatgaaaccagaccactgactgagctgctagcctgctactgctagttccatttgcattcattttcatgtccttgcaattgcaaatttgcaatgcatgcatgcaggtgttgagggagatcccgggagaggaggcctcctcgtcggtggtggacgcggtgacgagccgcgtgagctcggcgtgggagctgggccgctgcgtgtacctgggctaccagcacggcgcctacttccgggaggggtggttgctgctgctgatgcgggtgctggcggtggcgctgccgggcctgccgttccacagggtgcaggactacgtcaacgccatggttctgggagactacattcccaaggataactgatggacgtctctgatgactgatgagtcgtcacacgtcagtgcatgcatttcaatcaacctgaatctgatcgcccgtccatgaatgaacagtatgcagtatgcagaactgcaacgactacagtgacatcacctccatcagaccgatcaccgaagctatgggatgtacagtaatgttttaacgtactattagtagtaattaagtaagcggactgctaccgtatgcatgtgagcatttgctatgtatcgaactatgaacaaagtaagtgtagaagccaataaataaataaagtatgtgcacagttaagcgtaaatgaactaaagagttgtacgctgtctttacaacaaacgtcacacaaaccttttgggatgttttacagccttattacaggtatagtatattggataacccttagggcctgttcagttatcagagatattggacactggaaacaaaaacttgaaatgttgtgctaatttctactaactttgatcacagggaatgattccccggaaggaattatgcctaaacgaacgaggccttaatgtgccagccttcaggattctggaactgagagaataaatgaactgtggttgaaacgaactgaaaggtggtaccggagtctaccagagagccaccaaatctcccccctataataacattgttctttgataaagaaaaagattacttactaccaaaacaaatcttctgggatacttttgtttgtcatggcgcatgaaacagatcaatgacaatgcataatatgatcgattacctctgaattttagcaatctccatgaaatcagaccactgttctgcaacctcgacctgcgttcgcatgcaggacagtactgtgacgactgacgaggcgcatctgatcgatcaactcggcgccaccgtcagagacccctgctttcagtctcagtcatcagctgagtgctggtcgtcgacgtcgatgcctatacaatatgcagaaaacagtcgcagtcttacatgctgaggtcgtgcagtgcaggggccttgcaactgcgactacattgacgttaccttcatcgaccgatgctacgcgaaattgtttactactgtactggtacgtagtacgtaattacgtaaggcatgagcattatagatacacataacactgcttccgtgtgatcatttcctgtgtgagcaagcaagtgcacaaggccagaagctaaataaaagtatgtgctcattaagcataagtaaaccattgttatctaaaaaaactaagcataagtagactagaatctctagtgttttatactgccattgcctgccggtatagattatgcagtggcgctttccttctgtgacaaaaactgttctattgtgatctgtccactggcctggggctacatgggctttcgaaagcccatcacctgccacgagaaaggccgcacaagaggtactgggctgtccaggccagtccgtgcctgcgtacgtctgggccggaccgcatgtgctcctgatcaatacgcaaatctcctgttcttaaagggggcgagtgcaaacccacataaagcgagatgggtatctggatagaggctttgccgctcacagtcacagcctcacaggaggtcgctgcggtggttcagtacttcagttcgccatggaaggtgcagtcggccaaatggtcgtcccggtcctcggcatcgttgccgcggccgccgtgaccttctacaccgtcagcttcatggagatgcgagacgtacgctttgctgttccctctctctatatctctgtctgatgtgttggtttcccattccatttcaacgctgcgattacggtcaccatgcaacttacgatttgcagaaatctttcgaggagctcgacgagaagtactcggagctcgacgagtcaggcggacggcagcgccggtctcgccggagggccgagcgcgacaggaagagagcgaaatgattgaccaccacacacaccgccgatcttatgaatttgttgatttggagatatgccggttaattcataggggtgagtgtgcatgtacctactgaagcagctaaaacgatggatttgtttaaacgactccatatataatgtaccctctgctgttcttcggttctatcaggacttgtaaaacaaatttcccctaaattgcttcgattctagattgagtgttctcaacgccaaatttccattagcatacatgcgttcgatatatttcggaaaagttgaaaactaaaaagcacttccgtgtagatggagttcgtgcgtttcaattaataatacatggaatagtaaaacccaagaacactacgcaagagagcacatattaataaggccccttttaggttgcaggacttctacatgttagtgctacgttttccctataaaaataaattgattcatgtgaaaatcttacatgtaaaaagtcgtcctgccttccaaattaaaggggatac

SEQ ID NO: 4733 - DNA, 5680 bp, Sorghum bicolor; identical to SEQ ID NO: 3738

SEQ ID NO: 4734 - DNA, 4127 bp, Sorghum bicolor
ctaggacttccccgataatccgccggcgtggagggctacctcaacccctcgacctctccacgtcagcccagtgttttttttacacaataaaataatcaataatattttctctcatggcttatcagccaaacaaacaagacgtacgtcatgaaaaatgatggcttgcatgacgactgagatactcgcagaaacaattgttgtttagtctgacaaatacactggagtgtgtgacgtggcaacgaatagcttgctcttttgagagaccatatttagtcaatgcagcaaaacatgttgaccataaaaagataatagtgctgtggtacactctttaacttgttcgcttgactgaaaagtcatggctgaaagtactgttaaaaactattgaatggctgatagattcgttagataaattcaagtaaacaggactatgcgctaccttgttcgtttggatgataagctatgacacaaactattgttgactgatttgttgtgagagaaaaacattgctgaatggttgatagattcggctgataagctcaagcgaacaaagatctataattgactaccttgattgttactttttttcaaaaaggccttggttgttactaatccaaattatatctctttttctttagaccaccacaaaacattagcccaccttgtcgtggataactataagtttatccagcaaccactatacctagatcaacaacgagcaacagttgcgtgcagaactacggttatgtaagcaagtgagaagaacatagtgagatgatgactaaaacaaaaaattgttggagttagctagaaagacatctagaaattaaggttctatatttctattcactctatgcatgacttaggagaaaaaaaggaagcttataattagcggaagatttaggctagtctatgatgggcaaagaaaataaaaagaaagagaaacacctatttttgtcctgctagccacgcaaccctctatcttcgttatgtcatgttgcactgccgatgagctttatcacccaaatccatcattatcgccatctgtcttccatgcaaggaactatcattataagaagcttagcaacgtctagcattcaagccacacctactatttttgccaacttcattttgcaattaaagcctaagcatacaacatatatctcttccaacctcaatacaacaacgatgacacatgacaatataaaaagtcgttcactcatttttaagggataaagttactagtcactatgtatcttagatgatattttaggataaatctatcctatttcaaccttaaactcaaagcatgcaaaaaactaagatcgtaaactcttacctagccatcctcgtaaccaccgtgcaagtaaagctcgtttttgttttagcttgtgcattgcttatttgttttatcttatactatgattttaattctactccattcacccccgcacccctaaaaaaagtaagtcaaacaatctttgattagacagtttttttataaagtatacgtagattgtaatattattatatcaaataagtatcattagatttattatataatatatctttacaaataaatcatagaacattacttttttaaaccaggtataatctatgattcaaagctgaaataataataagacaatacaatatagttctctccaagatggtattattgtttgtaatccacgatctagagcttaaacaaaaagacagttttgtctctcgaattatggtatgctagtaaaaaaaaaagaattgcggtatgctagttacggtcttaacggccatatttacctcgaaaattcaaaacggaaaggaaaaaactgttattttttttttgacaaacaagcaaaaaaatgtttgtaaaaccgcgaatccagtaaacggtacaaagctcatgtccaatcgggacccaccaaaacctaccagtgtccctacatcgtcagagggacagagacggaaaacagagcccacgcaataagaaaaaaaaagtaggtgggaaaaaaatggaggcgtccgcggaggcgggggcggcggccgccgccgccgcgcgaacgttgaggtgggcgggccgcgcggggcacctgggcggcctcccgcgcgccgcggtgttcgccgccgtgggcgcgttcgccaaggcgtacgcgtcgctgctcaacaccaccacggtccacaacgccgacgcgctcctccgcctcgtctcgtcgcgggctcccgggacgccgctcctcaccgtcagcaaccacatgtccacgtatgccccctgagacctcctcactcgtctcccttccccatggtcgtgtattacccttgatgcttgttgattcagactagccacagtagctgggatcagatgtctattgtgttgcttggtacgcttgatctgtcgcaattccggcgcctttcctgatgatatttgcgtcagcattggtgccaagtatcagctggtagtggagtgcttggagcgtatgttgattggggtttcagactacggttgatctcaggctagtttttcccccactgagcacatgtaaatgagcaaatcaattaagcactagcatccatggcattgatcttctgtttttgtagagacctgtccttgacccttgaagcacctgcagtctcctacatgtagcagtgctgactgctgaggttttacttgcaaatcttaggttagatgtggtctacgcatgggggaagcaggctgctgcagttctatgcacagtagctgctagttcatcagccacgctgtagctgaagctgaagcgaacacccccattgtcttcttttaaagttctcgtttgcttaatggttccttatttctacgacatcaccgtgaaccattgtacagtggtagtgtataattaagaaaactacaatacgttccttttcgccataaaatgtgtatgaaaggacaaaataataatattcacaagcgtggtgccaccgtattgtcgtattgtacacgtgttatgtatcagtgctcgtagttgtcaattttctgaacccgcgtcgttttctataattttcgtctgtggaatttccataacgttgaacttatgtttataccttttgtatcaggttagatgatccgcttatgtggggattcaagggttttccaacttctgatgcaaaacttggaaggtgggtgctgacagcagaagatatatgcttcaagaatgcagtaatgtcctacatgtttcgacttggtgagccttaatgttcctatttgtcatttgtgttccgttcctttgttagttttgcaagttctagcggtactctgcgtgctaaataacaatgaattgcagtttaggtatgtatgatattatgacctatatatgatctactcgtgtcgtgtgttttgtgggtgaaagtttgaacttttagacatagtacttatcccctggtttgggtatgtataagtcaacacctctatatggtctacttatgcgggttttgtgggtgaaagtggaactttaagacagtgatctttatgtgacttctcaaaaaatcgagatgatgtaacatgctctgctctaactcagttacttaggtaagatctcatataaatatgggttgctgccttttcatagagggctaagaggcattttaaggtatgcctagtaaaacatgcaaaacagtaaaacatctagcacattcctatttaatccagcgaacatctgcatgttccttacttatgaaatctagtttcatttcaactgccaggaacctttttagaaattcggtttcatggcactcgattcacttaccaagactcgagaattgctgagaatttgcatagtttgtcttctgtatttgccataataggtggcatttgtcttcagtccctcgtttgcagtattgtgtatcagataagattagctgatgcttgctaagctatgtgctgtggtgctagtacaagaaacaaatgctatcaaatctagtgcctcattatcttttcttcagctgctatttaaatgtccagtgcttattcttcgcccttcacattctccagttattcttatctttcacttttaaggtgacaaataactgtgcacacagggaaatgcattccaatcacaagagggggtgggatctatcaagaacacatgaatgaagccctt

SEQ ID NO: 4735 - DNA, 6139 bp, Sorghum bicolor
  misc_feature (787)..(1892): n is a, c, g, or t
cacgaggaaagcacgcgcgcctggagatcttctatttttatcctttgctaagtctaaatgacaatttccttggagatgacctatttttatcctttgcattttgttatggcagtttgcaaatagcaacaaatgtcaaatcaatttgccaaagcctttggagatgctcttagttaaccctaaaccctaaaccctaccctaaaccctaaaccctaaatcctaaactttacatctactacaacagagtgaatcattagaaatcgaatggcaaagcatcagacatcatgtgttacaatatcacataaatacatctgcaacatgtatcgcacaagaggagtgaggagcttcggccctgagaagcgtagctcgtccttgtgtttttcctaaggctaacttttcctttattgtaaaaaaataacaaattttcctataaaatttctgttttttattacatattttacttgtgtttttctgatttctacgtttttcaatcctatatatgttccaaacatatctttaagggagaattggctgtgggacatgcagaatggtggctatttgccggcgaacgctaggaaaaattagattgctcaaaaacactctatttcttgttaaatttgctggcggacactacgtctaatcaaacattattgcaaaatagatataaaatcatataagtgctagaaaattatactataatttttttacactccacatgatgagaactatagtgtaaaaatattgtttagtatttttagtatcttactaatacattaactaattaaccatnnnnnnnnnnnnnnnnnnnnnnnnnnnnnnnnnnnnnnnnnnnnnnnnnnnnnnnnnnnnnnnnnnnnnnnnnnnnnnnnnnnnnnnnnnnnnnnnnnnnnnnnnnnnnnnnnnnnnnnnnnnnnnnnnnnnnnnnnnnnnnnnnnnnnnnnnnnnnnnnnnnnnnnnnnnnnnnnnnnnnnnnnnnnnnnnnnnnnnnnnnnnnnnnnnnnnnnnnnnnnnnnnnnnnnnnnnnnnnnnnnnnnnnnnnnnnnnnnnnnnnnnnnnnnnnnnnnnnnnnnnnnnnnnnnnnnnnnnnnnnnnnnnnnnnnnnnnnnnnnnnnnnnnnnnnnnnnnnnnnnnnnnnnnnnnnnnnnnnnnnnnnnnnnnnnnnnnnnnnnnnnnnnnnnnnnnnnnnnnnnnnnnnnnnnnnnnnnnnnnnnnnnnnnnnnnnnnnnnnnnnnnnnnnnnnnnnnnnnnnnnnnnnnnnnnnnnnnnnnnnnnnnnnnnnnnnnnnnnnnnnnnnnnnnnnnnnnnnnnnnnnnnnnnnnnnnnnnnnnnnnnnnnnnnnnnnnnnnnnnnnnnnnnnnnnnnnnnnnnnnnnnnnnnnnnnnnnnnnnnnnnnnnnnnnnnnnnnnnnnnnnnnnnnnnnnnnnnnnnnnnnnnnnnnnnnnnnnnnnnnnnnnnnnnnnnnnnnnnnnnnnnnnnnnnnnnnnnnnnnnnnnnnnnnnnnnnnnnnnnnnnnnnnnnnnnnnnnnnnnnnnnnnnnnnnnnnnnnnnnnnnnnnnnnnnnnnnnnnnnnnnnnnnnnnnnnnnnnnnnnnnnnnnnnnnnnnnnnnnnnnnnnnnnnnnnnnnnnnnnnnnnnnnnnnnnnnnnnnnnnnnnnnnnnnnnnnnnnnnnnnnnnnnnnnnnnnnnnnnnnnnnnnnnnnnnnnnnnnnnnnnnnnnnnnnnnnnnnnnnnnnnnnnnnnnnnnnnnnnnnnnnnnnnnnnnnnnnnnnnnnnnnnnnnnnnnnnnnnnnnnnnnnnnnnnnnnnnnnnnnnnnnnnnnnnnnnnnnnnnnnnnnnnnnnnnnnnnnnnnnnnnnnnnnnnnnnnnnnnnnnnnnnnnnnnnnnnnnnnnnnnnnncccccccccccccgggtttgggggtttcccccgatttgcccccccccccccccaaccaccggcggggccttacgcccggagtggcagtcagcttcagcattgacggcggagccggagcaaggcttccgcccgctggacgaggcgtccttagtcgcctacatcaagaccacgccggcgctcgcctcccgcctcggcggcggcagcctggactccctcgagatcaaggaggtcggcgacggcaacgtcaacttcgtctacatcgtgcggtccgaagctggcgcgatcgtcgtcaaacaggtacgatcgagtgtccgccccgcctcctcgtcctagcttccctctcacctgacctcacggcgcgggcgaacctggaacacgcaggcgctcccgtacgtgcgctccgtgggggactcgtggccgatgacgcgggagcgcgtctacttcgaggcctccacgctgcgtgagcacggccgcctgtgcccggagcacacccccgaggtgtaccacttggaccgggccatgtcgctgatggcgatgcgttacatcgagcccccgcacatcatcctccgcaagggcttcatcgccggcgtcgagtacccgctgctcgccgaccacatgtccgattacatggccaagacgctcttcttcacctccctcctctataacaacaccacggatcataagaaaggaggtgagccccttcattgctgttgagatggctcccacttgttggtacgtggccatgcctatgaaaaccaattcaagaatcttatttccgttgttcaaaaaaaaactaaaatttagtacatccatagtgcatataaatatgtattcacatgcaaaagttgagagacaaactcacttttcaaaaattcatacgaaaatcacaaattttatatgcatgtccactagaatttgtcattttcgtatgaatatttctagggccttgtttagatctaaaatattttggaaaataggtactgtagtatttttgtttgtatgtgacaaatattatccaatcataaactaaataggctcaaaagattcatctcacaaattatagacaaactatgtaattagttatttttttatctatatttaatgttctatgcatgcgtcgcaagattctatgtgacggaaaatgtgaaaagttttacaaaattttctaggaagtaaacaaggcctagtttgagtttgcgtctcaacttttcatttgagtatatattaattagtacgcactataaatatatcaaatttcaattttttttcaaatgatcaaattacgtttttttgaattgtttttcatgttttcacgtgcactaacgactgacggatatgcaatgggttgtgctgtggtttcagttgctaagtactctgcgaacgtggagatgtgtaggctcacggagcaatttgtgttctcggatccataccgcgtctcgaaatttaatcggtggacctcaccttatcttgacaaagatgctgaggcagttcgagaggatgaggagctcaagttggaagcggctgaattgaaatcgctgtaataattacctaactttgtagaaataattgccatctatggtttgtttctatatatgggaaatacgaattattcgttttcgaacttcaggtttatggagagagctcaggctctgattcatggagatctccacactgcttctatcatggtgaccacaggttcaactcaaatcattgattcagagtttgggttctatgggccaatgggttatgacattggagccttccttggaaacctgattttggcatactatgcacagaatgggcatgctgatcaagcgaacgatcgtaaggtatgtatgaatgaatctgctagcttgttactttttcaccctttataacttcaatattagtagtacatggtctaatcataccatgttggctagttcacttctatccataccaaattcttcttatggtttcttgctgtcaaatgtagttgggttgctttgtgtggtttagcttgtttttgagttactagggtaatgtcagtcaaatgtcttcagagtctacttctgtgatggatagatgtttggagtatgatgctaatttcttacatgagaaatagtgacttttctgacacctggggataatcaaagctgtcatgtttagcataaagaggatagtacttggcagacaaaagtataccagtcaaaaatgtcccttgcatttgattcatgcatcttcagtagtagcgttacttaattaatgacatcttttttttcgaaagatccgttaccggctttctattaatgacatcttcagtagtagcgttaagcgttaactaagtgctctgctgcctatcttttttgcaggcttacaagaaatggatcttgaagacaattgaagagtcgtggaatttgttccagaaaaagtttgttgaactatggaataaacacaaagaagggaatggggaggcgtacctgcctgatatatacaacaactcaaagcttttgagcgttgctcaaaagaagtacatgacaaacctatttcatgatagccttgggtttggttcagccaaaatgatcaggttcgtgaataatgtttttttcttaaagagaatactttctaaataaaatcactttctgttactaactggtggactggtatgagatataataactgcctttttgacagaaatgacaaaaccatactcaggtcaaataataaaaagattttggattttagttttgatgtagcatctttctcttttggtggaactatatatgtcatatttttttagatgaagaaaactttctttttttttagatgaagaactatatatgtcatataaccaaagtttctgaagtcagttttggtgaaaagcgactgagaagtaaaaaatggatatgtttggggctatttaggcatgctgtgcagtaaaaagtatgtatataattttcaaaatgtttgctcgacacttttccgaatgataatgcttctcacaagaactctaagccacaatttttttgaaacgaactctaaggccgtgtttagttggtgaaaaattttgggtttgtctactgtagcactttcgtttgtatttgacaattattgtccaatcatatactaactaggctcaaaagattcgtctcgcaaattacagacaaactgtgttttttatctatatttcacgctctctgcatgcgtccaaagattcgatgtgacggagaatcttgaaaatttttgcgaaattttagtaactaaacaaggcctaagccacattttaacaccagttgcaaacactattcatatattgtttccaaaatcttgttgttccgtttgtaggcgaatagtcggaatcgctcacgtcgaggatctcgagtcaattaaggatgccagcaggagagcagagtgcgagcgtgctgccctcaattgtgcaaagacgatcctcaagggaagacgccaatttgagaccatcgagcaagtcattgtgcatattcaatcgtttgatcaggactgacgactgagaaaatctgtttggcgcttaaggagactttcgtcaattaacctacgaatacccgagagtatattgggatgaataaaacgtctgtcttgaagcagattatatgatgaaatcatgaaagagtccccatttgtgtggtctcctagtttttaatgtgtatgtactctaaatctctaatagagtagtaaggtgtcgttccggccaggatagcgaggagctgaataatgaaatgaactaccagattcctccgtgactatctcagtacacgtagacgcgtgtattatcaataaattttgttctgaagtaagtactgccttgttattgtctctgtaatcttgatcttggtaaataagacctgctgacgtacatgtcgtctagtactagcagtaggaggatatatacgcctccaaattcagtcaggtaacccaaaaggcaaaagcgatggtatcctgttcgtttggtcaaagtcaactcgccgtagcaagtcaacacgcgccatggaaatttcacttgaccatggctacaatgctgccttgcggttgcggtggaggacgaaccgagactagtttcaccatcttctcctctcgatcgctgccctcaagctcaagggttggggggtcgtcgtctccgtccccgagctcagactcagacagatggaggaggagcgcccgcccgccgcggggtccggtggcttcgtggtgtggctgcacgggctgggcgactgcggccgcgccaacgagttcat

SEQ ID NO: 4736 - DNA, 4553 bp, Sorghum bicolor
aaggagatatgtaaagatagataggccaatgcttcaggtctttattattaactataactatactggcaattcagcacgcaagccctttggaacacaggaattccacaataattatataggaatttcacaggaatcagttcaccttaataggaaaaacattggaaacaggaatttttcctacattccaaagggaacctaaaatgaaaagagaagacaaccatacactgtccacttaagatagacagcaacagttcgataaacatgcatgtgccaaacacctctccgcggtacagccacatctcagtgactgacattgcacatttggtcccatttgtaatgcaggattttttttcccgattcctgcattttttttgcagtgaaaaagaactgattcctgtgaaaatcctgtatgattcctgaaattcctgcgttccaaaggggcccttacccccacacatacaggaaagaacagcatttggcttcacaaatagaaatgacagctatctaaataattagcagaaactagtagtaaagtataaagtaatttattagggaagcaggatctcagaaagcatgccagcatatgtttcaaacgatatagaatataacattattggacttaaagtgcactattgaacagaagggacaataaacaaggtattccttacacgtttttgttcgccctgcaccaattattactttagagaccagtgatggtgccgaacaatccagaaacatatgttcacctggtttgaatcacagtacataggaggaatgtgagaaaactaaaaaaaggatataatcaattagttccatgtaccaataaacagacgtgggcaacttaagggatgaaaggacaaataccaaccatgaaatacaaagagtaagataaaaattcagtcttccaaacatgcactgaataaaaaacaagcataaatgatgagttgatgactaaacaacatttaggctaccaggactagcacatgcagattaaacatgtgaaaatataatcaacatatgaagtacttatggcgggtgagaaaaggcatatatatatatatagaagtaaagattgctaggaaaataattcatctacacaatgacatgataatcagagtgtcacctcgcctttgtttagaccctggtaagggctttggaacagagaaccattgactatccagcttctcaatccccttaagttcaaaggagagcacatctaacaacagcgagggggtatcctcgcccgatactgtctgcccagcatcatccttcaaactagctgggctacagatttcaatagtcacagtgactgaatcgccaggtctgtaggcctccttatctgtctggagtttcaacgttggggataactgctgtttggctgatgaatcaaccttccggtcctcaaaccatccaacacttcttaagaaggaaagcccttgcggaattggaagtttcagtgacatcgtatcagagtatcagacccgttgctcttactcatcaaatttccaccactgcattcctgcatcacaaagagaataatccaggaaagccatcaacgacccagtgaaggacatgaatgtacacatgtacacccaacccaatattttttgcaaaaaaaaaacgagaaatggtttgcaggcataatacacttgaaattggatgagattcagatcagatccgaatacaaatagcttgggtttggttgctcggttccaaacagcgttaccggaagagaaggggtgcgcgtaccaggtggctgctcgtcgccggcgaagatctcgaagatgaaagacctcgccacctggcgtagggagacggcagcgtcggccgcccagtcgtcgccaccggagacaggaaacaccgaaacagagcgcaggcgagggggcacgagtactcgctacaggcgcgcgtctcagcctggaagaagaaggcccattaaaggcccaattaccacgtggcggatatgtatatatacactgcgaagtaaccctaaccgccaccagcctccgcctctcctcccagtgcccgccgccgtgcgcttgctctccctctccctcaaggacttcgccggcgaagagagcctagtcgcctagcaggtattggcacccccttctcttcctcgtctgctgtgcgaaaccgagttcccaaactctaacctaaagctatttggctgtttgattcctactaacttcaaactttttgcaaaaatcacctatgtcgcccctgttaccgttagcatgttcgcttgagatgtgtttttctctcagcgaacaaagctttcggatgatatgctacttctctgcgctgggttcggatattgggaattgaattaatcccttaaaccatattgaacatgtcttgaactgcttgttgacttatagatctctagttgaggagcgtcttgttaagatttgctccggtccttaagcgcggatgttgacttgtagtgttctgtagtaagcattggcccaagtatatgctggggttttcaccttaggtcctctatctatgcgcttctgtgatttccgttaagcgtactggtatttttctggtggtgcgctgtgtctggaagtttgacaccttcaacatcatatattagtgcttaagtttaaaattttaacagataatataattcgaggtactctgttaattgattttaggttgatttgctttagattcttgggtcggttgcttacattttatctcaactcactgtcatgtagctaaaaattggaactaactgatatatgatggtttgagcaggatgaagtttattgctgcctacctgcttgctgtcctcggtgggaacctcagcccctctgctgaggacttggcagccattctggagtcaggtaatttcacttactgccatttcaaggagtgcaacacatacacatccaacagataactcttgttactataaactctacatggctatatgagaaaaaaaactcaattctgccagtagcattacctccttgaatgtagggattcttggttttcatttatttatgttaaactacaagttaacattttttaaacacagttggtctgatttgcatttgtggtgtattcatctcagtactgatcctgtattcactgatttatagtctgacttgtactcatcacatcacatgcctcatgagcagaagcatctaatcctatcattcctacttgtaaatgtcgcagttggctgtgaagttgacaatgaaaagatggaactcctgttgtcccaactgagcggtaaggacattaccgagctcattgctgcaggcagggagaagtttgcttcagtcccatgtggcggtggcggcgtggctgtcgcggcagctgcgcctgctgctggcggagctgctcctgcagctgaggcgaagaaagaagagaaggtggaagagaaggaagaaagtgatgatgtaagatcattgttctcccattctggctgcagcaaatatttttcctatcagagcagcagtcctatgctactctgttctgatataatcttcatgagcaaaataccactatcaaagctctattgccatctcgcttgcattccatcttgatatcatgaaactaattcttttatattgttctttcctctgctgtcgactcaattcagagacttgactatgttgattatgtttcttgcaggacatgggcttcagcctcttcgattaagctgtgttgtcatcagagtattcttttgagtcgtggaaccagaggaaaatcatagtcatgtttggagactttaaccttgttttatgttggaaagtacttgaaagactcctgtctttttatgtggtaattcagctgtaggttgctatgctggttggggtttccaggtgaaccagagtttttctatcctatattatgaatcggttaccagaagtttcttgattgttcaatatttgttggtacatgtcgattgagtgagtacacgtatgtgctaccatgaagctcttggtagcagtcgccaatttcattgtgcttggaattgtgaccatcattggtaactacacggaggctggccgtgggtatttatgcttttggcatgactttttgcatttataaaagttaagagctgtgaagttggaaatcagatggtggttgtcgactggaatttccctggtctatcacatggctggccaaactactttagactgaaagactgaaattcaagatttgctttttttaccttattggacgctgttcttttgttctcttttgttgacacgcgcctgagacttgggagtttggggctatttggaatttcggatgcaaccctgacctagttagaacaactccaagagcttaggtcttgtttagatacatccaaaaacctaaaaactttacaagattttctatcacatcaaatcttgcggcacttgcatggaacattaaatatagattaaaaatataactaattacatagtttatctgtaaattacgatacgaatcttttaagtctagttacttcatgattggacaatatttgttaaataaaaacgaaagtggtacagtgtcaaaatccaaaaaaaaattgaatctaaacaagg

SEQ ID NO: 4737 - DNA, 4616 bp, Sorghum bicolor
agacgagacttttcctagtcgtaaagaaaaagcccttcccattgcaagcagatgtgtctagctaagcaagtccttgaacctttaccacatcctataaagaaaagaaaaaaaaaagatccttaaacctcgcattgtgagtagagtactgatgtgtgaatgtgagaagggtttgaatgcaagtgattggctgtgcaggcaggcaggcaggctgggcaggcatcagcaagcaggagcttgccattgcgctgctcgtgcgcgtagcagcagtgggtggggacgctgcggctccacgagtgacccacaaccacaagcgcacacagtgcagtggtgtggtgtggtgtggttgtggcggggcgggcgcgcgagatatcttttgggcctcgcaaggcaaagtctcggtggtaataatggtggccggggcgccgggccggaggcggagggggagatgcgtgagtgatcgagtgtgaggtgatgagctgagctgatatgagatgacaacgcgctgcccccactcgccaagtactgctgcccccaccgcctctgcagtgcgtgtgcttctgcctgccctgccctctggccggagccctggactagtgtagggatggaaaatttcccaaggcccgagaagaaaaaagatgtgatgaaaaaaaaaggaataaagagacaccggtgggcccaccagccagtgtctcgtggtaattattctttcaggattttcttttaccattaccataccatgtcatgtgattatcgtgatggtgtacgcttgtgtgttttggaaaagagtgaggcccaagcgcaatacgactggatcggatggccggggtgacaggggtagatgagacggcgaaaggagttgtgttgagtgtccgtactggtactatttggcagttgttactggaacaggagatgggcgtgtcttggcaacagggtgcaccgtaccggatcgagatctataacctgatcattcgtcagtccatatgcatgggtacggtttcgatacaaagacgatgaaggttaattattagcctccggattcgttgttagtttagacctgcttgaaacggtgttacttacatgactgttaggctgttagagagcttgcaggaacgatgctcggcagagtcagcacaaatagaggaagctacgtacggcgaaacaagaccatgcagcatcactttgtattttactccaagtaccactaccagagcatgcaaatgcaacaacagaagagttctgctactgaaactgagagaaaaggaaacgtgagagcagtactgtaggttggtgcactgtcataagatgtgtacgtataggccaccgcatgcacgggaaacaggaaatacgtacgggctggatcgacgcgaaaacaagagatagggttaccttacctacttaccttcacttgacatggcttctggctgggattgggccgagacttgagcttttattccattctgtgcagagcggcacgacagatctgcttctttgctctgtgggccgtaacggcatggtgcatagcgccttgcgccttttggcccatctgggcgcgcggccgttccttttgaattcgaggaaggaacgatgatgatacggttagagttaagagaggcttaaatcattgtatatacagcctctaaacttgttaaatagtccctataaacttttaacatatatatatatttctatatctttaaacattttaattagtgcaccaatgtttagcaccgtacaaaaatagatctgtagttcaattctcatgcttttaacagcagggtgtaatcaatttttccttctgctttgctcaacgaggctataaacctgttctcagtcgcgaatccatccatgggccacccaaatttctccttcctccggcccataccaagtcgtcctgatgaacgccggtcggcccaaacgaaagcagcgtttagggtttagcctctcgaacccccacgaggttttgcttcgacaccgacgcgagaagtcaggggaagagggaaatggcatcgttatcccgcacagccgccgccgccgccgccgccgtgaggtcggcggtccgctccgcaccccttaccggccgcgtcctcggagcgccactgccttcccttgcctcgacttccgctgcccggtccgcccggatcctccgcaggtagccggccgactccctggcgattggtcctgaatgggattcggcgcatgcgctcatatcggccgtttggcttcggtgcaggtcggcggccgcggcgtccgcggggctcgaaacgctattgcctctgcacagcgcggtggcggccgcgcggcttaggtcctgcatcgcggtcgattccacctgctggagctcgctctcgcaaggtaactctttgttctgggctgttaccatttgaggagataatggcatgctgtcaaatatttggatctgttgttggtcgctggcttcctgcatgctctgcaacattttcatgtgattgtgcacttcgatgtttgcgtgtttcggataagattgaacgagaaaaaaaaaagtcctaagctccctcagatcgctaattgaagtactataacgttttgctagcatggccacattgtcatttattaaatccatttctcactggaccatgcaattcatgaactgaactcattacacagtactcatcaggtagtttgtttgttctacttatacaccatataaaccaagatacatgagtcatgtgagtgaactggctaatttagtaactcgtgcatcttagttccttccagctgtgctttgcacctatgaggtcaatccccaagctcatgactgattaatatatgaatgaatagtgtcctgtcctgatgatacttcttttaacctttgttatactgatgaaataatacacgttcatattcctttctatttgtgttttagttgcaattagttcaattgtgctcgattgtttctctacagatatacttttacatctatgtccaattgtccaatgtatttagcagcaagctattagtttttttcctaacagccatgatcttagggagcccttttggtgtataattattgaccaattttcggtctcttgatactgtggatgtgaaagaagctgttttagctggtccagtataagagttatcaccaaccaattcactgttttttaggtcaagttcattggagctaccgctctgggactctgtgtttattctttgacttattggctcccagtgcaaaatggcacatgtcaatttggaaacttgtgaacttccattgtagtttagattttataggatcttttcttcttttgcaatgttaacagaaattgatcaacagggatctttatgtatgcagtgatgaataatgaacttaaaatgctagcagttcatatcaaaactagttgcaggcattgtattgtaatattgttttactttatagtagcttgatgccagtataacttcttaccgtaaattattttttgtatagtttgttgtgtgtgtttttttggttggctttgccgggtgcatggtgcaacgacaacatcctagttataaatagaaagaatacagtctctttaggattaggcattgcagtcatgttgattgttccactggttccattattggccctctttattcgtaaaatatgaggatatggttttaggcttttagctatatagacttgcaatttacatgtcgactacaagattgcggttctctaaactcggaggaaaagtgatgcctggttaaaacattgtcccatatataatagtagagtttctgtttgtctttgatgcctgaggtgctatttttcttcaccttttcaatccatttctctgttttgtacctttaggaatgaatttggcattcttatggttcttgaaatggttaaatgaataatattttcatctaatgttctcaacaacatggatttctgttacttagttgtgcagtctgatcaaccatgaattactgaacctatcagttccagctagcaagtcttagtaatattagatccttcatgcttgttgattagatcaggctaatgaagaaaaaaagttctctgttctttttcattgaaaaagatggggtttctatgttttaactgtggttgttataggtttaaacaagcgcatctgatcatggctaggagctgagcagaagagaagtgaggacactgagttaaaacaaagtcatttttttttctggagatatttgtaacatgtactacttaggttgttgctctgtgtgtttgctcatgtcttcagaattgagcatgcaaagttgttccatgtaacttgcttggctcttgttttcattttgatcatgatccatgccaaaggaaaaattttgtacttataataaaaacacttcagtttttctttaggtgtgcaaaattactccatttgaaatcatgacagcatatggtattacatcttgtatccgtggcctgacttgctcttgtatttggtgatataggatatgctttgcctttatgactgagagctgcacctgaagaaaccaatgcattaggaattacaaacaagggctgtaataatgtgattcttgtaaactaattttgcctttgaagttcattgaattttgtaacgtgaatcatccacagatgtgcaactagcatt

SEQ ID NO: 4738 - DNA, 8224 bp, Sorghum bicolor
  misc_feature (6729)..(6828): n is a, c, g, or t
aacccgcctgcgaggcggagacaaccaacacactctagcggtctcacgatcgattccaggccctctgcccgagaccgtacgtagccaccatctccttccctagttccctccctattaattcgctcttcctctcggcttcgcagctgatccgaacacacacgcgtactacacggcagctagcgcgcgatggcgaaccacctccgtccgctcgcgctcctcctcgccgtcctcgcctgcgcgctgctgtgccgccgcgccgacgcgaccgcgttcgaggtcggcggcgacgacgggtgggtagtgccgccggccagcgatggcggcaggtacaaccagtgggcgtccaagaaccgcttcctcgttggcgacatcgtccgtaagagacagatccattcccattcccattcgtttgttcgttcgttctattggatcaatctggcaaacgccgccattaatccatctcgatcgccgccaactcatgcatggtccgtgccgcgtgcagacttcaagtacaaggaggactcggtgatggtggtgacggaggccgactacgacagctgcagcgcatcgcaccccatcttcttctccaacaacggcgacacggaggtggcgctggaccacccgggcaccatctatttcatcagcggcgagaccggccactgcgagcgcggccagaggatggtcgtcaaggtcgttggcccggacgcgcccccgccggcgcctcccagccctccggcccctaccggcgctgccgcaccagtcaccaccagcggcgcgctcgccggcgccatcgcagccgtggccatggcgttgccggtcatcgtgatcggcgtctgaatgaatgaattcactcgagaggcgattaggcgcggctgtctggctcgatcgagaacgtcgttcctgcgagtttgtgattaatggcgctttcctttgtttggtaggcttgcatgtttttcgtagatgaaatcagtggtgagtttgtgattgtgcggagcattttgtttgtggatttccccccgtctttcattcaaaaaatcgtattatttcgattgtatttcgccgcgtatacacacgatgaagggcctgttacagctcacaacaacagcttcctaaactattgtgagttttttttttaccaaatacttatttgtaaaacaattttatgagtgaagttgttgtttttttctttacaaagacacaagttaagatagagctggaaaagtagcttattgcaactctctttcttactaagttagtaaaattattttaaccatatatttttttcgaaacaactcagcttcatctagagagttagatcctgtttggtacagttcataatagcttcatgacctgttgtgagctgtttttttttgccaaacacttatttcgaaaacagcttcataggtgaagttgtttttcttctcttctcacaaaaactgagtgggatgaagttaaaaaaatagcttattgcagttctctccctcattcctctctctcatctatgcaaagagtagttagtgaagctattttatcaaacatttttttaaaatagcttagcttcatttagaaagctgctcataaaactattttttaaaaatagctttattagtgaagttaacagaaccttattaaacgatttttggaaaaatagctttccatgccaaacaaaaccgaagaatgacaaaaattatgcctttggcgtttcaacttttataaagcccacaccttctgcatggagtggaccggcccaaactactttgagtcggccgccgagtttgacaggccaaggccaagcgtcttgtgtgtgtggtttggggggcaattccgccgcgcagagcggcgcgcgcttcctctagcaacgcgctgccgcgcccatttcatttcatttctacagcaacccgaacaagtcgtcccccaaacccaaagcgagcgagagccgtggctactggccaaaccccccctcgccgcctcctcccgaaattcctccaaatccggagccaatggcgccgtcccctcccaccccggcggcacccaaaacaatcgccgacttcttcgcgcgccccgccaagcgcctccgggcgggcagtgccgctccggccgcctccctctcctcctccccttcctcgctctcgccggagcagcgccgccgcgccgacaccaacctggcgctcgctcgcgcgcgccgcaacctccgcctcgccgagtccaaagcgcaaggtacccacgctcccgtctccccctcctcctagggttctgtccgcgcgcacagcgcattcccatcttcccgtctgcttgtagccactgacggacgctgctctggttgtggcgatggatgggttccagcatcggggggcgcaccgaagctggaggagctcctcgtggaggagacgtgggcggaggcgctccacggggagctgcgcaagccatacgcgctcgagctctgccgcttcgtcgcccacgagcggctccacggcccgctgcccgtgtacccgccgccgcacctcgtgttccacgcgctcaacgccaccccgttcgaccgtgtgaaggctgtcatcatcggtcaggtatagcttgcctgctgctaccgttatgtcatctctggtgaccatcagctgtttgtgctgattctgtgatactagatatcagcacgctaaattgattagttttctctatgctagcatttatcatttgcggggaaatttgtaatggaatcgtgaatagatgcattgtttgtggtatctgtactgctactacactcaggggttggctaattgcctggatgatcattaggttgcagtaacgatctatttttctagaatatgagatttttcttttcctggtctactttcattagcattgtatcattctatgaaggatgttaagcaccacattctgacttttgtccaatgtaccagcccttcttattgcgcagtggtaatgtgtcacaattctggtactggtagtgtaacaccattttttatttgattatccgatatgtaaatggggctcagtttgtctgactgttacccaatgttggtgttgtctgactcgcaataaaccaaaacatggatagactaatctcacatgttgcaaatatataacttatttgcttctgttctgtcttttaccatgcaacaagatttgttagctcctggtaattgatttgagcatatgcttgtccatgtatgtagtttcttttcctgtcatgctgctagcctgattgtgctagaattattgtccaaatgctactatttattgcctcacccttctggtcagcttttattgggttacactttatagtctatgacacattgggtgttgaaaagacagtttttttctttgtactcaaatctacttgatatttcatcttgtttgcaataagtttgcattgcatttgtcatctacgacataaaccacttttcacctgttaagtttaaaatgcatctattgttcctcagtgctcatattgtagcacacctgcttttcaggatccataccatggccctggtcaggccatggggttgtctttctcagtaccggaggggataaaaataccttctagcctaggtaacatttttaaagagctcgaaaaagacctaggctgcactgtgccatcacatggaaatctggaaagatgggccgtgcaggtaaatattcaatcttgctacaaaagagaatatatgcaattatacattgatatatcatgaattattatgggacaacaatttaccaggagaaaaggtgttatactcttgcagtgagtattaaacacaaagaatatgctagtattaacttaatatcacgtatcttataatgtaccaggaaccgaatcaatttgtatgtttctagcccaagctttattgatatgggcattattgaattatttaattttctgattcggttattaatagctaagtgagctcactagaatgtgctaagaagatggtgagaaatcttaaataacagggtagcagttagccttataaaaacttagaaaataaagtagctgttgtggtcaagattgatttagtacttaaactgaggggtaaacaaaatgatggtgttgctattcgcctattcctttatctccttacatagttacctataaaaataaaattgtcacatgatgccatatttttcaatcatctttgcctcttgaaatatttattaatttggaaaaaaaaacttgtgtatgatgcagggtgttcttatgctcaatactgtcctaactggtatgattatttcctccattagaacaaaagatctccttcctccaattggttcttatcaaaatcaacaaccttaaccaaactgtgttactgtgagctgttttatttgactacatttatgttgtggttcttacttaaatgtgtctattctgttcttctagttgcaactctattcagtattatttgttcctgcagcttgattcaaattatatttctgcccatatgatcgagcctgggaaaattctgaatcatcttttattctttttatttagttcactcttgttgctcctaaatgtaggcttagatttgccttgtctctgcatggtgcttgctgcacaccgtggctgttctgtgtgggggatgaaacccccatcggtcgtccccacacttgggaacttaccactgggataaaggcttgtccccaaaaaaatttctgtctccactaagggaaccttacgacctgttgattttctgtggtctcaggttatttattttttctgtaaacttaatgcacactagcaacactcctctaaatgatccctgctgaaagcataacataatgtggtaacagccattattctatacagctatttatttccaatgacaattgtgttatgtgcacattccttgtaaagtccttttttagagttccatggaacatagccccttcatgtgcattagcagcaggaccagagtacagcatcgatcaggttcatacattgactacattcagtggcggagatcacatcaaaatagaagaagaagaagggggggggggggggggggattatacctgggcaacaatattgagatcttccgtaaaattgccgaaaatggatcatcactcactaggattatggatcagactggcgatttgagactggggaacagggcaggccttgagctcccagtcccgcatgttttgatggcgctgtcgatgctggcacgcagtttcggagtccagagggcagatgagacaacaatcgggccggtggagcctgcaccgtgaagtcgcatgggtgtccttgcgtcgagtgatggctgtaaggcagtggggcgacgccgtgatgggcagttgcgtgtggtgggtgttgctgtagcagtagttcctcaatcaaaagagcaagacactagcgcagtatgcaatatttggaccttcagactgaagttttacatgggccaccaatcaaatcggtaataaaaactgttctgagccaaggggggcccacttttgctgaccttgagctccgccactccaaacatttgctgacctaagtgaaagaacaactaccattctggctcacatccacatgcagaacagacccttttagtaataacatcaaactgcatgcatttctgcatgagattggcacacaactcggagtgtaccattcccattgtctgttcttcatcagagatggccatcttcttccccagagactggggctctctatagaatgtgttttctgatcggcttatcgtttctaatcggtctggcaccgatcaggacgatcaggacgattaatcgacgatcaggatgattaatcgactcctgatcggtctaatcgtccagcataaagcaggactatataagtatatatcatatatgtatggtatatataccatatactatatatttatatagtacacatcaagcatcaagactatatttctagttagttggctacttacctgtgagatttgactctatatatttatatatggacatcaagcatcaaggtcaagagggaggaagaagcaggcagcagggaagagtgaggaggaagcaagcagtagcgggctacttggattggagctggaatggggaggaagaagcaggcaacagggaaagcaggcagcaaggaagagggaggaggaagcagcaagcaagcaacaagcagcacgagcaggagcagcagctcagtagctgacggctggagtgggagtgaggactgagaagagagtgagggtgaagttataagggaaaccctaatggccctgacccaattaaatatatcccgggccaaaagcagaccatctgccagtcaactctgatcggtcaggaggcctgatcggacgattaatcgtgattaatcgacgattaatcggacgatcaggtttctgatcgctctaatcgaatcggaggccctaatcgagtgctaccgaccgataaggacgattaatcgcgattaatcggacgatcagaaaacactggaatggactgacaggttgtgagtcaggaaacaccagccatcagtgagagcttctccagccttgccactaaatcttccagtttgattccttgaaaaattgtaatcttcagccacgttgaattaacaatcaagtacgtatgacaacattagtgcatgtttagagtaacccaagttgaagagaaaagttgccaatatacaatgaacacaccaatataccatgtctgaagccttatgttaccaaaagaacattgagctgcgagaatgatgagtggtcaaaatgcaatttnnnnnnnnnnnnnnnnnnnnnnnnnnnnnnnnnnnnnnnnnnnnnnnnnnnnnnnnnnnnnnnnnnnnnnnnnnnnnnnnnnnnnnnnnnnnnnnnnnnnttctgctcaatctaagacaaggtagaggctttattttacttctggaaaacttgagctcaagttccagctcagagcatgaccatatgtttttttcctttcaaatcgataattatgtcattcacagggtgcatttttgtgctattttgcagattgattgatgaaacaaaacatcacattttgaaatctgctcatccatcaggcctgtctgcaaacaggggtttctttggatgcaggtttgtttcttctctctgaataaacttcctcaaatactgttctcctgactagaaaagaactcatcctctcccattcacccccaaagaaaacaaataaaacagagaaacatgtatatatgatgacactttgatagcaaaaatgcaaaattaatggaggctcctttcatgtatagttgcattgattgttttgttggccacaatagtacttatttgattctaaaccgtgtggattcccacagacggctggtgcctctgcttctgctgaggtgcagtgggccagtgggtttacgatgatttatcctatataaaaaaaactccaccagcaccacatgtcggtccattgcttttggccgtcatgtcctgtctagatttttgccaacttgatgttacttttgccttttcacttactagcgctaatggtttctaccgtgtgtgcattagctgagtgagacctgatacatggaacgtcgatacgatctcagcatctcatatcctgtttatggggggccaatctaaataaatgaagcgctactagcttttgctgtgattatccttgaacctttcctcacgtgctactgtggtttcatgattaccaggcacttttccaaaacaaaccagatccttgagaagctggggctatctgccatcgattggcagctctaaaaattccaagacaacatgtgattcctctgtttgagcttgacaaccaccgttgcagggagtggagcagaagcacatgcctcaagggccatcctattcggtttgtggcgacattaaattatatacatggccgatttggatatgagtgcttaactctactgacgctttgtatagcccttcttttgtatcgtgtcttatcctgctttatttactttggcaccaaatttttctggccattgcggttgtcgtaagtacgtgcacctactttgtttggcagtaggacacgcccatttgggctgccttgttagatctgagcatctgacgtactagagcttaacaaccaccctgcccgtacatgtttttaaccaccgtatgtgcataaagtcagatcgtccttcctcatttgggatcactttgtctagcaactcatactcctgaagatctgctcgtagacttggcaccaactcttggatcctacgaaatctgagtgcagcggaaaaggg

SEQ ID NO: 4739 - DNA, 4499 bp, Sorghum bicolor
aaaccagccaacacaacagaagttttgggggcagacatatgaaagcaacataaatcataattttaacttacaagcccaataaggttttcaaggcacattatgactgaacttttagttgctgcagagcaaacagcaagcttgataccctacaccattgtataaaggataaaaatcacttcagagtatcaaatagctatattgttgagaactcactgaggtaatgtgacgaagcattaatttttttacaaaaacactagtatggagaaaacgaagatgttgctttgaaaaataaataaataaaagaaagatactccaataagttatattaccgcattctttacttcatccatcaaccgcaacacaccaggtctaggcttcacctaacaatagagagactcaaatcagggtaagacaaaaaagagatgacttgttatgcatattaattttaattatgacgtaagtttatgaaataatgaaagcattgaacttacagttccagattttattatttctttgtatctctctgttttccaatcctgcaaattaagtgttacaactgtaaaagtcttgaaagaaggtaaaatggtgtaagctgtaataacgtatttcaagaatgcacaaaacacttgcaccctgatagaggtcagagaaggagagaacacaaccaaagttcatagctgagattccagttttttttggataaacaacatgcaattgcaaaagtataattggatgacagattgataaaagaaattagtatttgtgtagaacacataactactgaagataactttaaactagtgaatggctcaaagtatttgcaatcctatcccgcaatccacagaaaagatagtaatgaacaatccaacatgttgtaaaaccaaagatataaaaggcagacctgaattatgtcaaccaacttctccttgtcggtgtcagtcgaaggtggtgtctcaaagagctctgaagaaggccacccattttctccaaagtacctgtcaaatcccaagccccaaccaattcagaaccaatcgtcacaaaacaaaaagattcaagtactaataagacatcatatatatgaaattacgtgctaacatgcaacaatcagtggccgaggggggggtgggggggggggagcacccccaacctcttggatgtccactatataacctccttaattagctaataaataataattagtactaattagtgcttttatttgtttgccctctcttctttgctcacaccaatccgatcaacaattgcattgcacaacgcttgtaaacttcttacatgtccattgcagaaacgtcaatgtgccgtgtgatcatcccagagttctaagttaccaacacgtttacgatcaaagcttgcatttgcacaaattaaaccgcagatatgatttggcaattggcatcccactaacacataagcatatgaacatccccaatgcatttttcgcgcaaagcaccaagcacaaggcacatgatcatcacaagcaattaaccagtaggtcaagcaattccgtaacgcaaacttgcgcacgtaccaccgcatcttgggcttccctccgccgatgcggttctgtagttcgtcgtagaaagcctcgtcccagtacagcgggtcggcggaggccggcgggcagcgcaccccaaagttcgcgaacgcgtcgttgtaggcctggcgatggaggttctctgactccagtatgacgccgtcgcaatcaaagatgagtgcctccagagacgccgaggcggagaccatgacgaaccggggcgcgcgcctccgccgcgcgatggggacgcttgagggtgatcggttgctgaagaaggcatggcggcgagcgccggcgcgggcggcggtggggagggcgagggaagtggaaggcatcgtagtcggaggcatcgggaaggaggaagggaggatggagcggagtggacagtggagtaggcactaggcgccaacggttgcttatctagctggaatataaccatcctcccacagaaaagcataaagctccctcatccagagaccagaggccacgcggcgatggcgatggcggtggcgcgggtgactagcctcggcctcgcctgcgctccccgacaggcgcagcatcgccgccgccgccatagccttcccccgccgcgcgctttgggtgcggtggaggtgcgggtctgcacgaaccgcacatgcgcgcggcagggcgggcgcgacgtcctggctgcgctcgtgggcctcgcgccgccgccggtcgacgtggcctcctgcggttgcctcgggcgctgcggcgctgggcccaacgtcgcggcgtccgtcgctgggagcgccgcggtgttccgccacgtgggcacggcggcgcgcggcgcgcagctactggaacacctcctcggccccgcggagttcgacgcggccctagggctcaccgcgctggccacgagggagaaggcggaggctgccctcgagaagggaaacgcggatgaagcggaagcccttctgaccgaggtctggactggacacatgcgccactctgcgattgtgcgtgctccctcaggcctcagttgctggattcgagcttgatgattacacttgtatgtttgcgtaggttattgggttcaatgcttgtggcggtctgcatttggtgtacaggagcaggtttgttctgttgcttggagttcagtgtgcgaatgggtgtctagtgtaattgtgtagttcgtataagttcaggatgaaacatcatgttgaaattatgcaggtctaaggcgagattggcaatgggggatatctctggtgcacttgaggacgctgaggaagcaataagaatagctcccagatttcctcaggtatttgctctacttagaacctccaaagttcccgagtgtagccaaccatattcatgttcttgaatccatgggagtatattagtataaggttgaaaaatatcagtaattgatgtctttctatctatgttttgattgcctcgattatgaattggctttgcctacacagtaaatagtaacttcgtgataggtgaagtgaggaaggcttggtacttgtaataatcaacaaaactactgtgcttgtagcatgctttttttccttaatgcaaagggcgtaagtggcactgggtgatagatgctcacaatttatttgtaactaacacatcattcacaatctgaaataactttgactagtataaattggagtagcttctcgagacagtgttatttttataaattgattcgatacattaatcaaaatgcaatttcatggtatgactataaatcaataacatttccatttgaggctttgacagacaacagtcgttggtcctcactgcatccttacttagttaggcatatcagacatcacttttctctagactgctgctgttattattgttgttgttattaagtatgtcatggttttgcacctcttattgaccatggctttgcaggctcacttattgcgaggcgacgcactttttgcaatgggtgaatattctgttgcggaagatgcctatgcacatgccttggatattgatccatctattcgccggtccaagtctttcagggttagcattagagatttgccttatggacacttcaatctcctattccagctatagctacataatttagctctgaaatctcaataactcatgcattctgttgcattcccttgttcaggcccgtgtggaaaggctacgagagaagcttgttggtgccaataatccgtagttcattttgaagcttcctttccatcagaagttccatccacaagtaatgtagatatgctcttggtaggtctgaactgctcgatgcaatatctggaagtagaatacatagatagctgcatcccttttggttagcagtgtcctctttaattttgttgtcaagctgatatttgcaataaaagggatgatgagattaatatgttggcaaattgcaatgatttccattttggggattttttaatataagatgttgatgattgaacaggtgaaggtagtaatgctcatgcactttgcaagccactggtaaggaattgattgttgccatccaacagttcatatgaatgtagggctttgttgtttttcccacctgaactacactatgatctagaaacttagaatagtctaatggattttgttgtatatttgtgcctgacaacataagctactgatttgcaaaccatgctagtatgtattgagatttgagagctattcacatttcagaaaattgtttggttgcactctctgttgatatgatcttggcattctcatttgattagcatttatttatttatttgcattgataaatgggaaatttggaatacctctaaggatttaatgttaagcatgtattaaaaaacctgaccccactccctattcattcattgcaccatcatatttgattaatgggaaaacaatatacaggatacctaacaacctcttggagttcatacacattctcttggttttcttttttcagactcaaatc

SEQ ID NO: 4740 - DNA, 3251 bp, Sorghum bicolor
acatttgtaacactgatccatttggtcaattggagtcttcctttttgttttttcatttgctaacaaagtaatcaattggcagcgtcttgagccatatgcaacgggtacttcaacaaaactaaatggtcattctgaattgaagactgtgtctagcggcactttgcctttacaaaatgatagtggctcaagggctaacatagggcgatcatcaaccttgcaaacttcagagaataacctaaaagcttcttcaggaagattgtcggcacaaaactcagattctgcacccaaagagactaaattggcaccctgtatgttcctgctcatctctatctactcatttctacatttaatggttgaagcatttcatatgccttatctgtcttctatctgttcttaatatactgaagcaagcgggttggtcccaagcacaccacaaagggctggagttagctccaataatagatctgttggaaattcagcttttcaatctggtggtaccaccttaaagagaagttcattgcggagtaacagtgcatctaatgtccacaatttcagtaaagctgatgtagtgccagtcattgttcccagaactagctcaggaggggagttggctactgattctagaagtgatgctgctgatgtggcacctgttcttcctaaggtaaccagaagggttgatcctgctactgattctagaaaagaaagtaatgatgtggatcttgttattcctaaagcaagctcaagagtggaaatagcctctgattcagcacccgtttctactttcaagtcaggcagaaggttggaggctgcccctgattcaaaaaaagaaagtgctgatacaacacctgttgttcccaatcctagggcaaatgcaagaatggagatggcctctgattctgcgcctgctctttcaaaggcaaacagaaagctagattctggtactgattcaaagaaagaaagtgttgatgcagtacctgccattgtacccagagcaaattctagaatggaaatgaattctgattctaggagagaaccctctgctggaagagtatcaccattcagaatccagtcaagatatgctgagctacggaagctaacccatgccaaaattgatgcaaacaaagttgacagtggaagtaaaattactgaaacagatgacttcaattgccaaatatttcttccccgtagaaatggtgtttttcaaataagttctgaagaatcccgcgaagatgtaaagtgtggtccagctgacaggatgggattttcaaattcgtcagaaccaaatgcaagtgtccgcagtgagaattgtatgatctgtactcatttattttcatgtgctgctaccactttgattcacatattgtttcacaattgttagtggtgatcgatttcctttataatgtgtttaatgtactaacaaatccaactactactattgcttgctatttatgttgtgctcataatgtgctatccatgtttgcattgcatgtctatgttcctacatgtttgtagtgatttggttgtgcattcatatgcacatagttgtaatgcttttatattaattatatctccaccaaaaatatacatatcatacagttatgtgttaaggtactcaccatagtaagttctaaatgctttggaattgtggatttgaatccaagagcagttattcttgcactatctagtcaaatttccagtttctttcattgaatcaagcattaatgagcaaacaatttacttagtaaagaaaagaattagcacatttgtttaaggtgctcaatactttgtaggtatctcatagttttcatatgaatttgatttactaatatgttgtttactcagcattatctggatgaagcattgtttctcaaagtttacattctgaatcgtgtgagaaacaccaaacatgtctgttcttttgttgagttattagctatccttgtgtttttttgacaaaatttactttttgggtaatcactccatttggtcctgttttacagatgtttctagaatgcgcaaaccaagagataactgctatattgaagtttcaagagcaggtatggtttatgctactacgtgtatctttttatggacaatgctactatgttgttattccagtaatctgttcatgaatctgaataaattatcatgtagggagagcaaggtcaaatgtctctaattgggaagggagggatcagtcccctagtcacgaagaaccgacaacaagcagttcttcgctggctcctacaggccgtccatattcatctgtatgtctgagataagccataaaccttttatacattctgttacttcatttttttcttttaattcttgaaggttgtaaagatgtggggtagttaagtttgaagatatttgtgcttgctttattatctgatccacttatcttggtggctgctgctgtcccattgattcatgtgcatgcatcatggaactaagataaagtatgactcaaccattccttcaatcatactcttgccccaggctcagcctagacctatcgctaggtcccatttgaaacacagttgaattccaacaattcctgtgaaattatcgtggcacttatgcttcactagcttgtgcttactatactgaagacttgcagcccttaaactttagtttatacctggaattgcatgtctgcccatatatgctttttacactgagatttatatgaaacctttcctcttctgcagagaggaagcaaacaagcttctgaaactccaatcatagttagtgatgaagatgttctatcacttctcatggaacaacatgacttatttctaagctcaacaaagtctcggctgacaaaattgcaggtcagtgcagtgcttgacaatttggttgtattggtcgtgtaatactgctgaagaaatagcaattttttaatttctgttctctccaccaattaatcagatggtataaatgctccaggttaatgaaagaaaggagtgtctatatgtaccttatgttgtggtttctaagcttataattcggatagaagataggcttttaaaccgttttgctccagttatcatagactttgtaaatcactgttttgctcagtggagtaaagcacctgtttggatagaagataggattttaaactacagttgctcaaaggctgctcctttttgttgacatgcagattattcatcaaatgtgggaaagaaatgacatcaggggtgtgctctccgcgatggagaggatgggtgatcatgctgtcagtactt

SEQ ID NO: 4741 - DNA, 5794 bp, Sorghum bicolor
cctaggtaaaatgtcaaatatgctcagtgctcaccactgaataagacgagacgaggaggtgctacagtctgcaaagggatgtccgctactctgcctttccagaggtgagaagcggctgaatccctagaacgtcgagccgggcagagcggggagcggggcacggcgggcgaccgggtcccggagcagaagacggggcacagcagcacggcgcacagagagcggaggatagtgcgcggtgacggcgcagagcgaggcgaggcgagccgctagtacgaagccagcctgccagagccacggcgtcgcggtcgcgggtgttgaatctccgtctcacgcctggggagggcagcggtgggactggggagggcggtggcagcgctcgcagctggggaggacggcggcgacgcaaccgtcgtcgcggctggggaggggagcggcggcgcgagcgacgggcgactggggagactggagagcgcgggccgcgggcggcaacggggaaggggaaaccaaaacttccggtgcgaccggtcggcaacctgccatccgccgactacagaagcgagcagcccacgaggagcgtgcggcggcccacgcggaggtagcttcgagcggcggcccacgcgagggagcttcgagcgcgtagccgtccacgctgagcacggagcgctctcttccagttccaggtactgcgtttttccttttttttctatttctttttccctttcctttttattttatttttgtttatatttgtatttttacttactgatttttttatgatttttatttttgtgtttactctaatttttttcaccgatgtatttcacaattaacgtctcatatataaggctatgaacttagacatttgcgtcgaaatctccatgattcatgtatgtttcctatgtactgatcacctaaggccatgtctggattgtttgttaaagtttactgtccgttatattaaatgtttggacatagacataaagtattaaatatagattatttatgaaacttagaaagtaatttgtgaaataaatctttttaacctaattaatttataattggaaattgattgtcaaataaaatgaaacaactcagccaacagcccgtaactcaaaactctacatcagatagtacggtctcgtacaaggttaaaaaaaaagacatacctctaaaaaacatctcaatcgccactattctccaagctacccactcgctagcgagaaaatctcgggatgataaggtttgggggcaagggcatggccaacgcaaaccaatagaagtagtgatttcaatctaaagttttacgtcatgtcgacaagaagtgttgaggcgttctaagggcagctgcaatacagacagacaatactagtagccttacttcttgtcaagtgaagcggccgtaacttttgcagggagctgtgatggaccaccaaaccactatttaaacctacgtggacaatgcaatttggaacttgtcaagtgatgatttctcaaaaacaaagccgtacacgcacactagattgagaacgaaaatctcgcatggacggtgctgactcgatcatttctgttcactcgggtcactgcgtcaggtctttcccatctagtctagtacacatcattaattgcccatgttaacgtcaagccgtgggccgtggcaggaagaatctccgtccacgtctagtaggaacgaaacacacgatcaaaccaaaacgaaacaaaagtatacaagcagaaccgcagaagccatacgtgacggcgaggcgtcgactacaccagaccaagcgtagcaacgtcgtttattacacccgtccccgtcggccgtcggaaactccccacccccgcattttccccgcgttttgtcaaggtcaacgtcacgcctcgcccgccatcccttcccacccccactctctctccccctcctctgcagtctgccgccgcggggctccactcatccaccgcttctacaagatcccaccaccccacgtcaaaccaaacccggccgcggagaaagcagcttctagctacccgcccggtctccgcttctcccgcacgcgcaggctgctgctgagtgctgcctccatcctgccaccgccgcttgcctgcttcgttcgcggaacaaaaaaaaaagtgagccggaccgaccgacgacccagccgagcccacgagagggaggcgctgcttgggctgtcggagccgcagcaggtcttgctccggccagccacggcggcatcggcatcggcatggcggggcggatggtgcggagctgcgtgcagacggcgctcaaggcggccaactccgtcgtggggcttgccggcatggccgtcatcctctacgcgctctggatgctccgcgcctggtacagggaggtcgccgaccaccacctccaccaacgcctcccggtcccctggtcagcaaccgcttctccctcccctctctcatcctcctcctgcttactagcagatctcggcctccgtttctgtttccgctcgggcgcgcacgctataggagccatcaaggtcctagatttgcagctgttcttgcccacaacttcgctgttcttgatttcttctcccaaaccgtccttcgcttcgagaaatgcgtttgctttcaggccgatttcgcagcaactgtatttaccatactgttccatcggaccttttttcattagaattagacgtagttccgcgaccaatcgacgatgccgtgcggaaatgagagattacaagcgctggcgtacaacaccaagctacccagccgaaagcgctttttaattctcctgtggcagttaaaggctactcgtttcggatggggtgatgggcacggcctcgtgttatcatgccactatcgcagcagatttggctacagttagtgacgcatgacaaggaagaaaccactgccctatccttctagtggacgctagtgctattctatgggcatggtggcacgatgatcggcttccgtgttgctgttttggacttgtgctttagaggagattttaggtggcggctgcaatgtggcgtcagatcgggacgcatgatgtgatgcaatggacggcctaactcaaaagtagatccgcagttagttgattggtggggcaacagcactgatgaagaatatacaaagaatgacgatgctgatgttaaacaaccaaatagtgagcatgtttagccatcgctttcctcatcctaattcctagcaactgtagtagtattaatcaaatgactttcctcatcctgacaactgtagtattaatattattcaaatgggccaagcgtccatgcttttgctgccattaccaatctaaaatgttagtgcggcgtggaacagatactttaagaataagtagttagatatgacttttgagcaatatttgagcaccatgtcgaaaaattattgcctttcaatattttagagtatatacagtggaattggttgttttactgaggaaaaaatatattaccggtcatgcaggttcatctacgcttttcttggcctggggatctttttgtgcctgttgacttgctctgggcatattgccgctgaaactgcaaatggtcactgcctctcttgtgtatcctttagttggtagatacatggagttagatgttgttgcatataccagcttccattgcttgcttacttactgattacctgtggtgaaatgctagatacatggagttacattacatgttatctgatataccagctacccttgcttgcgttttgcttgttgactacctatagtgaatcaatggttagaagctcctgctggtttatccaaggttttcagttaggtgcaaaaactacagttttttctgggctatataattatctgtacatgagatgccaaaaagaactgaattgagagtgagagtgcaggcctcaaattgcagttacattctttgggttctgtaatgtttagtgcagtgcgacctggcggtgatattgggtctctttttccttaactttacatgtagtacatgatcatcgtatttgtgcttattatactggaaggcacaatcactatggatgtatgtctgaatagcaactgggaagaggtaaggagctcagctgtgaatctgatactttatgattttttccttatatctgctactttatgtcctgacagagtatttgatttttttcaaaaccttcaggatttcccccctgatccatcaggcaagtttgaggatttcaaggactttgtgaaatcaaattttgagatatgtgaatgggtaggcctctcagtggtggctgctcaggttagattctgctgcacctccactgcagtaaaaggcaattgttcattattgtagaattctaccttgcatatgactagaaaatgttgtacaagttcttgtgaatggagttagaagacacttgacactagtatgtgtagcttagtttggtggggtttggacattctgcctttgaagaatgcttagaaacaaattgcctctagcgtatggtttcttaagaatgtatgagaaacaaccaaacatgactggtacaatgatcatacctcatttgtttaaaattgttaataatcaattttctaaatgaaatcaggtgctggcatcctgtttggggggattcaagtttaacttgggtagctgcatcatcaaaattgtactttctgaagaaaaattaaacttttgagtgtgagtgaccctctattaacatattcagtttgtcaggtgttatcaattattctggggatggtactcaggacccttgggcctgaacgtgagactgactatgacagtgatgatgacacaattgtgcctgcaaggctgcctctcctgagaaatcaggcccaacatggtttagactatgctgaacctaatacatctcgtaggagtgattcatggaaattgcggattttagacaaggtaagatgtttcccaacagggacttccgtttgcagcctattacattctaaatgtgttcaccattaataaagcctcgcgacctttaatttcaggtcaacaactaagatcttataatgatctcatacaacagaccatttgggaaagactttcgctcctagggtttcagaaggatgataagattataccctttttttcttcttgtggagagatgattagcagaagcgatagagtagttcttagttctgtctacttttgaatgccattcaacatgcacagatatttgagtagcatgtgactgacccttataaacccacaatgtatgggaaggatgttgtaccataatgtttcataaagagatgagggcattattggtgccttccctgaccaaagtcagaaatgtttaatctttcccacttgtccatcagctgcatcatccatgtatttttatggggcccctatttttatctgcttgtctgctgtcagatttcctacttgcatcacctgtcaatgccgaaggatgaaaactgaaataggagtatttgaaatatgacctgtgaccgtgtgagtacccttgttgagttaaaaaaaaatgcaaaatggacaccgtaccatttttatttgtatttgacaaatattgtccaatcgtggactaactaggcttaaaaaatttgtttcgcaaattacagataaactgtgtaattagttattttttttatttatatttagtattttatgcatgtgccgcaagattcgatgtgattgagaatttgaaaaattttgtaattttttttgcgaattaaacaaggccgtactccgtaatccgtattgtacatatggtacggactgcataactgtcatccttgtttggttgtgatggtacggcaagtacggtgcgcctgcta

SEQ ID NO: 4742 - DNA, 7664 bp, Sorghum bicolor
gaacccttcattttccgatgcccatgaatagatgagagcggatgaagctccaattacatgtcattcgtgcctcaatcgctctccgatgcgggaacgttgtgctaaagctccaaaatcatggcaagctcgaaaaccaaacgacaagcatcagggtaaaaaagatgattgaggtgggtgccagtacttccttcgcctcgaaataattgcacaacttgtgtttttaacgagtcaatttttttaaaaaaaaaatcaacaagatttatatgaaaatctatttcactactaatgggacgatgtttatttgtagacagagagagagagagtgcatgatcagcaaccaccacgttaaatccgggccaaatagcacgaacagcaaggcgatgagagtactactaacgtgtggtttatggtgggggaggcagctcatgaactcaacgcaaagacttgagcgagcgagcgaggctgtttaatgcatgggaagccagcacagcgaggcctccgcttgcgttgcatcgaattccactttttaagttccgaaaactgaaaagttttcggaactgtagcactttcgtttttatttgacaaatattgtccaatcatagactaactagagtcaaaagattcgtctcgtgatttacagtcaaactgtgtgattagtttttgttttcgtctatatttaatgcttcatgcatgtgccgcaagattcgatgtgacagggaatcttgaaaactttttggatttcggggtgaactaaaccaggcctaataatctggttgaaggcgcgcatccgccaccccaactgccacaccggaggacagcttcctatattcactcacccacccggcggccggccggcgcacgtacgcgtccaccggacccaccccccctcctcccttctccgcgcccacctgtgtgcccgtgcgggccccacctccgcgtgcctgtgtcagtggggagcgctgtacttgcagccagggcggactggcggagggagccacccgcgaatcttcttgcggcgtggccgctccatttgtttaagcagcaagcagcaggagaagcagcgagtcatgggacgggactactacaactacaactggagaagggcagaaggcaaaaccaagtggtttatcgttcctcaagatcccctcctttaattttggctgtcaatttgtcctaatctccctcccgtcatcttccccactgccgattcttccactctgccgcagcaaattgcttctgctgcgtccttttcctcccactctccctctcccactacattggtgttgttgatcctggaagccgcagctccacaagctcccaaaagcagtctcccagcttcttgctcctccattttgtatgtccgttgctccatctctcctctgaacctgaacccgcgttagctacctctcagtcctacccgccattgtttgcaggagagccagcagaggagaggagagagagagagagctcgcgacaaggttttgcctgcaccgcatcgccctctccccgcaagctccaaaagccagtgaggggggactaaatatagcaaagggagcccatcatcatcgtcgtcatcatacactaatgcaacgggagaatcggaggcaggagatacacgtctgtggctctgtgctcctcattcctactccaagatcccccattttccttctcgtttccggcgattcttcttcttcctcctgactgatgtcaatggcgatggtgtgacgccgagggaccccgagcgagcccaagaaagaaactcctccacatttccacaccgtctcggtctggtcttcgtcttcgttttcatccctgagctgagctttcccccaagcgccaccaccacctccgtcctcccatggcactggtgccaatgtgatacgcggaggtgcggttggtcggtcctgaggagtgaggagtagtacggagagggtgggagaagagaaggagagcctgcggcagcaccggctttggttttgcgcgtccaggcgggaggggagatggcgggcggcgagggctcggccgcggtcgcggaggagggggagatgcggtcgctggcgctcacgccgacgtggtccgtcgccaccgtgctcaccctcctcgtcgccggctcgctcctcatcgagcgctccatccaccgcctcagcaatgtgagtgcatgcccaatcagcacaagaatgcactctcccatgattaccttacctgcttatcatgctttctactagtacttttcttttgtccatgtccattgcgtgtctgtctgtttatgaccatttttttctcggatttaacagttggtttgtgatttaagagttgctgtcagatatcataagatcagttgttgctttattaagatcatgtttggagaaattgtttgctttattagcacaaacatgcactctcggctctattcaaactccatctgctgttacctttctcattgacttcgttaggtgtcgcactgtcagtatcatcagtcttttttttccgcaaccaatgatagtcctgtactttttcagtggctgaagaaaacccaccggaatccactgtacaaagcaatggagaagatgaaagaaggtctccataattccacatatgcattctttgttgtattttttcataggttgtttcgtttgttgggctgtcacgaaagaaggcgtgaactaggaaggtttaactaccattttgctgcagaaatgatgttgcttggattcatatctttgcttctggctgcaacttcaagaatcatctctggggtctgcatcgattccaagtactacaacagcagattctccccatgcaccaaagaagaggttgaagaatcgataaatgcagagcatgccattgctcacgcacgcaagcatctgctggaggtcatcctgcagcattcactgaggagaaatctaaaaactagttaccataaccatcaaggctgccgtgaggtgtgtaaatgttttagagtttggcagaactgtctcgaagagttaatgcatagccaatcatcctacgaaaacttatattagttttgcaattttgcttcttttggtattcttataaagtccatttgatgtgcaggggtacgagtcatttgtttcgcatgaaggtttggagcagctgcaccggtttatatttgtaatggctgtgactcatgtggcatatagctgcttgacaatgttactagcaatactcaaggttttaaccctttatcacatgaatagtatttctatatctctgtttttaatttgtagagttccattttgagcacaaatttggactcagtttcgaccaaacgccttatccctgaatttttatagaaagcaaacgccaaattaacccctttcattgaagcttgtatgttttcatctatatatatcaaacagtgtgtcagtctattgactgcaagttgtaggatctgtgatgtaacattagcattttgaatatgctatgcacatgaacaaacagaacatttacttgctttctgttgtttctcacttctcaggttggttgtacacacatatattatgattgacattgatgtcacattgatcctaatctttgcatgctgttagatccataaatggagaaaatgggaggatgaagcattcagggataatcatgaatcattttctcgtaagtgcatccttttgaccctccagaataaactacagaagttaaattggaaattcatttgatgtgaatgtgatgattcgaaacattggtgaaaggcttttgagaataaggcatttcttaaatagtagttcagaataaggaaatcagtaatcagtttgtactgttctcgtctgatactctgaataacacattatgggcaagtgtgtattaaaacattggtcagggagactttagtatattttttaattcttgctttagaagttcatcttagtgaatcttgcagggtgactgatatcttttcttgaaaattgatctgcaataattttaatcttgttttcctaatagaaatgttttaataacctaggggtgcatctgattcaacaaagcttctcttcccttacttctgtagttggagcattttcctgtctcattggtgatactaaccatattgtcatcaaactcagtctgattactcttcttctaatttgcaattgacagagatcgcatatgagtcagcaactagaaggcaaccagcacttaccaaatcctattcattccgcttttggagccaaaataatgtggtcatgtggcttgtacgttgaggcaaataaactttatagctcatccgaggcacaatgttctgcttctatgcttagggtcaagaaatgttactattattatttcactgtcgcagttgcacttacgatttggatgctaccatgcaggtttgctttgttgcacaatttggtcagtctgttgttcgagcagactaccttatcctccgcaagggttttataatggtatgccagttccttgctcttcaattctgagtagaaatctcctatacttggccttcagtatgtttattcgtatagatggtgttgggccttacctgatactctttgtattgatttactgagtattgctattttgtaaacccattagagagacacactatagttccatcgatactgctgtgtactaggtgtaaacccttgttgtcatgtactcatgtttgacttactgatgattgcagacccacaatcttccgccaacatatgatttccacaattacatgatacgctcaatggaagaggagtttgagaagattgttggagtgaggttagtgtaatagtaatccctgtttagtgtctgccgttggctgcatatgcatttctagttttttttttcgtattggagaaatatgatcagctaataacttactccttttgtgcagtggactgttgtggggcttcgttgtttgttttatgttatttaatgtagacggtaaacttcgaacccactttccttcctttttgatatttttgtttcctcactgtccaacgtttgtaaatggtgattttgttttaggatcgaacctgtacttttggatagcaattcttcctgtaactgtaagttgtagcctgtttctccaacattctacagcctagatttctctgaaaaaaaaaattggccttaactgcaatgcgaatgttgtgtagcttgttcttctggtgggtgcaaagctgcagcatgtcatcgcaactctaacagcagagggtgcaaagatgagcacctatgggccaaggatacagccaagggatgatctcttttggttcaagaaaccagagtttctcctttggttaatacacttcgttctctttcaggtacctatatatactgctaggtaatttggaaggaagcacttaagagattaacttaagcttactcgtgctccaatttgataattatgcagaatgcctttgagttggcttcgttcttctggttctgggtatcatttctgtccagtctatgtgtttcaaataaattgtgtgaacatagtgagagcctttccgttcatttcagaagttatatagtaacacatatattgtttggttttgctgcagtggcaatttggttatgattcatgcttcatcaaaaaccaccttttggtatattgccgccttatactagggtatgcatttcagaacccccagtttctactaatacttattgaaatcatgaagttgagaaaaatagtatcacatctatatatgttatatacttatatgtatgataaattccaccaatacaaaatgtcaggtttgctggacagttcctatgcagttacagtacattgcctgtttatgcgctggtcactcaggtaacacacttatatgtatatgccaaaattaaggttcacattagatgacttttctgatttattcatatcaactagtcttagttttgaaatgttagaaatgcatcagtacaagaagaattgattatatgcatcttgctaaatgatatgcttgcacgccgacagatggggtccaaatacaaggcggcgctgatcccgcggaggatcagagagaccatacatgggtgggggaaggcgacgaggaagaagcgtcgtcgccgccgcggcgacgactcgacggcccgcacggagacgagcacggtgtgctcgctcacggacgacgacgaggacgacttcgacgaccaccaccacgggccgtcggacgagaccccgaggcccggggcccggggccgcccgccgtacctgaagatcgagatgcttcgtcagtcgggcagcggccacgacggccccaggcccggcaccccatgcttccaccccgcgcccatgccgacgccgggcggcggccgcggcagcgggcacgccatgctcctgcagcaggcctccgtctccgcgccgtcgtcgccgtcgtaccgcggaggcaacgtgaccaggtcggcgtccatgcccgggttcgccgcgctgaggatgggctccggcacgccgacgcgcatgagccatgaggagcccacgtgatgcgcgctacccgtgcacgccatggatggcttgctagtgcagactgaagactgagctgctagtgtagcactgaatttggaggtagatcaccatatagacatgcatatatatacacttatatacgaaaaaatttggacgagaaatggcttctccgatccgtgatccgtgtcgcacacgagcaccatccatggcgaacgaaccacccaaacgaggagcaacggcagcgggtgaacggacgccgcaggtgtacaacaactcccacgcgctggccgcaaccgaacgtgcacccgccgccaccgccaaccaaccatccggaacctacaaatatacactcggaagatccggaaccatcgcgttctccattcccgtcccaccccagggcagggctcgttttcattctccacagctccgtcgcgacgcgagacgaggcgcgcatgcgcacggtgccggcgacgtctccaccgtcgccatgcagggcggcgccgaggaggctgctgggcgttgcgcagccgcagccgtcgcccgtggctctggctgtggtgccggctgctgctgctgctgccgggaagcgcaagccggggcaccaggtccggagggcggtttccaaggtggtggcggcgccatgcaggcgcgggatgagggtcatcggcactccatgcaagaagtgctggtacacgctgcgccgccgcctccgctgctgactccgaccctccctcccattgcgcagccgctcctcgtgcacatggacccgggagaaaggaggcggcgagactgctgcgacgcgggcatcgacgtcgacggcgatatcagattgtattaggtaataggtatggtcatcgttcctacgttaattccacatcggtaattaccaacggtgagcgtggcgctggcgagtaggatggatatagcgagctgggctggattcgctacgcacttttgaacgaatatatggtcgaatttgtccacagaaaatgtcactggtatactgttgggaattggaaattttgatcctacgccattaaaggtttcactccttaattggcttcaacactcgacattgtgttactccagtcacagcaccaaaatgttaaatgtataagttgatgaatgaaattcaacagaggggattaatagatgatgaagtcactcactcatatagattccaacctacttcactaacgctgtatcagcaatagcacac

SEQ ID NO: 4743 - DNA, 6135 bp, Sorghum bicolor
tgacaactacggagctagatcagcgatgaacatgccgtaagcaggcatgatcactgaacagtggacttgtgaacaccacggttagccatggcatctactgtgtatgctgcgtggctcgcagatctacctcaaccggcagtgacaaagcacatatatacgaatacgacacgcaacgaagagaccacatcaggcgtgacgcttacggctcacagagcagagcaccaagaacaaccaagaacgaaagggaggaacttttgcgacccggcggagaagaagaggattcggaagaagattaaagagtgtttactgaggaaatcggtgtcctcgaggcccttggcggagacgaggaggacctccagcttcccgtgaaccatgtttgccgccggtgcttgtgttcctcgatcgctggctgcagttccttttcttgatgcgttgcagagggagagggagagattcagagggtcagagacgacggcactttcccctctccttggcgaccaaaccacaacaagtgtgacatatatggagagaaaaggtcatggcaaatactagtgatgaggagccatgctgtcctcggccggccggccccagcttggcagcagctctggatcatcaattatgcatgcctgccagtctgcatcacacatgtgattgtgatggtgatggtgattttctactacgagccgtgattggtaaatcttgtgagacaaaaaaaaaaaaaggaagtgttgccaattgtacgcgtctagccgtctagcagtagctggtagtagtagatagttcattgaccagtactatatgacgatgatggcggctttcaactcttgctcttgttgtctgctctgccatggaaaagacaatactccaactactcagcacttcagcagcatgcttggtttgagctggactggtactgtggcacatgacaacaagcccggccggatccggatgtatgcatgcacccagctgccatattgccttgcaagttccttcagatcgcgggaataacgcaaggtttgattgctcgcttgcatgttctttcaatgattttactagtatttatttgtttcaaaaatgattttaatattaactacctcctatttttagatgaactcaatttagaagcatccaggataatttttttttttaggattggcttcatttttttctaggacttgctgggatagtttcatcaggcaaggcagaggtgtgttgcacttgcactaggagtagacaagcttgggcaattgcacgagtcaggcccatactgcaaaaccatctgatgggccagatgcgttctctgctggcttccgctccgccgtctgggaaggtcaaggatggaaaacggggtagtaggtagtagccaatcctggacaaggtggaggaagaagaagagtacaagtccactactctacttcttgttactcctgtttgaaatacctttccatccccatgcatctcttttgttgcttgggcgtggaagccacggctcgaagcagcgtcgtgccgtgcaatcagctcagctgcccaaccccggcaaccgcgaagcgagcgttgacgtaactggtcacgtcacatcgtataaaattcgcatgaattttgagaaattaatcatatatacgtgccaatcacttcacattttgtgtaaaaacaacgggcccaaacggcggcacagggttgtgttgacgtgcccgtgcaaactcggcactcgcacgcatataatgcatccaccactcgcggtccggtcgcggtcgcactccgagggatacccatgacacgtgggccctaaagagggcccataccatgcgacaagcccaccaactatggaaattcctctggactttggaaagcccagctcgatacgcccgtacgtctccgtccgtccccctctctccctgtccctggctggctccctcctctcttccgcctccgactccgactccgccacgccacctccccctcctcttcccctcccacccccatcccctccaggcgtgcgccccgatccttccccgcttgcgcgccccacgcccggcgtacgtctccgtccccctctcccttgctcctcctctcttccgcctccgactccgactccgactccgccacgccacctcccctcccctcccctcctcttcccctcctcttcagccgtgcgcccccgatccctcgccacttgcgcgccctaggccgacctcatctcgccgaggactggatcgccgcagggtaagcaagctttgctagacatcgtgggtgttcttcaaacacatgtgcgttaggttaggtgatgcctgagagggaagaagcacctgtacctccaccagattcaccacgtgaggaggaggacgccgccgccgccgccgtcccagttgcttccgttgcctcttcctccttcggctccgatcacaaggaagacagcggctccaggcagaccaaggcctccatcctgtccggcgtcttcacgcccccttttgccttattcgagggccagcagcaggagcaggactcgtcgtcgtcgtcgccggcgtgcgacgccatatcgacaaagtcgtcctcagggtcctatgcttggtctaggattctgaggaggttcgtaggcagcagctcgatgtggcgtcttctgggctgcgccaaggttctgacctccagtgatgtgtggttccttggtaaatgctacaaggtgtcacctgaggaagaggagtctggcgacggccatgctgcgtttctggaagatttctcttccaagatatggatcacctaccggaaaggttaggctttgcaggactacgtttgtggtgaaaacttaatttcgtgtacacaggtggctagatattgacatgtttattgtcccaggctttgatgcaatatctgattccaagctgactagtgatgtgaactggggatgcatggttagaagcagtcagatgctggttgctcaggtaaactttgtccctttcaaagtgtcccttcattgactgccactgcaattgtaagctgtaacagacaaagctatctggcaaaaatttgcaggcactgatttttcaccatcttggaagatcttggagaaagcccccggagaaggtgagagatatatgaattgattattctggtctggattagaggttcacctatgcaaagaaaaatgaggaacttctgctgagttagtaggtcatggagctcctttaattcttaatgtagggttgcttataataaccaaatgttcatatgcagccatacaacccagattatataggggtcttacacctatttggtgattctgaagcttgtgctttctctattcacaatttacttcaagctggaaggaattatggtctggctgctggatcatgggtgggtccatatgctatgtgccgggcatggcagacccttatccgcacaaatagagagcaagctggtgctgtcaatgggaaggaaaatttccctatgattctttatgtggtttcgggtgatgaagatggtgaaagaggtggagctccagttgtttgcatcgatgttgctgctcagctttgctctgatttcaacaaagaacaatctacatggtcacctattcttttgttagttcctctggttcttggcctcgacaaaattaatccaaggtaatcagctaaatttccatgctttgggggctgcataaggatccatgctaggctatctgaatttaagagtcatcctatgttaggctttcctacctatacactacaaaacttaaggacagtgacgtggcctgggacctattttgtaaaaatggctaatattgtgatattatagtccaacatgatgggttattatatagatggttattctaaaaatacaaaccaatcttaaatccatgtagccataatggcaatgaataaagataccgtctagtaattgatgtttctgttgatgtattgatatgtaattaattagtatctgtttcctttctatcaggtacatcccattactaaaggagacgtttacgttcccacaaagcttgggcattttaggtggaaaacctgggacgtcaacatacattgctggcgtacaggatgatagggccctctacctagatccccacgacgttcagatggtatacctgcatacattttatatttacttagcatgcagatgcatctatttcagaaatactgtatagctttataccttctaacttaagttgagcaccatatacttaagtatcaaattcaaaactgcatgttctttcatgtatgtgaatgccattcgtagttatctaatttcatggatataatttggcaccttttaagtttcaagtttgaactgagttccattctcttattcaaagacaacagtagcatgcttattctgcagcagttcttgttccgtaggccactagaatctggttatttctgttgaagagaagtccattgtgagtccctatagtttgttaggttgtgccaatgggggtcccggaacttggcagctgaagattcaggtcaaagcatgcccaaactatgccggtagttaaagatgacatggtatttgagagcactgtagattgttgtttaactttgcaactatcatgtgaaatcagcaaggattccatattctggattatagagttttttttttgtatcctagctttcattggtcttaattagcaggagccatgctaagtctagtggaccatttgtatcccttgtgggcctaacgcaaccaattttttagacataattgggcttgtgtgtgtatatagactactgtttttcaatttgtgcactcttgtttgcttggactaccattttttatcactatgaatacacagataatggcccggatgcatgattgtttagcatatactagtaatggtagtaatactggaatgctctctatgtgtcaggcagttgacattgcaccggataacttggaggcagacacttcgtcgtaccactgcaggtatgtgtgctgttgtggaatgaaatctgatgaatggaactgccgattcattctctctgcatgcctagtgatgggctctgattcatgtgtctacacttgtacagtgttgtccgagatttggctctagaacaaatagatccctccctggctattggtttttactgtcgtgacaaaggtgagccgttgtagtttatcagatgcccattgagtcatttttttcaagctctaaataatatctatgttttctatttgcatctttatgcagacgactttgatgatttctgttctcgggcctctgagttggcagaaaaggccaatggagcgccactctttactgttgtgcagtcaatcgagccattgaagcaaatgtataaacaagatgatgggctgggctgttctggcagtagcatgggcaacgacgatgaccttgatggctctggagaagcagaggagtggcagatcctctaaacaaggcgaacaccgatgacatgttgggctgaaaaacttgcatcgaacacattgtctgaattgccttgtttgcgtgtgaatacaggggattatttgtgatgacagggtgtcgttgggtgccagcgtcccttaggaggaaatgttcaaaacgttacaggtggaaatgttcaaaaacatacacttgtggatgatcataactatatgtatttattattccatattctaacaccatttcaccacggtgtgctcgcttttcaattcgttgctagagttaagagttgcacctgccaaaatgtttgtggtgttggggtgttatgtttgcatttgcaatgccaatatatcgccatttaaacagggcgaaccattttggtgtgaattctgccaaaaatgctgtgttgtggggtagtactacactatacgtttggaacactgtcctgaaacgtttagagtcgcctgtctgtaacagaagtcactgcgaagaaaggcacaaagttggcgtgtaaaagggttacgaaaagaaccaagttcatggccgggcatggctgatcacgaacctgtaaggctgtaagcctgtatgtaacccatagccaaagaaaggcatccatgtcaaactgaagctgcagaagaacagtcatcttgctccggcatcacgcaacagcatagcctgatatggtggtcatggcaccgctgctctgccccagctctccccctctttaaaaattgcaagctgcaagc

SEQ ID NO: 4744 - DNA, 5395 bp, Sorghum bicolor
acatccgtatacagattgtcctattttcaatcttttgtaatgatatatgctctcactcctataatataataatgtattccaaaaattttaaattaatacttgctacttcatctgtatacaaattgtcctattttcattttttttctagtgatataaccccttgcttgcattattctaaaaattttaaacaatttgaggaaatacttatatatgacgcatgtagctatggaataaaccaattaaaaaaattctccttaaattataattttattttcaataaattttgctaaatctggatatgaaacgccatatcttccttttttttatttagaccaaaaaaatatgaaaggtcctcgtccaaacaggatttgtgcgtgcgtctacatcgtcaaaaggtcggagtctgattgattgagtttttttagtgaaacctgactcaggccttgtttacttccaattttttttttgcaaaataggaatagtagcattttcgtttgtatttcacaaatattgtctaattatggactaactaggttcaaaagattcgtctcgtcaattccgaccaaactgtgcaattagtttttattttcatctatatttaatactccatgcatacgtctaaagattcgatgtgacggagaatctgaaaaattttgcaaatttttttggaactaaacaaggcctcactcgtatttaagtcccggatttgatacgagtaatcgtatttttctatttattttagaatataatgacactatatttttaatgataaataacgtatttttcgataacgagatgactttgtcaatcttgaaatttatcaatctatttgaatgtgcatatgtatgcacaccgggtcccaaaaagtacatcaattgccgcctggcagcacgagccgagtccactagcacggtctattgggccaagcatcatctgaatggccctcgtctctctaccttttttttccctttccataattcaagcattaagcatgcctttccccggaatgaaattagaccacataaaattacttacgtaaagagataaactatcataagttagtattattggatgaaatgacacactaatatagacaattaaatgtacggtagtgaatgatgtgtgtcgttgacgttgcacctattcataaaatgttgcacacattttctacaaatataatcaaacttacaatataaaaataaaaaattaattatttagagatggagagagtatatcataattgttcacgctagatatagatataagataacttttaaaaagattcatagtataataaaataatatttaaagttaagaggcgttaaaaataatatttggaattacttaaatctaaaagattaaatacattaattaaaataaatatatgatagacttaaacattgccctattttgtatggttccactttactagtgaagctgtttttagactttagctccataaacaactccatcgatggagcttagcaaaacagcttcatatatacgtctttaaaatgtgctctcatgcgtagaacatcatgatgaggtgaagctgagtgaagccattatttttggtttcatcccaccttaaacctttgtgagaacacgatttaagaagtttcttagataaagttgttttattttaccctatttaatataaaatgactcatgaaatcggttaaaaggccctaccaaaggaaaccttacatagtacaaatctcgtaaattctgatagagtgctaccaaattcgatcctagtatctgatatgtaccagacaaaagagaaaatgatgctcgcagaatatgcttcgtatcacgtatacagcatcaatgtatacgcttttacataaagaaacgtaacaaacaacagttaatacgcttttacgttaagaaaacgtctgcgaaaccccgtctcactctcatctcacttggcgcgcagtcgtcgccacgagtgacaactgcagccacgatccatccatccgctccaggtccaggggagtgacgagcgacgactcgtgcagcccccggttcgtcctcctcgagccctcgtccctcccctcccccgcgcgcagatcccgacgccccttcccttgcgcgcgacgcgacgactccactctccacagtccacacgccaagcgagggccgcatctagatccgcgccgccgagctgactattgcaacccacgccttcttctccccgcgattttcctggcccgggcgccgttgctgctgctgctgctgctactactactaccacgcggccgcgaggaccgccgcttcgtcctctgctcgcagtcgtagcggaggcaggggcgcgaggagcggacggattgcgatggccgccgcggggaggaatgcgggcgtcctcgcgctcttcgatgtcgacggcactctcacagcgccgcgcaaggtgccgcgagttcccctcccctcgatccgtttccctttctcaatctcagcctccggttgcgttagcttggcactcggatgagctcagtagttaggagtgggccgcagctccaaattgtcgagcgccgccgctttttttgtttgtttttgtgaaatgatcttgtgattctctgggcaggtggtgacgccagagatgctagagttcatgaagcagctgcgccaggtgagaattcagatcgttcgtcctcttgctcctgctgcatttgttcgttgcatgacgagaaattacagcttcattttttttttaatttactttgggagcagcatgtgactgtgggcgtggttggcggatccgatcttgtgaagattactgagcagctcggcaatacaggtgactgaacatatgcgctcaagttcggacttgctaggagttcgttgctatgtcgccctgtgtgaccccatcattgcactgatgatgatgaactctgcaacgttggaagtaattggtttgccccctttttttttcgtttttgcagttattactgattatgattacgtcttctccgaaaacggcctggttgcacacaaaaatggccaactaattggaactcaagtaagtctctgggcacctgacatatactatttcaacatatatgcattggtcaacgtctcctgatatttcgttatgaatgagaaatgttccactaggtacacgctgagattgtcaaaattttagtaaaggaatgcctctgttcttttcctttgttgacatgcaacactgaccaaacaaactgtcatacaaagttctagtccagtagaataacggacttacctatagactctttatatatatgctaaaacctgtccttgtgcactctgcagagtttgaaatcatttgtcggagaagacaagctaaaggtaagcctaaatgtggtgtattcacattcgtgcactgcttcttttgataaaatcctaaggccttgctgaagacaatgtgttctctttccaggaatttattaacttcactcttcattacattgctgacttggatatcccaattaaaaggtcagttaattaccctgttcaacagttatgatttgcactagcttgttagtcatcactgacctttataatgttgactgattgctcaggggtacgttcatagagttccgaagtggaatgattaatgtatctcctataggaagaaactgtagccaagaagaacgtgatgaatttgagaagtatgataaggtataaatcgtctactaaaagccagtaccttagtcagagaggaggcaatcaaatctatggcactgaaacggttgatttcctgcaggtgcataacattcgacctaaaatggtgtcagtgcttcgtgaaaagtttgcacacttgaacctgacattttctattggagggcagattagttttgatgtgagtctcctggacttgtacacgtatgtattttcttgaaataattggaatcatggtatttactactaccacgcaaaaattccaggtatttccccaaggttgggacaaaacttactgcttgagatatcttgaggaatttcaagaaatccatttctttggggataagacatacaaggtgatatgcctttcttactggtgttcaaatcctataaaactcttgatatgtatcttcttcttaggaccaaaaataatctgtgtgtatatttttacattttttttggttagtaactagcagcttaattctaacatggcctttattttggtaatttatctgactaatttttgttttccattgaacagggtggcaatgactatgagatatttgaatctgaaagaacagttggccatacaggtatgctggctgtatgggaaaggctgatattcttatgcctacgaatttgtaatgtcacctaacaagaatatggacatagcttaaagagagatatttttagttctccttagaaaataaaaataaataggaaacaagagcatcagtgcaaaatcaatgtggtttgcctgaaatttttccgcagaatttaattttaatgttaaatgatacctctttcatcatcatagtagttgcatattacaattgctactcactcatcaagtcaccatttctgtcattcccatattgattccatattattttgatttgcagttaccagccccaatgacacagctcagcaatgcagatctctcttcatgtcgaagtgatcacaagcttatttgcaccatatatttattaagttcacatttattagtgatctttgactaaatgctttttggcattttttcatgacaattacatccagccatttttccttccaagtccaaacagattgtactgctccactctatactcacaaattttcagattacatgtatacattggcgaaaataaatgagaattacctgttttactttaccccgtgttaaatgagctgttccttgagacggtgatgtaataaaagatgataattatgcattgccgttgttagctattgtctgcaaattcatgagaaatttgggcacaaggtgtccgaaggcatctgtaagtacctttccagcagctgcttcaaatactttggacggaacggaagctaaggaagttgtttgtatgtgagcatgctgaaaattgttttatcacctcagattaaaaaaaaaaacccccgcctcaaatccaagttggtttttaccatctttgactgaactatgatactaaacatagaccctttgtaatggattaatgctgactgaaatttttaacagctactcttcctaattataagatatttaggcttttctacatacgttgtttttattatgcatttagatatacattatatctaaatatatagtaaagacaatctaaaaagccaaaatgtctttaatttagaatggaaaaagtaaaataaagcattttcatgaaaacacacgaaaacgttatgtagatttggaatagcagtcactatttttcagccgggacattca

SEQ ID NO: 4745 - DNA, 6510 bp, Sorghum bicolor
tggattttgggtgtagtaggagatagaaaaccccacgaaacacggcagccaaaagcaatgcagggaggagaatatcgtacattaaccacgcggctcctccccccaacgcaaacgcagcgacggacgccaagagcaatgagggtttcggggacgaggcagcgtggggaaacaaacctccgatcggaaatgcgaggttgcggagcgagcgatgcaaccgagaaaaggcgcttcggctttggtacggggtttttctgtgggctttggagttggagagtgggagcacaggcgagcacgagcagcaacaaatccggaggagaggaggaggtggtggtggcggcctaatcggaggttgcgtgcgtggtggaggtggggttttacttcccctctgctgctctgcaatggctcagtggtggagaactgaaggagggagaggagagcaggggaggtgagtgggagggagggcaggtggaagtggaagcagttcacatgaacggccattcgccaggatgggaatttgcctgcaggccccttggcgtaagcgaagatgcctgcgtaccagggactgagttgcaaaaatacacaccaatcaatcaatctctcgtctccatcccgaattcccggtagcagtgatgactactggtgtgacgaatacacacaccatggccgtctggtgtcctgtgttgtgtgatggtgcgagttcatccaggtcactctaggcgtaattaaccgaagatcgaatcgaaactaaccgagatcgagatcgaactaaccgagatcgaacttttcggtcataaattcggtcactgcttccaactaaccgaactttatacggttagttcgggtataggtgtcggttaagcgaactaatctctgttgggagtcctaaactatttttttatcttttaaaaaacttgattgtgtgtgtgtttttgttgtgtcattgtgagtttgtgacttgtgagttgtgagatgctgctatagttagtatttgaataaggagaaccaagatatttatattactttgtgcaaatatgctgctgaaatttgatacaaatgtgctagtccggttagttcggtcgtgatcgagaccgaaccgaactaaccgagaccgaaattgctcggtctttattttttcaactaaccgatcgatccttgttttgtgatgaccgaactttcaaaataaccgaggaaccgaccggttcggttcagtcagaccgaacgcccagacctacatccaggatccatatacactcccgttcgaaaaagaaacaatgaaaatataaagagtcaagtagttttatgtatttgagactaattaatttatgattggacattgattgctaaataaaaataaaaatacgtacttgttaaactttaacaaccccaactaaacaccctttaaattacaaagcttgcaaaacaaacgaacataactttatcacttgacgtgattgtagcgtaacacccaacaatcaccgaaccaaatagtaccgaacacttcgtgctaatgaagcaataaactcaaacgactcaataatttttataaaaccttcatgcacttttataaacctaaaagcttggcagcctcgtcaaaaaaagaaaaaacaaaatagtaccgagcacttcatgaagcaataaactcaaacgactcaataatttttataaaaccttcatgcacttttataaacctaaaagcttggcagctttgtcaaaaaataaaattgaaaaaaaagcttggcagcctttttaaaaaaaaaagaaaaacttggcagccttgtaaattgtagcgttgcacgaacaaggaaactccatcttctgtacaaggagatatggaaatattctttctacttttagaagacaaaagtcttataaccgctaatatgactttcacaaggggctaaattgaaacaatatgcaacttttttttctttggaaaaaaaaacgaagcgtaaaatctcagctccacaagggccccagctcataatttcaaggttgcctcggcctcccgtgctcgtcgtgatggccaccggcggcggcgccagcgagacggccgtcggcgccggggaggagaacgcgagcgcttccaggatccccacccgcaggtttttcgtggcgctgcacgtgggcgccggcttccacgcgccggcgaacgagaaggcgtaccgcagggccatgaagcgcgcctgcctcgcagctgcggccattcttcgcgaggtccggtcactgagctcttaccgcccactctctccctcctgttccttgttgtcatggcttggtcgtggcgcctggattttagccgctgattggaattgtcaagtgtcaactgcgtagggtttaattgggattgggagtttgggacacactgtccatttccgttagggagacgtggtgcattataaactgagcggaccatggcctgcttgttctcagttctgtaaatattatggtttataggtgactgattttattactgtagcttcagattgttgttgttgttgtttaaaggatatgttcgggttgtgctggaccattgacgtttgcaccatgtgcacttgagaaaagcactgctgaatgatgtgatattttgatcatgtcgaaatgcaatcttcagatccgtccttgcagattctattttcagtagtggattcctgatgatgttttgtacattccagggcagtggcacaagcctggatgctgttgcagctggcattcaagttttggaggttagtactaattacattttatgacttcctgtagttttactcttgtagtacctatgtataattaatcttgaaaacattcagatcaggtagattgtgcaaataaatgaaacaagtatgtgatacatgttgtttcaggtttaaaatgtttttcctaatatttgcatgctatagtttaactacagtaaaggtttagtggtatattctgggaaaatgcttgcttgttctaagctaaaggtatctgaatctgtttattctcatatctgactaactaggatgatcctgtcacaaatgctggtcggggttcaaatttgactgagagtggtcatgtggaatgtgatgcaagcatcatggatggaagtactggttcttttggagctgttggagctattcgaggtacttgtaatttggagcatggaagttgataactaagtagtatgaataaaaatagtgctaaatgctaatatgttttcctgtgaactttgactgcagctctgatcatattttctgtttcttgtagatcagatgtaaagaatccaatcaaagtcgctttgcacttggcgaaggaacaaatggcaggatcgtcattgcttggtcggataccccccatgtaatcatgaaaaccgagtatcttctccactttttgcctgtttttcccctgtaaattcttgcccatttgttttgttcacttgtgccactcagctaactgaatagtaacatgttcttcaaagttgcatgatttgcatctcatcttgtaatgcaagctgttgctttatccattgaaccagttacatacaaagttccctttacaatttcgtctcaggatgtaatctgatcaatgcacaatatattcaacactcatttatgttgattttattaatttactactgacctatcacccatcttagctctgtatctaaatactgatctattccttgttataggtttctggttggtgaaggagcatatcaatgggcaaaatctaaaggaatggacctagttgaatctgcaccaggggctaataatgtgagtcccttcttgttttttgttgtttaaactaatcatttcattcctgattgggtggaacatttatgttctcaaacagtggttggtgactgagaatgcaagagcgcagtgggtgaagtacacatcattgcttgttaataccaagaaattattagagcatgacactggttctgcttcagaacattcagtgcagttggaagcaccaggttacctccatgttatttgctacttattttattcgggttacactttaaagttttattgatctgtatgatatttcattcaaacttccaccttgtgtaagttgaaacatcatctgaatgtttagtttaactttatttccttagcataatgatattgaatgaccgttgggtagtttaagaactttaagtatttctgttttgttagttgccaaattctattctgctaggtatttactttttttttcattatctcctaattacattttgtctccagcaatattcagagccgttcttcttgaaatataattttgactggtttgttgtgaaccagtcatttatgtcaaaagattttgtataacacactggttctactgcttttcacaaggtctgtcaaaagattttgtatatacattatacaattgtcatattttccatgaacacaatgtccaacagatgtcagcatttatgtaaaaataaaacagatatcagcacagtggttggtctgagttcagttggacacttacagtaattatccatttatctctaacatattatgcactactttcatttggacttgtggtatgatatgagcacagaaaatatttatgccaccacccaatttttagttactctacaaagagtctcggcaatgtggtaccaatgttacattcttgcacttgttttatgctatgtagcaattgtgatttttgaactatattttcagctaataaaaggcttcctgctccacctgtccatctgacctgtgtcaatttcattgtaggaactgaatctgagaatatttctgatgtaaagaagatattgacagagtcattcatggaagacaatacagattgcgtaatggatactgttggtgttatttgtgtagatagctacggaaatgtagcatcaggtgcatctagtggtggtattgccctgaaggtctgttggtcattgttctcatcagttcttgttcaaagtttctaataaatgtttgccccttgaaaatgctccttttgtttttttttttgtttatttacactgttttggataagtcagtatggttgtcatgaacttgttactctatgttctcgttctatcaaatccgtctggttcccagtaggaccgttacactctagcagtagcaaaaacctctcattttactgttggtgctaagaaaagcagactgatgtcatagcacttggcaggtagatggccgggttgggttggcagctatgtttggctctgggtgctgggcttcgtccaaaggaccctttggtacaccattcgtagttgcttgttgtgcaactggagctggagaacacttgattagaggatttgctgcccgtgaatgttgcatctcatcatcattgtatgatcatttctttctcttttatccttccctttccttttccttttttacctttctacattgttttccagcaaatatccccttatgtaaatctgaatatatatatatatatatatatatatatatatatatatatatatatatatatatatatatatatatatatatatatatatatatatatatgtatatattatcaggtcacaatctggtcctgcttctgcatgcactaaaattctccgctctgtggttcaaggcagcagcaagatgtctcatgacacaggggctgggttgttgctagttcaggctgatgttcgaaaggtgagtatttgcaatcccatctgcttacatcttggatgggtaagcccctccactgtgagctgaaccatgtatcttttggtagggaggggatttgtctgaactggaagctgctgagctggttgctgcctattcctcgccatcatttggtgttggttatttcggaagcaatatgaataatcctaaggtagtactaggtgctttacactctttattatgtggagattgttgttattttgtctatttggaccaatgattctatgcacctttgtgttttgcaggttctgatgcttaaaacaccagaaggtccatccaaaacggtcaaccagttcgcgacctgcgtcaagtttgatagagaatcatctgaacaatgacaacgacccagaccatgcaaaagcacttgtaactttttcactatgcatcctttgaacgatgaacggtattttttggagtgtttgaacaacatttgaatttgtaggaaattcgagaagaaaccattattttttagatgagaactatcatttttttatagaggtaaaaaaacataaatagaaaggatatgatgggaaaacgagagcatgcaattcaactagtagcgctgccgaagcctgtgatcgcctggtagcccgacgaagcagcgtggagtggaggtcgtcgcgggccgggcgcgggagccggtgctcgagtggacgggggttttggaagtgtttctttttttttttcaagcaaaactggaacccgtcacggattctgccacctgttccatttcttggcatccgacggccaccagccctgcgtccggttcgtcgtgcagcatagtgatgaaaaaaaaccgttctgactttatccctccagaagttctgtaaaacaactt

SEQ ID NO: 4746 - DNA, 6290 bp, Sorghum bicolor
ttagatctgcaaagcttacagatcgcatcattggaccattcccgcttgcttagcttgttggctgtgaggatcattttggttctgttttggctttccaaattggcttgattttgattttactgaaggtcccttcaaattgaattttagaaggactatgtgtcgtgtattttccatcttcagtccacctctatcgaatctcatcctctactgtctggtcaaactgaatttcatttaaatcttcccacaatgtgacgtattctgtgatctcagtttgtggaggggagatatgttcaatccatttgtaggtggtaatacagtgagcagtcagttaaccacctcagactctgaatggaatggcatgacttccaaggatgttgttggttatgcagattaacattgttgtgctcaatatttcttgatagaaaatatggcgacccatgctgccatgctatgtcaagcaaaataagcatcctcctatgctaattgaatatttagctagtcacagtcttttctccatttagatagccagttatttctacttagtttagagtttacttcatgagggttctactcagagtttattcgctttgatgttgtgtaatattttacgaaagctggccccttagaagtgccagtgtcttgttgacagctgttttctggttattttccctaatgaccatgtcaaagttaatatttttccaaaatgtaactagacaagagaattgcccctaggcagttggtacttggtagcggattctgaggagtagcacacttgaatttgggtcgacaaatgtttgtagagctgtgtcatatatggctggaccctccagatatctatctgttcttagaagaaatatgtaacagttaatgcctgatgttattttagttgcaaccagataattcattcagaagctgaaactaattgtgaggggaagcgcgctgctagatttaactttgttgctgtttgtttctgttagagtttatgcaaactaatcgtattttgttgaaccaaaaatctgtactttatagtatatagattttgttgttgttgttgttgttgctttgaagctagctctccctgctgttggtcataataagtgctggtgagattcattacatcctttgctcttttgtcgaaatgcagagggtgaagaagttttccctggcagaaccaagctccaccacatccactgaagctccaaagagcgacccgaagcactgagcattcagcaaagaaatctctctatgtttaggaatctactatcatctctgtgcagatgtgtgatcgggcgcgattgataagactaaggatgttaatgtagcgtgagatatgtccttttgaatccatttttttttatgccagatgtatttgtgctgaactcgccaacagaaacgttatccactcaaatgatacagtttgagcagttcatgattgcatccaaggttttcgaacattttgctgtgctgttgcttgactgatgaatgttatggtggcccaatgcgtacggcttgcatgaatccatcgccattgtcccctgatagcaagaacatgtttttggtctgctctcgcgttcagagaagggggcagagatgttttcttttcttttattttagaagctctgatctggagctgtgtgtgcagtgtgttctgctcgcttttgctacctcggctcagctccctccctctctggcaatggcaagtatatattcctggtccgggttccaagcaaagccacgtcatcatctctcctactagtcacagcacagcagtacacgccggccgggccgacgcagagaagcagcacgccgtcgcgagcttgccacgtgtcacgcccaggcacgcgcacgcgtcgctttctctccggaggcgccgtgtcgagtggagcggtccgccggtccaccagcttcttcttcggtttccttgtgccccgccctctcgaatttctccgttagttcctccctccggccccggcctccgctctcaccgcggccggccagccatggagcaaggccaagggactccgcctgcgacggaacgcgacatcggcttcgccgagcgggccgtggcggcggccggcgccgccgtcatatccgccgtcctcgttaaccccctcgacgtcgccaaggtacgccggtgatcccttcgttgcttctatcgcttctagagaagagaatcttgtcggttgagtgccaaattattcatctttgcccacgtaattcgtcactggattgagtggattggaacctactgcctctcgcggagagatcttcaggctgcttctgctgttttgcttatgggcttggaatgtgtacggatactgatgttcgttcggtcctcgtttcctcttgcagacgaggttgcaagcacaagctgctggagtgatttacaacccggtaagcctgtctcacaattcaatactagtgcttccaatgcgaaaatttctagtgccttctcttcataaaaattaatagggtgaaactatactacgtagtagtatgctgaaatcatatagagaatctctttggattcattcaacaatattgcaggttttgaacagttacagagaaatcactttcctatcgattcttgtagttcaaataattctgtcaagagtgtgttccagaaaatcatctgtcagatgaagtgtgcacgtgcaaatatttattttctctaaaataaattgatcagatatggtcagattttaggtgcaacccatcatgcagcactggtggaatcaatggttaggcccgtccagtcctgaatgctttcagtacagaggaactatggacgtgttttctaaagtcactagacaggcaagttcttattgagcttatctcttcattgtgctcttctcttttctatctatcacctattaaattagtatatctgcaggaaggaatttttagactatggagaggtacaggtgcaaacctggcattagctgtaccaatggtaaattctttcagctgatcatgtttttaccctgtaatatcaatgtaatatattacaacataccaggcagtgatgcatattgtatcagcacatgtattgcatctggaacttcatttaaggagcttttttacggtgcttggaggaaccagcagttccacccgtccatttctatttttgacgtagggttattatagttatttaccaattgttttttcctccttacggtctcttccaaacgtttctgctccgttcctgtccccgttcctcgagcgcgtgcctgaccgcacccgcccacagcagcgccgagcgcgtagatcccgcccaagaacacatctatgtggtgcacccagcagccatggctgcatgtgtgtcgacgtgccaatggaagttcatgtcccatgatggtgcgaccatggcagcggtaggcagtgcggcccttcgtccctccccttcaagcaaagtgaaacgaggagttccctgtagtccagcagcaaccctccatggctcttcacacacccgacctcggtagcagttccacaatcctgggcattgcccatgcatgcacaagtcagaggccttcagagaagcaattgactaggctagcaatcgtcctcggtgtcattggagatcgatggtcgccggttgggatgggacgggatccgacatcacagcaccggtcatctggtcatcgcggctcgggcctgttatccatgtgacgagttctaccaaatgaaaatactattatacccttttaataaaagtgcagatcagttcctggcccaccaaatttaagttctggtccacgacttaagttcctctcgttaggttcctctataattttaaccattagatctaaacgaatgaaagactcacattgttttcaagcactgtaaaatttctctatacttaaccacacttccagcgatcatgattcatgaatattttgtctctctccatgtcctatttgacttttactctagtaaagtaaacatcacagacttgttttcatattttggagtatccatatgtgtttttagtaggcatgccataatattttattttattttgtgtttgctccttcaggttggaatatatatgccttgttacgatttattgcgcaatcggattgaagaatactcggaccgcaattgtcccaagcttagaccatatgctcctcttatttctggctctattgcacgatcattggcatgcatagcttgttcccctattgagttagcaagaacacgtatgctggtcagcatcttggactttcttgcatggttgtgtattagcattcaaattaaataacacctcacttctgttcttaatagccaagaactcaaaccctaagttaacaatatacttcagttaataatgtagaacttagtttctgtacttatctgggtagaacatattgctgccttacattctgtataggaatgtttgctttttttttaatttaggccttcaaagcatcaaatgttggagggaagccccctggaatgtggacgaccttgataggtgtgctttcatcgagacaaaacatcaggagccctgaaaacggtatgtaccatgctactccactgttttttagttgcaattgacaaagcatacagttattgtcctgatatttaaaagatgcaaacacgattcaccgacatggaccgcaattgtctgcacaaatgcatacatatgaaactttgaatgaattgcagcatttgttttcatttatcgtgaatattgagctatgttctttggaaattgaatatagttcgaggataccacctcctatggactggtctgggagcacaactagcacgcgatgccccctactcagctatatgttggacagttcttgaaccagtgagctactactctacttatgttttctatgttgtaccttggcttaagaaagtttcagatttagcaagaccctgttggaactgttgagagaaaaaaaaatatggcttattgagacaaccttaattttcatcttccaaatgctacttgtacagattagaagacatgtgatacaactattcggtgatcaaagcaatgcagcagttatattgggggcaaacttttctgcgggcttcattgctggggttatctctgctggtgctacctgccctcttgatgttgccaagacacgcagacaaatagaggcaagtgcatgattttgggctagtactctctattccaagttcagtttacttttttctactacttgtttgttttgtctttgcattctgagtaacttggagtcagctagtgacaacaacttactgactccatgaatcctgcattctgctgacagagggatcctgaaagggtattaagcatgaacacaaggcgcatattgcttgaggtttggaggtatctacctaaccttttttccgtgttagccaattcaattgccccctgtagaagattgataggtgatctgttcatactagaagtttggctaagatcctttgttgcaaattctgaagtcctagtttggttgctagtcagtgccatcgttgtcatggtatccctggatggtgcaaagctgaatcataccatgccagctatgaacataagtatcttgctaggcgttcttatcgctgtatgacaactctgtagatcttcagcttcagttcttgcagaattactgcacaaacaaattcgaattgaccgactgtgtgcgctgcaggaaggaaggtctggaaggtctgttcagaggtgcaggccctcgaatggcgcgcgcaggcccgtcggtgggcatcgtcgtctcctcctatgaagtcatgaagcacatcatgcacaggaaacatgcagtgcagacctatgattaatttgatgagctctgaaagcacctaagcaaacgagattaacacgccgtgtactctgctaatgacacaagtctgctttacgtttgcctgacttcctggtcgggatcggaagaagaggtaggattaggaatgtctgctattcaaataaatacatttttacaatagtcctgtttaaactttacttatttcgtcgtgaacgttagataaatgttgctccctaaattccattccaaattctttgctccctaaattccattccaaattctttgctaataagatcggaccttggtaaacgtcgggattggaagaagaggtaggattaggaatggagggattacttgccaatcaggcgatttatgcaactactaagaccggatctcacaagcacaacgtgattgaaatatggccctgtttagattgaagatgaaaattttttggctgtcacatcggatgtgtcggaaggatgtcgggaggggtttttagaaactaataaaaaacaaatt

SEQ ID NO: 4747 - DNA, 6148 bp, Sorghum bicolor
ctcctctttcatcttgttcgcaatctcaattaccttcaggttaaataaacaatccataacatatttcttttcctctccttgtatttcttttatggcacttgggtatggatttggaggtggcttctttccttcactgtaggcgatttctttcagttccttgcatgtttttttctttgctttcttctgcatccgatactccatctagaaaaaggatggttggcattcaaacttaaacgactcagtagcttcaaactcaagtacagtgatgcccagaattgatttttctatttaagggtgtttgattaaataaaaataaacaaaggattatagaagagaataattacatctgctacagccatcacaacatcttcattgactccttgctctttcaactccagaacacgccaagcaaaaactcaagctggtggtggatcaaatccacttatcctgaaaagggtgggcaaacaatgcatcttgtgtccaaagtgaggaactcaaataaatcaagtccaagaaatagagaggaaatattccagagaatagcaccaaaacagtaatggcatcagtagtaggaccaaaaaagagtcaattatcatgtgctggcctacggatggaagctgaagatagtcaccaaggtaccaaactaatactagaatgttcaaaaggaccgcacaaattcaagaacctcattaatcagtttgcaactgtgcatccatcatattaagcaactgtttccactaatccatcaactatatagatgagtgatacaatgaggcttcaatgagaaggctaagcaagtcccatataaccatgtacaataccaaatggaacccatgtaaatctcgaaacagaaaagtggaatgaaaaaaaagaaaaacagtaaaagaaaatcatcccagccctccaccaagacattggaaaataaaaaactcgagtgttattttaactatatacagcattgcagaatgacatttctataaggaaatcacataaggaaagagaaggatcttacttgattgcatcatggtagagcgaatctggatgtttttttttttttgctgaacttcctaacatacacatcctcaggaaactcgatcttcttgatctccccatctgtgcaaggaaatgtcactggtggtgccgtaacgcacaagcgctgcttgtttcagtaaaccagaaaacagcatgaagaagaacaacggaaatgtcacaggagacaaatgatatggcacttttaaacaattttatttattaagcatacatagacacactagccatcttcggtgtgtatacaaatgtagcacaagtaaggccttgtttggatgttgtcggattcatctcaatccacaatgtgttggattgatacaaatccgactgcatccaaaaaaaggcctaaagtgaaccaaacgaagcacgataacagaaacccgctaatggcaacagaaactacatcgaagaatcacatctatatgcaaaattgtttcagcacagaatcatgtcatttacgtcgctgcagattaattaatccattgtccatggataagcaatcaaatgggagaaaacctatgcgatttctcgtagagttatattcacagaatccaaacaagcctaacagagccatcaacagcatcgactaatcgagaaatgcaagtgcaagggcacagctagggacggggaaggagcggagaggttggcgtagtgagagcactgacgcttccatggccttgagccacctgggctcgggcctggcaaggcccttcaccagcttccgcatcttcgccagtagggccacccgcatgtacgacatctgcctcccctccgccctcgtcggtgagatctggaagtcgcagaggcctcgccgccgccgccgccagtgcagagtggaatggttgggaacttctcgtcgtgtgcgcgctttgttattatgggcttagttgggccctcgacccatccgcacggcctgctagagtagacacagtcgcacgccgttggatcgtacagctcgtagcggacgacgcagattgcgccgctgtacagagacgacgtcggcctgagcctgcctgagcgacgtgaagccaaggaagcgtgcaagcaagcaagtggcggtaatggcggcggctctgcaagccacgccgctcaaaaccctagccatctcccgccggcgcgtcggcgtcgcgggggtgcggcagcggccgatggtggcgagcttccggtgctccgcggcggcgcggagctacaacatcacgctcctccccggggacggcatcggcccggaggtggtcgccgtcgccaaggacgtgctctccctcgccggcgccctcgaaggtaagccgcttcgtcaccatccaatgcttgccttagctccctgggctctgaggcgccctcgaaggtaagccgcttcgtcacctagcaggataatcaccccccttgtttgcttcctttggcccgccgcaggcgtcgagctccggttccaggagaagctggtgggcggctccgcgctggacgccaccggcgtgcctctccccgacgagacgctcgacgcggccaagggttccgacgccatcctcctcggtgccattggagggtgagcggatttgttattgtcatttcaggagcagacacagagcccacagtattgacactgcagcgaattgcatccctttagttggaattgctctccctcgtctgccctatgagtactcagatgacgtttccgtggttgtagctataagtgggataacaatgagaagcacctcaagcctgagaccggcctgctgcagctccgtgctggactcggggtttttgccaatctgcgaccagctgcagtgttgccgcaggtatgagcacggctggtcttagttttagtacaaattgtgtaagaactactatgctcatctagtcacttagtgctctggggatcatagctaggttagatagttaccctgtcagttctgaatgcgttgaatgaatggtaacatgtagtcatttcttaattctagagagagaaaaaacaaaaggttaggcaagcatgaaaccacgatttcagatggatattttgagatcatttgtttgattgttcatggttgtagttatgaaagtgcactgatgcaagttttaattgaaactactgtatttctagctaatgttacttgactgtcctttttatagctacttttttttctttgacctcatgctccttgtagttggtagacgcatccactctgaagaaagaggtagctgaaggtgttgacatcatggttgtcagagagcttactggaggtgattctaattgaattatgataaaacatggaccatgttttttttgtttcaataccaatataatatctgattgttcattgtaatgaaacttgtggctacaaagagtcattcgtaatgtcctgtgccaggcatctacttcggcaaacccaggggttttggaacaaatgacaagggagaggatattggcttcaacacagaagtttattcagcttctgaggtgactccgccctcctttagatattctaccatctctcccgtgataaaaaaaaattgagatgttgtccgttctgccgtccaagccttaatcagaaccagttagggatgcaggatggggttcctaggagaataactatactgtgtccaaaactctttatttgatattgttcaaatttaaaatgctttcatttataaaatattggtccttgatgatgatgaaattctatgcttcatccccagattgatcgtattgcacgtgttgcatttgaggttgctcgcaagagaagagggaaactatgctcagttgacaaagcaaatgtgctggaggtacttttttatacttgtcttaaatgtatacaaaacttgtattgaagtgatgttctgtatgaaatgttacttgaccctgtctttgaattgaaattccatctttggctagttggttacaaacataaataattagtgtttctgtttttagactttattttctgttggggatatgcaaaaaaaattagcattatgctgacactagaaaaccccttgaaaggttaaatgtatatgtttgtggaccctttcttcttgcacatagttaatacaacccttctgctgcaataatattgtaggcatccatgctttggaggaaaagggtgactgcactagcttctgaattccctgacattgagctctcacacatgtatgttgataatgctgcgatgcagcttgttaggaatcctaagcaggtttgcctttccccttttctcttgacttaattcattgtaccctggcgaagcatcaagaaaatgtgttgatcttaattttctttattgccgcagtttgacacaattgtcacaaacaatatttttggtgacatattatctgatgaagcatcaatgattacgggaagcattggaatgcttccatctgccagtgttggtgaatcggtaatattgaatctctccaatgctttgaagttctctcaatggtatatagatgccattatattctgctgaaaatttaaaagtgcagctgaaaatgccatcctgtttctatgcagggacctggtctttttgaacctattcatggctctgcccctgatattgctggacaggttgagatgacttctatttcgaaatgttctctgacactagatgggtttaaattatgtttgtctgaatttgctttccttcctgttatctgttgagtccaggacaaggccaatccattagctacaattcttagtgcagcgatgctattgcgatatggcctaggagaagaaaatgctgcaaagagaattgaagctgcagttacagcaacactgaaccatgggttccgaaccggggacatatattctcctggaacagtaagatagattttcctgcagaaccattattaatgcattatgggggtgtttcgtttgaggaatcacctcatccttagttgagacagtccatcatgagttcatcccatgaatttgggtggaatgaatccaaccttcatgcttttgcattgcttagttattttaatgaagttttattcctaccttctctatgagtaagggtaaaactttttagctttatatcgtacatgtttaatgtcaagtacttggtcctcacctagagaaggtatgagatctgcattagacaaatcattcaggtagtgtaatagtattttgttttgaggctctggtttacagtacttcaagcatattaactctttcatgtctctggaagaaagtgatagctagtttgtgaatgcatgaattgtatttgaattttggttgatttcattctgagaggcttatgtttgcaattggcagacattggttggatgcaagcagatgggggaagaagtcttgaagacagttgagtcgctaaaggaagtggctgctgtaaactgatgcatgctggtgcttaatttataaccataccggatgagatggttgggaggaatttacatttataaagttgagcctggtggaagagagcattgcgtctggtttattgttactgttgactttagtggccgaaccaatagccatttttcatttctgttgtttgttggtctccctgtaatttaattttgtacaaggataagcatatgttcgctcaataaaatgggatagttcatgccagttgaataaaaggtggagttttgtttcagactaaatatctttgtggctatgccttcaatttatatgtgtactgatcatttgacatggctgacctcattaggccatgtcacaaagattatctgaaaagtggaccaataatcttgttagagcccattatctgtcgtgctgttcgatacacatgaccaaaattcttgatgactacactgtgaagtgacaacaacaacggggcagagctggctagtctactgttagcaaactgaagtaaacaccagtggatgagatgaatgtgaaaccaggaaaaagaattctactacatctacagaagctgatccaggcaacgtcaccagtagtccttgcacgagcaggtgccatgctcaaacctgtggaacctgttggcgtctctgactaccagcgccctcctcacgaccgccgacagccccttgaagaactcgtggcagtccccgcacacccgcaggttcttgtacaccctgatcggctgtctgtgcccgccgccgccgccgtcca

SEQ ID NO: 4748 - DNA, 6072 bp, Sorghum bicolor
tttagttattgagtcttgagtgtttggtttggatgaccaaaatagtcattttagtcccttttaggctaaataatactaaaaagtgaggtttagctccatttagtacaatttagctcccccttggtaactaaattagctctctttttagtcccatttagtatatgtgtttggtaaaaaagtgattgaatagactaaataaaatttagccgactaaactttagctgctcaaaccaaacagacccttacctcagactgtctccaacagctcatgcaaatggcgaggcaaacacaaaataggtcactcacagtgttttgcgggagaaaacactctccaatagaatgcacaaacgcggtacctattttgcctacccacctaatcgggacgcatatttgcgtcctctctctcccagacgcaaattttcccagctggtcctcgtagtcggaggcgcaggtggaggcaaggagcgaccagacaaggtacatggacgcgacggtgaaggctccatatccgaagccgaagaggaggtcggagatgacgatgaggatatccttggcatgatcctggccggacgaggtggcgaccttcggctcggaggtgaggagggccatgggatggcggatctagtgcgggctagacgacagacacgtaggtgatgacggtggtgaccatggcgaagcccgcggtgggcatggcgtgtgtcgaggtagcagcggcggagctctcgcccgcctgtccaaggggaagaggaactctggccaggagctggggcgggtctgtggctgggcgacgcgacgtccgcagtgaggggctagagcgacgctgtgtgcttgcggcgagggactggagtggcacagcgtgcccacgacgagcggctggtgcggcacgcgacagttttgggtgggctgtttgcgatagctgttggagaaggagagatttagggtgttatccatttcactgtgcgtgacctataccatataatgtgtatttgttttaggtttctcctcttggagatagtcttacaaatacataaactacttggtagacgagtctatagattgacgtgtcattcatgccaatatataggagcagatacggatgagtctttataaatgcatgaacatcataagttcgctcgtcacaggctgtttgtttgagtttatttatcaaatttatcagttattcaatagtgtttttttctcataataaattaacaaacagtatttttaatcataatttttcagccaaacgtatagtctaaattctcaatcacagtcttatagaatatatattttccaaaagattttggacggaaaagtcagccactcctgtcctatcaagctatagcttatattaatgtgcggtgtactatatttaatttcttattaaaataattggtggtgtcactgattgatttgatttgactgggtagctaaaaaaattcagtcggagactgagccttgtttagttttaaaatttttggacaccctaaaattttcgtttatatttaataattattgtctaatcataaactaactagatttaaaagattcatctcgtaaattacaagtaaactatataattaattattttttaatctatatttaatactatatgtatgtgttgcaaagttcgatgtgacggataatttgattttttttttttacaaattctctttttttaactaaacaaggccaagtaagcaagcaacctggcgggcctacggacggtctactttatctgtgtgtgtgtgtatgtatggaggagggaaggacaccctcggagtcggaggtagacgacgaccaccacctccacacaccaaataattattatattgacagaaatgagaaagccaaggcagcaatcaaacacaaatatctcatcttccaggacaggacagttggctttaggtgtggcgcgccgaggccgagcaggcagctactgctactgctagtagaggggaggggagggagggagtagcaaacgggctgtgcgggtggccatggaccccaccggcggcggcggcggcggcggcgacaccattcccctcctcctgacatccaacaagcagcagcaggaggaggactctctcgcgggcgtctccgactaccttgggcggcccgtgcagcgcggaagctccgggggatggagatccgcgctcttcgtcgtgggtacgtaccaatccaatccaatccaatccctggttcaatcggccgatcctgcctaatccaaatccggcaccggcacaggcgttgagatcgccgggagcttcgcctacttcggcatctcggcgaacctgatcacgtacctgacgggcccgttggggcagtcgaacgcgtccgccgcggcctccgtcaacgcctggtcgggcacggcctgcctcatgcccctgctcggcgccttcctcgccgacgcctacctgggccgataccgatccgtcatcatcgcctgcaccctctacgtcctggtaattaccttgttatatgttgcctgcccattttttttttttttgttttctgcctgcctgcctgcctgcccccaattaagcattcatgatcctgatccctctgcttctcctttcttctttctttccctcttctttttctttaagcacgcacgtggtaataaacaaagaaagaggggctcgggccaggtttagttctgaattttttttagcattttcgttttatttagtaattaatatctaatcatatattaattaagtttaaaaaatttacatcgtaatttatatataaactatataattatttttaatttttatctatatttaatatttaacgtgatgatgaaaagttttaaggcgcgaaactaaacacggcctcggtcaatatcatcttttgtttttcctttttctgtgggtttgttttactcgtcaggttttgtttggttgttgtcggattcactccaatctatgtgtattggtatggtgtggattggagtgaaatttagttggctccattccgtatcctccaccgtgtctatctcatcaatcattttttttaaagaaaaaaacagagagccgccagacccaggctgccgccgcaacaccacaaccgacgcggcgctgactgtactgctacgtagcgtatctgccgtatgctgctacagtgaaaaaactaattttttaaaaaattctcgtcactttgaatcttacggtatagagtatttaaatatagataaaaacaaaaaactaattaaacaatttatctgtaaattgtgaaataaatcttttgagtttacttagtctatgattaaataatatttactaaataaaaatgaaattgctactgtacctaaaaacaaaaaaaattggaaagtaaacatagttcaccccaaaaatccaaaactttttaaaattctccgtcacatcgaatcttgcagcacatatataaagtaaatatagatgaaaacaaaaactaattacacagtttgcatataaatctcgagacgaatcttttgagtttagttagtctatagttagataatatttactaaataaaaatgaaattgctactgtacctaaaaacaaaaaattctagaaaaaaacaaggcctgagtattttattctaaaacaagtgtttccactattgcgtgtccacgtgctagggattgcaactttttgagtataaaaaaaatggttttgctagcgcccggacgttcggcgcgtgagtgtgtccggacgccgggccttccccccgctcgcctcccatatggaaaagaaaaaaggaaaaatagatatgctaagccgattctatccgtccccacgacccttttctccactcatcgtgcaagacttgccccgcctcctacgtgcacgagatctacttgcctccaacctcgccgcctctctaagccgatcccgtccgtccccgcgtccctttcctccactccccatgcaacgactcaccctgccttccacgtgcacaggatttgccctccaccaacctcgccggccccctgcacctccgatccgcccatcaccagctcacccctacaccccgcccagcaccagctgcaacaacgaaaaaacaagctattgaaacaatgaaagaacatatgatgcaacaaaggggaaaaactgctgcaacaaacaaaaaatctattgcaatatcgaaagaacatataatgaaacaaaacaataatatgaactgcagcataaaaaaatactactacaacattcaaacacattcattgcaacatcaggggggatctgcagcaacaatgaaaaagagctattgcaacatctcaaacactgctactgcaacaatcagaaaaatgtctgttgcaacaataaaaaaaaatactattataacattttcaaatcattcgttgcaacattgaaaaagaacaattccaacaacgacgagatatgactcccaagggctcgccgaaaccctagccaccgtcgcacacgttacatccagacccagagagtggagaaggagaacgaggataaggccaagctcggtctagagggaggaggaggaagaagaagaagaaggctgagatctaggcgaggacctcacctacctcgtggggacatgggaaagccgccgtcgttgccctccctctccggatgcatggaggccgcggcgaaagagagagagcaaccggggtaggtgcgggcactagtatgggggaagaagacgccggagtggttgagagctatgccacggtggaggaggagaacgtcggggttggtgcgggcaccaggcaccatcccggccagagaggtgcgcatgcggcgcaggcggggatggccgtggagtggctaagtgcacagtcgagatgtagggtatccgagcgggggcggcatagacggcgcaagcaagtagagtcatagagtgggcgtacgatgcgggctaggttcgtaaatgagtgtggatgaagatgagcagttgggtccgtagatgagtgaatgaggatcgtccggacgagaaacacataagggacgccagtaacatatcattagcgtaaaaaaaaaagtctacatgatgctccaatccacacgctggtctgtctgtgtgggttgccagcctgtcccgtcccgccgcctcgtttgcctgctcatcctcatccatccaccaaacaccaaaccagcagatggaccagttccttgcgatttaaattgcaaatggactgtcccctgcctctttgacgtgtatgggtcctttcctgtgtgtctagtctgccctgctggctgctgcctgctgctagtggagtggataaccgggaccaagcaagccacggagggatcaggattcagtgactttgcttcatgaagtcacggtgtaactttccatccatctcacacctccgttcaagatccaacgactccaaagcaattttttagggaatgctggcggcgggagcgctcagcttgaggcgggagtttccctcgcgcgctggccgtcccacgcgccgcttcactttcctggccgcgcggtgcgccgtcggtcctgcggggcgcgcggtccgcgcccgcgctgcctcagctgcctggccgcgcgacgcggcggctgtctcgcgcgccgcctcgtctgctggccgtgaactgcagtctgcattggtttgaaaagagcacgcgttcctgccaaacctgagtgtgtctgcattggtttttcttatatttatttatagttgatgatatctagtaaatgtaaaaagcttcctgcggcagctagttatagcagtgggcaaattagtttctaaccctcatatttctacaagctaggagagattcccgataaaaaaggaaatcattgttatgaagctggaggctctttttttaaactggtttataaaaggaatagagatgctgatgtttcttctgattttctcttgtttgtagggctttctttgaacaataatattttttgcaacattcgtgtcatcttccttgaacttgaaggccacttggtaatctcgctattcacgtacgaatagtgcttcgttacaaattacaaggtggtggaaagcatcgatatagtgaggagtacatgtatgaagtatgactttaatgcccgggaaagcacgagattgaagcgaactga

SEQ ID NO: 4749 - DNA, 4840 bp, Sorghum bicolor
tgtgtgtttgcaacgtaaggtcttgagttttttctaaagaaaagaattgtgagcatgtttctttgtgacataaccttttcgagctgggttgcctatattaataaggacgaaaaagttaacaggggccgagcctttgctctgtttgggtcgttataataatagtataacaggtgatttctggggtgcaaccataatctctcttattacataacaaaaatgactaatgcaaaataaacacacatggagtgaccatactctttatctttctctcataaaaaaatgcactatgaaaaccactctttaggataatgcactccaaggagctaagaggttgccttgtatgggattcgatctccttctctcttattaatacaaagatacgcagttcccatgtgacttcgataaaaaaaaatgatctttttttctttgtcacagaagttaaaatgttcttcaacagttttttttcttctcattttctttttagcaggttggcgacttcccggagagagacccatttgaagatgacgagatataggcaaccgaggaggggtgcatgtgcatttgaaaagggtgggaggtccttgttgagttgcattcgaaacgtgtgtaaaattaatttggagatttgagtgcgcgcacttgctgttactatcttgttagttacgtactctcttcatcccaaattgtaagttatttcaaaaatcttggagagtcaaagcattttcacgtttgatcaaaattataaagtgaaatactaagatttgtaacgtaaagtgagtatactatgaaaatataattaaggaagaatctaatgatatttagttggtatcataataataattattttattatataaatttggtcaaactttaaaaagtttgactctaagatttttggaatgacttacaatttgggatgaaggagtacattccagagatggtacaatgctatctggctgttttttggggctgatgctgatatgttataagagagaaaaatactatttcatatctgaaaaaataggactgattttggctgagaatggtgggttactgaaaagcacggtaagcgattatataaccggtcacattgcaagacatgcagtccatgcgcaggcgtgcgtgatctcttgtgctacgtatatatgtgggtgcttctctactattccatcctaagttataagtcactgcaagaatattagaaagttaaagtatattaaatttaactaaatttatttgataaaataataactattatgattattaaattttttcttaattatatttttatagtatactcactttatattgtaaattttagtttttttttattttggtcaaatttaaaaatgctttgactatctaagattattggaatgactagggagtagaaaatgtagatggtacagattttctattttccttcccggtcccctgcactgcgctgcaccccttcaaaaaagcagaggaaaagatagggatttttgtcaacttatgcataaattttgagttcaaattgcaaaaaataatatttgtatttacaaatagttttatcataaaaatgtattttatgattaaccaaatgatttataaatgtaattggtttatctacctatccatctatctactttatatcaactaaacttaagattaattgattcattaaaaaaaacagtaatttacattaaaagatggagggagtattcggtcattacaaagagggaaaaaaaaagaaacacttgtgaaatttactcctacattaggccgcaattccagttccagcagcataaccacataaaatgaaaacaaagagaaaagagaaaatcatatgtgtttgcggtagactggtccaaggaattttcaaagtccaaaattccaatctctctctcgtatgtgtggtcacactgaccagagactactgtagactagacctggccccttcctttccttccttccttcccctccccaggtgtgagttccccgcccgccccattcctcctcctcctcctcccctcccaccgacgagatgacgatgaggtgagccgtggtctactctccgggccgtggccgacgccgacgagcagcttgccccacccccgccatctcctttttttctcgtccacaatacactagctgtggaaggaagagatggaggacggcggcaaggcgccggccagcctgggcaccctgcgcgcggtgctcgccatcctccagtggtggggcttcaacgtcaccgtcatcatcatgaacaagtggatcttccaggtttcctcctttccacccgcattctatggattctagcttcccatcttccgccgcggatctggatgccagatgcttctcctgccccattctagttgtacgagaacgactcttccagattagtttgggttgcccattggggcttgaattattactagttggtgcttaatcaaccagggttcagcagcctggtcacaccgtattttatctcgattttacgggaatgtttgggtaaattggctaatgatagacatgtaataataggataggaggttattgcaatgactttccaagtaactcctcgtcctccctttcttccatgccatactactgcctaaactaatgcagtccatttactgttcaaaccaactgattgggtggtgggtggtaacctccctctgtcaatctccgtgtccttgatataagatgttcttccctgcagaaactggatttcaagtttcctctcaccgtgtcctgtgtccacttcatctgctcttcaattggagcttacattgcaatccatgtgcttaaggcgaaaccgctgattcaagttgaaccggaggaccgctggaagcggatatttccaatgtcgttcgtcttctgcataaacattgtgctgggaaatgtgagcctgcgctacattccagtctccttcatgcagacaatcaaatctttcactcctgcaaccacaggtaccttgattatgctaccctcgcttttcgttcaatcttccacttgttaccttgctgtggtatcagaagagaagatgatacgctcgtttcatgccatgcagttattctgcagtggctagtctggaataagcatttcgagtggcgcatatgggcttcgctcgtccccatagttgggggaatactcctgacttcggtgacagagcttagcttcaacatttttggtttttgtgctgccatggttggctgcctggctacatctacaaagaccatcttggcagagtccctgctccatggatacaaatttgacaggtacacacttgtcttatggtattggtgcccatgtgcttatatttagcagctgcgtgctctgccaataacagtgttcaaagcatttcatcttcttccgaaatcaatctcttcttcgagaccatttttcctgctcaatggaggttggaactgctaattaattagtaagatgatttattctattttctgcagcattaacacggtgtactacatggcaccctttgccaccatgatactggctctaccagcaatgttgcttgaaggaggtggtgtaatcaactggttctacacacatgattccatcgtttctgcgttgattatcatcctaggttcaggggtgcttgcgttttgccttaacttctccatcttctatgtcatccattcaacgacagcagtgactttcaacgttgctggcaaccttaaagtaagaagacatgactatattctgggccatgttcttctccctactccctctactcgacattgacatcttaatggacatgcttctgtaggttgcggtggctgtgttagtgtcatggttgatcttccggaatccaatctctgcaatgaatgcaattggatgtggaatcaccctggttggttgcactttctatggctacgtgaggcatctgatctcacaacggcaggctgcagccccagggagtccaggaacagcgcctgcgaacctttcaagaaatcagatggaaatgcttccccttgtggacaacaagcaagaaaaggtttagcaagttggcatttctgcagtggaagaggtacatacaaacagatggtatgcccagagaagactgaccgtggcgatatagtgctgggttcaatgaaggctgcataagctagggctcgcaatagtttcttcacttcttgaagagagaattatatatgtactcatgcgtgtgtggtgaggttggtcatagactagtaaattggaacttcttatagcatcttttcctccttccatttgtgatattagtctccagtatcagaattcaattccttattaggaaggttgatttgctgtggtgtctatgcttatcctacatattcgactgctggcctgggaatttatcatgtgcactgctcgaaagctacagcctgctctgttggcgtaccagatgctacagcatttttccaaagctgcgtgtaacgctgccatggcccatggctgctaagtgcgaacggtatgctgtcatgcaaggaataaagccaggcgcctagagtcaatgttgcccggtccggcactcttggcatggtactataacagataaacagacacatagacatgcgccgtggtcattgacctcagcacattgtggctccaacaagttttgcctaatctataagctgaaaactttgacagcttcttctgctatgtatgtatgtacaaccttcaagaatgagccagaagaaattggtttttgatgtgaagagaattaagcgcacgacaggattgggcttggatgctgaggcttttcatcgaccactcccggcaacttggtggtgttgccggcgtgagcacaggacttgcaggacaccgacggtggattctccgtgctccagtcatct

SEQ ID NO: 4750 - DNA, 5114 bp, Sorghum bicolor
gtccgtgttaatggactctgtaaaatcatagttttgttgtatgatcagacatttaatttcttataggctgcagtgtccactcatgatttacattgatttgttggtttttcaacccagctcggtagtggccagtttggtctggttactcaaaatccttctttctggattatagatgccacatatgtgtttttttgttcctttttaattgcaacagccggcataccttgcttacaggtacttctatatgtcagctttggagctatgtcctggtccttggaattgccatcgaccagatcggagagggggagcaacaaagacagaggtaaggaaaaggaaggaatatgttgtagctctgtttgcctgcagtgctcactactactgttgaagtctagcaacaacaactgtgaactctaaatgaaaattttcagcttattttatttcgggaagcctgattggtcactagagccaagtcaaatttctaactgaactagatttttgagtcagatttcattttttagctcttttgcatatgaacaaaacaatatttggagctgaaagctatcattttgccaggcaatttgattccatgctttgagcttcaaaatgatttgatgaaatgaccagtcatatacatatgttttgagtaggtcctgaacatagtatactatgatgtttaagtagctccaaaatttactgattggcttcagcctataggcatgtaggtcttcagtcttggcatgcagctttgcatcagtatctcccatccacattgctccttctccgtattattttgtttagaaaacattttatatacagagaaggtggtgaggcaatgccaagtggtatgcaagattcggagatttcacatttttatttttcctgaaagaattgctatttcaactagattgactatgcttttagtgtacttgcacattctgctttactcatgtacatttttactacaacatgtgaaataatcatgttcagttgttcatattacaaaagcagctctcttaaattcagcttaggtttgcattgttatctcagtctctatctcttggattcacttttgtagccaattgtgaataattattttacattcagaaaagtgattctacagttttacatgtactaactagattaggtatgtatttaggaaaaccctcctttattcatgctcttatttcatagatatagactattgagtgtagtatctgcacccaactcactgcatgcatcaaacactgcagttagtgaatccacctggatgcaacttttgcaacttatcagccaaacgaacaagacgagtgaatattcttatctataaggtcttttctatgtcagcaaattgcaatcatcaagcctgtcaagaaaactacgacagtcaaattatttattgcgcgagcaaataaaatggccttattatgactaggcttgtaactgattatctattagcatgttttagcaaatatcaatgtgagcttacagtaagagagctcttgattcgatgggccccgggagggatgtaaaccgctgctagcaaggccacaactgccacacaagtgcgggagaaagggagggcggccatagcatatggcttctggaggagggcgacatcagtagtttgagaagccaagctccctatgtttgtgattgcaagatgaaagcaaacacttgggtggaagcatgacaagcaccatgcatgctacagatctgcaaagctgttttttttcttgcttgcttaaaaaatggcaaaatatataagtagcttttgaaaatagttatgagattacatcagtaatttatattttacaattagagtcatcacttgatctcttgaaatacttgaaaatatagatttttaaaaccgtagcaacgcacgggcatgaacctagtattattaaaaaaaaaaagaaaacccacaccagtcccgtgaaagatctttttctttcttttttttttcccctcaacaaaagccgagttgctggcggacggttgagagaggaggaggagcgccagcgctatcctatccatccagtccagcatccactccgtcttccaagctttccggctccctcccatcccaggcaacaagaaatggcggcggcctccgctcccgtgcccccggtcttgtgcaagcggtggcagcagctagtgcttgtccacaccaccaagccccccctgcccctgcgcctcacgcgccacgccgtctccgtccgggccgcgccgccccgtcagcagcagcagcagcaccgcgcccgcccacggccacctcccaggaataagccccccggacccgcgcgccgtcctcccaggatccctcgggaccaagatgattatgaatacgacgacggcgaccgggaggaggggagattctctgggggtacccgggccgccgccatgcccaagccaccggccggcttcgtgctggatgaccagggcaggtgcatcgccgcagcatccaagcgcatcgtcaccatcgtacgcctacccatcacattcctctcctcctccttcctttcttttctttcgttctgcaccttggtatggttctttcattcatcacaaatgaatgcatctgcagatcgacgacaccagcaaccgccccttggagtgcattatccgaagagtattcaggagctcgcagggccacgactgcttgcttctctgccccgttgacatgtaaagctccacggccacactttcgatcgtaccattgtccattgcccccactcatactcatggcagactccaagtgacactcttccaggcctgtgcaggtcctcaagagcacaaatttcagtggatgggtagctgtatgtctccaccgtctctgccttatatacattccttcaactgattatttatttctttttccatggttcctaatgtaatggaataatgctttcttcctttcctatacgtttgatgcacaatttttacctgtttatttaggtccatgacgaccaactcaagcaaatcattccatctgttgcctatgcccttgccagagtgcatatgcactttgtcgaaagcgggtaaggaaggtgcaaacacctcaggctatctctattcatttctctgcttctatcgtaatatctctgtacatacaagcgtctttcctctccgtttcagattctgttatacagcaaggggtggcttctgctttcctgaagaggccattcaagagtttcatggtaaccaaaatcacaggcatccttttttctatgaggtcaacataccttgtcatctagtcaaaatgactcagcaaattcacccccaaaaaatctgtatttgtggatgttttttttttagggtagcctaccttgtcgacccaaaacgttttctagacaatatcacaatttcagcaaccattttcttgttagtgcaatctactatttgtgatatcctctttcgtatctcatatgcagattctggtgatggcggtgacggtgtacctttcgaaggtgtagagatttgctgcttcaatttggtgagcaaattgcctggatgcaatattaaatatgaatttctgattttggtcaacttgatgtacagttgttgtgattcagttagcttcataggataattgacctatgcagcatgcttctactggtacattacagtgacaaataagtaactgacaagtagtcaatattgggtcttcattggcatgtttgagattgctgacattttgtatctgcaggatggtgcacactatatgatttatacaccagttgatcctctcctgttcgtcgcagtcaaggttagttggtggttgttcaacttgtggtgcaattggttgttgttcagcttgtggtgcaatttagtttgtacatgatgtctgagaatgttgtcacatgtttgtgcagcataaggatggtgtcctacgcattgctgaggatgtaagcagtgttgtgattagcattttcctttatcaatccagtctgtatttagagtagaggaaatagcaaccacttacacgcccactgtgaacgtttttcaggatctaatggaagaccctggagttctggatgcggtagatgaagagacagaatttacagctctagtggtacgtggcctcatctttaccttatgtatgtagttcataatactgttttggttaagacgaggtggataagataccttgaacttgtgtgtgatgtgcaggaggaggaggaggcccttcttgaaacagtacttggtgaaaggtgatggatgccatggagcagggagggggttcctacttgtataggaagaggaggatgaggagactctgattgtagtccactcagccaagaagtagaatagaatgaatgaagctggcgatagatactagtaccagttggttttgaacaagggttgcatttgtaattgtaagcagctgcaacctgcaaagtgtatattacttggaatggattagatgtgcagcaaagcaaagcgcataaaattgagctaactagcctaggatggacaatgcagttgatcagttgattgtctgctgctgctgttaatctctgtctgtgtaaactaggtagtatagatagctcaatgggacgatcaaagccatttatgctgtgcttatgtgttgaattaataaatgaaaaacaccccaatctgatatctgaatacctgatggatggaggaaatgaagcaaaatactcccactacaaccgattggtgtcttcatttaatcatttctaaaggggagggcgtgtttaaggtcaggcttctactgtaccatcagcctaagtctatggcatggattggacccccacatgtaccatcagcctaagtctactgtaccatcatttctaatttggaggatgaagtattccaccctagatagtttgaggggttatgtagactttttctaattcccctatacatatagacgacttgtcaggcacagatacatacatctcaagttcttgtggatctgcccatggatcatttccatggaggaacaaatatcagaaaccataggctatgcttcaaatcatttctcatcccatcctctatggataaataagaagcaatccaaggggcatgtgcacaaagggcagtgctacagcgccaaaatacataagggcactcacaatgcagactctatc

SEQ ID NO: 4751 - DNA, 2845 bp, Sorghum bicolor
aatcaaatgaaagttctctccctgcgattgcggcggatagttttgttgatgaatcatatttaggaaacctccttgcggtggaaaaatcctgatagttttgtagcagctgtgttaatatgcttggaataaatactgattactgaattttacttaaacaaaaacagacttcaacagaaacagaaaagcaaggcagtactacccaacaggaagcatcctacatgtttctgaaatactacttcgcaaactgaaacaacctctgtaaaagaaaaactgaaatcaacaatacactgaaatcaacaatacaatctgtcaaacaagtactgccttctactccctgaatatggttcatgttcagtatcacacaatgagaacagacttatctacttgggtatggattgagcatctgtcaaaatcacagcaactagcaaagagcaacaatcaaaatcacagcagtatcgattgactaaaaaatagatcgaaatcaaacataccatgaatttggatcttgtgcaaaattgggaggtatggagccccatcttgctccttgcagtggaaatgtcggcgcaggaagggatccaggagcttgccctgccgccggcacggtgtgggtgggagtcggcgcggtgggggtgggagtcggcgcggtgggggagggagtcggcgccgctggggaggaacaacctggaggtggtgacggcacacgagcggatgccttcttcagtccaagccggccgcgggtcttgccggtattgcctcctctgccagcggcgccacgcctagaagcctcggccggcggcggatccatggagcctagaaccctaggagggaggacggtggatgggacacgagggagaggaaggcgagcttggggggagggagggaagagggcgcgggaaaaggacgaggctgcgcgcgggaagaggcgaggctgcgcgcgggaagattgccgacggcgcgcacctcccgcccgcacgggatcggggaagacggggtgaaacgactcagtgctcgtttcatccgggtttcaagtcctgggaaacgacgcccgaccagtttcaccgtggtgaaacgattctactctctttcctccctatttcatgcaaaacgctgatgtgtcactatattaaatgctggtgaaactctggtgaaactcgcacctaagtagtaaccaactttgctcctcttcttgaaaattaacctatttccttataacgaaacttggggatctcaacatgacatcattatatctattttatatttttatgtaatttactataattttttaaagattcaaccaaaataataaaaaaataaaaagacaaatctgtcttaaaaaacacttataaccagtcagggaggtaaaatgaacggttttaaaaatttaaggaggtgctttatatggttttagagctcagagaggaaaaataggtttttgcaaaagttaagagaggtaaggtgaactttttccaaataaaaaagacatggcaatggcatggcaacaccggacaaagaacaaccgagcatactagaatatttaaaaaagtcgatatatcttatactctactactttctctgttcaaattaagtcgttttgattttttttatccaataataatgtatctagatgcatatcaaaatttatatattccaaaaaaaaccacttataatatattgtagatggatggccgcgccaaccgcggtggtacatgctgctgactgctgaggaatgaaaatgaagttgcctgatccgtcgggcacacgatcggtcgcccggcctcttcgatgtcgctacttgctattgttgtgtctacttacttaattagctaagcataaggtgtcgatcggtgtcggacgcgcgcggacgatcatatatgtgcatgcatgtgcacttagcttgttctcgatcgatcatcaaactccggtcctcgcacactgcacacgtacaggcggtggacgacgacagtagaatatcgatccgatccgaccgagacagccgtgccatggcttcttccttcggcgaggcccccgtcggtgacgccggcagcggcgagaagatcttccgcaccaagtgcgcgcagtgccatacggtggagcgaggcggcgcgcacaagcaggggcccaacctgcacggcctcttcggccgccagtccggcaccaccctcggctacgcctactccacggccaataagaacatggccgtcgtctgggaggagaccaccctgtacgactacctcctcaaccccaagaagtacatcccgggcacaaagatggtcttcccggggctcaagaagcccaaggagcgcaccgatctcatcgcctacctcaaggaatccacggcggcttaattattatacatacatataacgtacatatatagtagcttctttaatttaattaattaatttcttcttgcattgaccatatgcatgcatatgcattttcgctacatatatactaccaataaattaattatccatttctttattccacattttttacatcatccatctatatatatgtttgtgaattgaagcttactctatataatcgctctgggcttcgattaactgcaagaatatatacatatatgttatgagctcttttacagtggttgagagtacctcttagttcctcctggttcctaagtaattaattagtgataattatttttatgagtggaaggttaacatggtaattgcggctcctcctccaccccttctccacgcacgcctcgcccacacgcacctgaaggacacaatctcgtgtctccgcctgacaacaagccggttactccgatcaaggaatcagctaggtggttgagtatacgtgatattggagggaccgg

SEQ ID NO: 4752 - DNA, 4039 bp, Sorghum bicolor
taattaaaatttcgggctccgtccgtatttttctgtttctgtatatatatatccgcacatattctattcccattttttatcctgaattttccaaactcaatcccatttttgccaaagatatagagatgaaagcgcgcgtgaaagggcagtttctgttcatttttcatccctatatatacacattacgctccactagcctatagcggtgcaaccctagagatccattttccaagcacgtctagattctttgtttggcgctagcctagtttcgccacatatgcatgaacacatgtcaagaattcaagatgcgagtgcaatgagactgcttttattttatcctgtaacaagcgtcttttgtcgtgcgagtgatcgaccagcaactaagacacaaaagattagacaagggtaggttacaacatggattgtggttcgaggttttcttaagggttcaaggtagacatgcatgtgtggtagcgaaggtgtcactgagggagtgacattgaacatacagcaagaaggatcgatagtggggcctagtgcaggtgatggttaaggttgggtgaggtgaaggagatagggataggtggtggtggacaacgccggccaatggcgaggtagcctctaaccgttggtaacaatatgtaatgtgaaatttagaggattatcgaagccggagaaaggaaagagtagtcagagagcatgtgactcagtcttttttgctgtagtagtgccattgcgcctataaagagcctttgatatgttgcatcccaattgcatgtgcacatttattaatgacatgttttttgatagcattacaaaagaagtattgagacaagactgaactaaatataatgtaccattttaaaaacaaacggacaagatgttaaaatgtatatatagtgaaaaaggagcaaagagtatgaaaagaggagagcatgcaaatagaactcacacttttgcgtaccctaataagggtgtgaatcaaggaggttttttctttttcttttttgattgaaacctcaaatagaactcacacttttgcgtaccctaatacgggtgtgaatcaaggaggttttttctttttctttttttgattgaaaacctccttacatgttacattaatctctttattattttatttaaatgaggcagcgctacagggtcaacaaatccaatgtgcttttgcaaatagtggaaaaaaacaacggtacaaaggcagccctatcagtagggtcctatactactgcgagtaggcctcacataaagaagagcatgcggctgcatacccaagtggttggaacaaaaaaaaaaaaaaagagaaaggtgattgtgcaatgtgcatgatatagacacaaacaaatataagttcaaatgactccgtgaagtaaggcattacgcttggataacgtcctaatctgacatttttttttgttcaatttacttgtggtgattttttttttttggcgagtgtagcggtggtgaacaataagtaaagtgcaagaaaagaaaaactgcgtgactatcgtaccggtttcgcaaaaagaaaaaaaaaggcagcgtcttgaattggattgtgccatgtctcgtaaacaaaaattaagaaaggaggttttgcattacgatttaggagtatacaaaaagcaagcagtgcagaggacaggtcgtcgtgtcgacagggcaaggcgaagcgagcagcgggcgcggggttttgatttggatctgggagagggagccaaaaaagagcgggacggcaactttggttggcgccaagacgaagaagcctctctcatgtggaccgtccgatctgggcttcctgcttggattggctgtggatttccaaattccattttggggattggcaatttgctttgcttgccgctgccgcctgcaattcattttggctgccccgcgcgcgcctgcctgccccgccccgcccaatcctttgccgcctctgcctttattactccgatctcctctctctgtctgcattcgcaatcgcaatcgcactcgcagtcgcccccaagcaagttgcgcatccatccatggctggaggcaagtccggcggcaacgccgcgcgcagcaggaagcgcgtcgaggccaccgtcctcaagcgctccagggacggcagcgcattcaccagatggtaacttcaccttcatttctacttctccctgctcgctcgctcggtcggtaccagatctgacgagaacgaatcccatcccttgcagcgaggcctgcaacaaggatgtccccgtcgtcctcatcgacatgcacagctgcagcctcgacaagcacatcaggatgatgctcgaggcgcaggtcgtcgagaagaccgtcgaggtcgccgccaagcccgccgaacgcaacaagtcctccgccaagggacacggaggcggcggcaacaaggatgccaagcgcaagcgctcgcccacagccttcttcctcttcatgtatgcaatgcgactgcgactgcgactgcgactgcacgcacctttttcttcctccctctttctaagtagatgcggataaccaaaaaaaaaaaaaatcctcccatctcatgtgttgtcgattttttttgtttcagggacgacttcaggaaggagttcaaggccgcccatcctgacaacaagagtgtcgccaccgtatgtccttttcctctacgcccagctttcttttccttcatcccacccagtttcttctaccttgagtagttgttgccctgctcatcttatcgactcactcactgactgactgaatctatctacctgttgattgaaggttgcaaaggaaggaggggagaagtggaagtccatgacagacgaggtcagtcagtcagtcctactctgtttctcttctctgttctgaatctgaattccttgataagagtctttctggcgttccgactcttgctcatcattcatcctctgttgttgttcatttctctggatcaggagaagaagccttacgttgaaaaggccgcggagctcaaggctcaagccgagaatggcgagggcagtggtgtaagtccatcttctcttctcttctgcctctcccttccttgctggacatggtcacgtgtttcagcctgctactgatatctgaagtatatttccctgattcggtgttcgacttgtgtgatgcaggagaacaatgttgccaagaagaaagccaaggcagatgacaaggatggggagcaggaggtggatcagcctgcaaagaagcgcatcaggcgcaaggctcttgacgaggacgaggatgacgctggcgaccaggaagatgaggatgagcagaacgagttggatgatgacatgtagatgtgcaaggcgagctgttcttgtccatttctgtaaatggctggcagatgtgtgtcatgctagaaatgtcacttgtttcaagctaggcgagagggaaaggggattggatggattctagtcgtagcatcactagtctagtgtagtgaatgtggcatgttgatttcggtatcttccagtcagtgactatccgttctctgaatgaaatcagaagcattgctagctaatgaactattccatgatgcagttctgtctgctcccatcccatctccatccaacacatgtgctcaatgcgtggattcctctggatttctatactacatactgacattcatggtttgttggctgagatgaccatggctgttgtagcttcattactccagcccttagattgaaggtcattggctcatgttgctttgtttctgagtggatgaataaaagggcaaaggagttgatctactgctctctctggctgggcaatccctttgaatttgagctgtattgcatttgacattagtcttaactgatcagttgcaagtgcagaccaatctgaggccttgtttatttagatttaaaaagttttggattttgatactatagcatttttgtttgtatttgacaattattgtccaaccattgactaattaagctcaaaagatttatctagtaaattacaaacaaactgtaaaattagttatttcttatctatatttagtgcttaatgtatg

SEQ ID NO: 4753 - DNA, 6810 bp, Sorghum bicolor
caattaatcaattgcgtcgattcaatgtttctaactttctgcagagttcgatttcttttgtgacagttatggttcgatgctcctggtgtatatggttcgactcaatcatcttatggttcatttttggcaacaatggtgttgctctaatagaggagacaaggaatggtctgtggtcaggattgttgttagaggaggcacggggcgaaggcggctatgctcgccaacgaagctactgcggtgtctagtgttggtcagctgggaatgaaagagaagagatacgaagaggacaaataaaaagaaaaaaaactaacaaataggctccacatgtggtagctgaccccactttgacatctctacgtcaaggattcatctcaaccctcatcaatcaaagagaaaatgaagtcatctcatcctcacaaatcatagataggaccattccaatctattagctttctagaacatcccttatagtaaatcacggaataggaccatcctcacaaatcatagatagaaacattaccttatagttagtaagaactagttaatagtatttttattattaagggtagttatctacgatagcagctaactattagcttcctagaacatccctaaatgaacttcgttttttacgaaataaagtgggttgtttgttgcatgatatttgctcagtggatccattatatgttacttcatttttcatggtttctctgttcggttgggacaagaaatgaaagccagggacgaggaccaaacttctctcgaatataaaaaccaaagccaaaacgaaaactaacacttcaactcggttagtttgatttagcttgatttttgtggtttgcagtttaatgtggaaaaaaataaaaaaaagacatggaaaagggggcaaaaatgcaaactggctgccaatagtactcaacatgagaacttctcctaggtcccaggctcgtgaatggacatgggccaaacatgcgctaattgacatgggccaaaccagctctactgggccatatgaaatatacactagcggcaggttgttgccatctcgctcaccaactttcaaggaagtctattttttttctccaaactttaaaatcgagtagatcatctcttttaactttttaaactgtacatttacttttctagagtagttttaaaggcgttattgctatagtgaatagtggtttgctacaatgatgatggttttgtcttttttttttaaattatttcgattgaatctttgagaaattataaaatagaaaatctaattagactccacataaatatatctacacaatagtataaagtttttgctataaaagtttttttatttattttggctaaatgtttaaaaaatcatagtaaattatagaaaaatcataaaatataaaatctaattttgttagactccacatgagcatatctacacattaaatatataatataatatactttaatataattttttattataattttaaatctatacttttctataattaattgaaataatatataactacaacttctataattatttcatcgaactaaagcatacatggcaaaaactgtggatgtgcctcgggagaaacagatgaggatggtcgacatgatatcatgacgtcgtgcaccgagtaataaatgaggggatggacgtacgtgtgacggtgtgagtgagcaacattttcttccttcccaacaagaaatcaattgatgattgatgcatttgttttagaagttcttttcttttctgctcttatattagtatatattattattaattaagaataataaagcaatgcatattattatttttttctggaaggttatggctagtggcaaatggtggcgccgcgtgttagcgtaacctccgaccctgggaccgcggcagggatagagacggatgacaaagcaacggatgctgatttttttttttcccaccatcctcctatcaattcaggaatcatctacataaataaatgccatactatatactagtagtattattgtattagtatatccgtgagaaggaaagattaaatcagagattcattcattcattcattcaattctgattgtttccttccattccaaaccgaattctggtttatgcgggcggaattccataaggtcctcctcccttcgcccctccaaatcctctgcagatttctcatggcagccgacgtctccatccccactcgatccgcctccaccacccgctaattcctcctcgttctagtcccctgcctctctcctgcgccgactcgtcttcttcctcgcgtcactcccctgccgctgctgctgacgctgctgccgggaagaccaaatcattcccgtcaaggtgcggccttttctcctcctccgtgcgtttgttctgactcgatctgcaaagatttggattttactgctctgtaacaattttcgggagacgccgtcctcacccgatttgatgtgggattcctctgcggaatttggggcgggactgatgccgctttcagaggcttttgtttccccttcctttgggggtgatttcgtgctcaaattgccatcttttaaccaggccaatgcacttttcgtacccctggagacgactctggattccgggcaaattttagatggaccatcatgtgctcttttctcatgactgtggaaaagaaatccctcccgcttttcgaaagcaggcaggttgtgtaaagaaatggatcactttgacctgtgattttgttattctaggtctctccaccacatactatactatctgggttgtgatacaactgtgcagactgttcgtgttactgtgaagctacgcctctcctgcttctaatttcaattttattgatgttagtagtgtctgattgcagttgttttaggtgattggtgctttcaacctggtggtactcaaggaggagagttctgtcaagatggcatgtccaaggggaaggacatcattgcccctttgtttctttctgatgatttgcctcatggctcagctgggagcttccaatgttgtactcatggcgaacaacactaccctgtcgttcgatgatgttgaggcaacttttagtgagtgctacacattgttacactatatgtccatgtatctctatacatgtcaatagcaatctggtattctaatggcaacacaagcaaagctagttagctgtttttttctcaagaagacgaagaacagtataagaaacccgtacatcaaacacacaagcaagttgcgtatcattatattaagaagacaaagaacaatataagaaacccgtacatcaaaaaacacactccagcgcattcttagttagttacatggtatagtagcatcattctatctttatgatccatagtgtgcaattttacatcggtgcctgaaccaatctatctatctggttaatgcaaggattattgaccttttttgctcttcctgcagctccagcagtgaaaggttcaggtgtaaatggtgtcctttatgctgtggaacctatggatgcatgcagtccattgagaacaaaagcgattgaaggctctgcctcaccatttgcattggttataagaggtggttgccaattcgatgacaaagttagaaatgcacagaatgctggattcaaggctgctgtagtgtatgataatgaagacaacggcatccttgtttcaagtaatgatccagacttaatctttttaccatagcgtcagttacatgtaatcctttaccagtgcacataaaggggtgttgctctatactagtgtttgagtatttcttgtccataatgctgtaagtcattaaactgttgagaagaggaaaagtgattttgtaaaacagatccaaactactagatttgtttcatcaaaactaaaaggtagagataacttaatggtcaaacttttaccatttacactacttggtatcctcatagatttgcaatattaattaagcaaggattactgcagtggctggaagctcgtctggagtccacatttatgcagtgttcgtctctaaggcatcaggcgaggaattgaagaaatattcaagccaaactgatgcagagttgtggataataccaacatatgagaactcagcttggtcaatcatggcaatttcattcatatcactgcttgctatgtctgctatcctagctgcttgtttctttgtgaggagacaccagataagacgggacagagctcgacttccccaagttcgggagttccacggaatgagcagtcaattagttaaagcaatgccaagccttattttcacaaaagtgcaagaagacaactgtacatcagcaacatgcgccatttgcttagaagactacagtgttggagaaaagctaagagtgctaccatgtcgacacagtatgtttctctcacatctatttaactgatgttttgggagtttgtggtctattcattttatatgtgagctgaatctggctcactagccattactgtctatgcattgtttactactctttactatttgctttgatcacaatgtaagttaatctaggtttattccaaactttttttttcgctggcactactgtctatgctttgtttactattcttaatacatttcatcacaaaaaatatgactcatataggtttgtcctgagccatctttagcttggagctactagattcatcatggaaactactttcacaatgtataactgtttcttttcaagtcaagttaacaatatattgcttgtccaaaagtgtcatattgcttgcccaaaagtgccaagcaagtaatatttgtgacaagcggaagtaggtattagacacaaatgcagaatagcactacaagaatggtagtaagagaatgtcatggtagagggcgaaaaaaataatcacagtacttctgtattttttttttgccagagatttcagcttggtgtacattatcatacaacatttcacattcgttcaacaactttattttgctttctgatctaatgatgatgcacatattgaattttacttgcaaatttgattccactgtgtaactagtggtgcatgcatttaaaacatcaccgggtatacttgttaactgcattctcatggatccctcttctatataattataaattataaatctctccttaactcgtgacctgaggcttggttgtttcactttgcactttgcagagttccatgcagcttgtgtggacctatggctcacctcctggagaacattctgccctgtatgcaagcgggacgcaaatgctggaacatcaaaccttcctgtatcagagtctacccctttgctttcatcatctgccattcccttaccagaatcaactgctttggcttccttccggtctacagtagcagcatctccccccaggccaatcagccggcatccttcatcacagtccatatcccgcaattactccatttcgggttccagtatccctcgcacccctaaccctaggttttatgcaaactcatctcctttctgcacccttgcaaatatgtcatcctcatggtctcgcacttcgcaccttgcatctgctcactctttgtgcggtggccacttgtccccaccaatcgacatcaggaatacctcacaacacatctcccgttcggcctatggatctcccagtcgttacataggctcatcacacatgtcccatggatctccgagttactaccttggatcttcagggcagcggattccttacctgaggcactgcacgttgtcaggcccgagcctgttcaccatggtgccccagtcaccgcaacagaaccagtcgcagcacggtggagactcggaaacaaatctgtcagctgctgcatcaactcagtcattccgtcagctttacctgcagcattgtcctgattctgacacgtcatctcagtcgcttccggggtgctgattcttgctgcaaaattcaccattttaacaatgatggtggctccagtaagctccaatgagaaatcttatctggtaccaaattgacatgtggatctgatctcgtgaacataattcaccatgatgataaaataaggtgtgacaactgcttgtaagaagagagaatcggcaaccccagaatgtgagcaattttacttgctgagtgtacagggagtttggagtagttttggatttgcctacttttgaggcacgtaatgcagtcataggttacttctgttcaatagttgatgtgttgctctatcttgaagaagcaaatgcccttgtctggtttcacgagcgtttagcgtgtactgatacaactttgtaggaaccctagatgctgtttgtctattgatttttgagcctgtaatttttcttttgatttagttcatatgggcattgaaatctgaatagaataaataaagccttgggcctggggcacctgttctcccgttaagtatgatggatttagggcacctgttctcccgttaagtatgatggatttaatatcctatagtacagatagatacacccctctgtttctaggtaccacttgtgcactaacagactaaactgccatggcagccatgagcccatgacctgaatgaaatactgaaaatgaaatcagttaaatgaactggtatacggtgcactcttcagcttcattcattttagtggttgcttgagatcattttagctgagtacaattcaggaatcgagcatgtaatcatttttgcaactgaacccggaatcaggagtgcattgttcaataggaataggattagcccacaaagtaaaaaaggttaacaaaatatgttcacaccacgcgccactgaggccttgtttagttcaccctaaaaaccaaaaaactttttaagattttctgtcacatc

SEQ ID NO: 4754 - DNA, 4428 bp, Sorghum bicolor
tatagccgcacacgtcattttgtaagattaccgaacatggaacatcactctgattggtcgatgtttactgacaacattgaaaactgcaaacagcagaaactttagtgtatatctctaagtttccttcgatcttatcacaacaatgctatgctagtattatatacatggtgcattcatacatcatatatattccccgtcaaatagagtagtatgtaattctaagtttgatcacaagtcatctttttttttaaaaaaaaatggccaagtatatagaaaataatatcaatatttttgtctccaaatatgtttactaaaaaaatctattctacaattagtctaatgacacttaatcgatattataaatgttagtattttctgataaatttggtcaaatttgaagtgagaattgcattatcttttgagacaggcagtatacatccaagtcaaccgctctcatgaggaagcaaagcaagtaagcaaccatctcatctcataggccacatgtaaactccatgaagtcatgtgatgtggtgcacatatactattctagggctgtgaggtcggctgccattggttcacaaaatcacaaagaaggtgccgtgtaggaggcacccagctagcctatactactgtatgtctcattgcatgcctacattctttcattgctgactctccaatctccatgacagatggcgatcgtagtttttctccaatttaattacagtcctagctagtattgcttgactttgctttggccaatatgtggtcaggtcaaattgccctgggagcagattctgtgggttcacctgctttacctgcggcttgtttttggcacactccccctcaattaacatttggtagggcgctaaggttttaatctttcacaagtaatgctatgggtccctctcatgtagatgttattcagatatttgactgagagattcacaaggatggatgtaattaaattaactactgcatctgttagctgcagtagcctagcccactgaatactgatggatcgttcaagtggcaaatgtaactatcagggtacatacataaactcctgtcaggaataatccgtttctgtgatgaacgcatggatctggccgtggattagctgggcaggaaaggatattagaaaagacaagggccaacatctcaaaggctctagaagaactgaccaaagctcagcttcggttatttattggttcccagttgcccattgacaaaacaaaatgtttgtgcatcacagcatcagcaaacaagcatacaggtagcattatccgctcgagctgtattaaattgcaggaaagaagagttcaaaagggactaagtatggttcattctctgtctcagaaactctgccactgcattttcttttcttttcttgtggtcacattcacaccaatgggacttatcatgagatttgtttaagcccagtgtcattgcaataaacaaaacctacttaactgacatgtagagaagtccaagaataaatgtactactttaccttcaagaatctatatttttcttggttcaaaaaaagaatctatattttcactggctggagttcgggtgtaggttgccaaaagctttcaccaacaatcatgcatataaaaagagattatattagtataacaagtactcggcaatgcgtgaatgttaataaacaagtccatcccggccaactgcatcaagcaattaaaatcatctcccagccgagtagggacaggatccaccacccattttttactcacaatgattccccattggctgttctgacttgacatagagacggatgcgatgaacaacaccaagacaccactgtatttttttcctaaaaaaagaaataaagaagaaaaggacagaaactagaagttgaccccaccatttgtcccaagaaatgtcagcaaatgagcttgcatctgtgtgtataagtagtggattaaccgaggcacagggtggttcaggtgataaggaaggtagtggttggaggatagatggagaggaaacggaaggagatggagaagggcaagtctgagctgagagtggccatggaggagcttcgtttgtgcagctcaggagatggggaggaggatcaggtgcaggtgcagcaggtgaaagtgcaggagcagcccaagtcatccaccatggacctcctctctgtctccaagcagctcatccatgtccttggttcgtaactgactatactctgtcatatgcaagttctgtactgaaagatttccattttcagttgggattattatttcgatcggttgtcaggtagtttcagcaagtctagtgttctgatcagtacttgttcagataggttcctgtgttcaggacaatgatgtgatattattgttctgagtcttactttgcattgaacaaaggaaagaaaaatttggttgtttctgtatgcatgtattgtgggtcaggtttagcattcctcagtcctcattgtgttgtcatatatgggatgtgagaattcgcatacaccctttatgccctgttagattcttggagggaatggatacctcaacttaataagtgacccacaggcatttggcctttttctgtcatgaataatgatgccaccaaattggacatggaactacccatgcaaaatgtgcaagggaggaaatttttaatctcttctgccgacagatatttcttttagcttgacacacagtgatcagtgatgtagtgccatagccctttcccaaatgatttctttttcagacatcttagtccttgttattaaaccttttttttcctataatggaaggttttattaaaatttccaagaacagtacattgagaagatacaaagtctcggaaaagtaacatattccatcagccgttgctttttccatgtgctactctctccactatatatccctctttctgaaaaatcagacttaactgacaaactctaccttctgttcgatgaagatgagattggaccaacgttgctagtcctgaggcaggacattcagcaaaatgttcaggtaaccctttctgtactgagcatgccactttatgtacagacttatattcccaagctgctctagttgtcatcgatttatttgcatctgttcgaatcactaacatattcccaagctgctctgtagttgtcatcgattcatttgcatctgttcgaatcactaacctagaattggctctcgatctccctcccgtagagattacaagatctgcatgaaagagactcttccaaatatgctagcttgacgacgatagttactgaggaaattgagcaagggacagcaaagaagaccaaaagctgcaccagagctatcatctggctgtctaggtacactgtttgacttctagttttgtatgtctggcatttaggcgtaccatctccaattgtccattctcttactaacatttccccataaacaattaacccaggtcgataaatttctcaaaatatttactggagaagctgctaaaaacacctgagtcaagcctggaagagattgtcgaagaagcctatggaaatactctgaagccatggcatggctggatctcatcagctgcttacaaggtatcacctgaacatttattgtgcactccgagctagtacagtcacaaatcttttttttgtttgcagatacacttcttttttgtttaaatttgtgaccatgcttgctcctgagctaattgtgctatgaattagtaggtttggttttgttcactgacctaatctgttgagcatagttgtcaggtagcactgaagctcatcccagaaagagaattcttcatagcgctgctgatgggtaattgtcaagactttgaggatcttgcagaagatgccaagacgttggcctatgctgtccagcccctgttagaggagatcgatgcaatttcggtcagggcttcgaacttcacatctgtttgctaagattaataaaagttgcagttgaagataagaatttcttgctcatgcagtctatgatttgcaggctaagcacaacttggacaagatgaaatcctcttaggacacaaggatttagccgatcacctgatgattgtacatagctgcatacataacctgaccttgccttgtgcttgtaaaagtgaaaggtttaattttgggtttgcttgtagatttctagtgccaaattgaatgtgtaaaaaatagtgttcagtgtgtccctgtagtagttttcagtgcatgtatacccctcatgacccaagctcagagtccttctagtgacaaattgaacagtgcatgtttcttggattttttttgacaaacttcctgtggatttttagatgtgtttgtcataccttgcaattattgattccagaggacaaacacatctaaaatccagaggacgtttttctttttcaaaataagtcgcgagtatgacaaaatttataggggtatgtaaacaaaac

SEQ ID NO: 4755 - DNA, 3974 bp, Sorghum bicolor
  misc_feature (1)..(1237): n is a, c, g, or t
nnnnnnnnnnnnnnnnnnnnnnnnnnnnnnnnnnnnnnnnnnnnnnnnnnnnnnnnnnnnnnnnnnnnnnnnnnnnnnnnnnnnnnnnnnnnnnnnnnnnnnnnnnnnnnnnnnnnnnnnnnnnnnnnnnnnnnnnnnnnnnnnnnnnnnnnnnnnnnnnnnnnnnnnnnnnnnnnnnnnnnnnnnnnnnnnnnnnnnnnnnnnnnnnnnnnnnnnnnnnnnnnnnnnnnnnnnnnnnnnnnnnnnnnnnnnnnnnnnnnnnnnnnnnnnnnnnnnnnnnnnnnnnnnnnnnnnnnnnnnnnnnnnnnnnnnnnnnnnnnnnnnnnnnnnnnnnnnnnnnnnnnnnnnnnnnnnnnnnnnnnnnnnnnnnnnnnnnnnnnnnnnnnnnnnnnnnnnnnnnnnnnnnnnnnnnnnnnnnnnnnnnnnnnnnnnnnnnnnnnnnnnnnnnnnnnnnnnnnnnnnnnnnnnnnnnnnnnnnnnnnnnnnnnnnnnnnnnnnnnnnnnnnnnnnnnnnnnnnnnnnnnnnnnnnnnnnnnnnnnnnnnnnnnnnnnnnnnnnnnnnnnnnnnnnnnnnnnnnnnnnnnnnnnnnnnnnnnnnnnnnnnnnnnnnnnnnnnnnnnnnnnnnnnnnnnnnnnnnnnnnnnnnnnnnnnnnnnnnnnnnnnnnnnnnnnnnnnnnnnnnnnnnnnnnnnnnnnnnnnnnnnnnnnnnnnnnnnnnnnnnnnnnnnnnnnnnnnnnnnnnnnnnnnnnnnnnnnnnnnnnnnnnnnnnnnnnnnnnnnnnnnnnnnnnnnnnnnnnnnnnnnnnnnnnnnnnnnnnnnnnnnnnnnnnnnnnnnnnnnnnnnnnnnnnnnnnnnnnnnnnnnnnnnnnnnnnnnnnnnnnnnnnnnnnnnnnnnnnnnnnnnnnnnnnnnnnnnnnnnnnnnnnnnnnnnnnnnnnnnnnnnnnnnnnnnnnnnnnnnnnnnnnnnnnnnnnnnnnnnnnnnnnnnnnnnnnnnnnnnnnnnnnnnnnnnnnnnnnnnnnnnnnnnnnnnnnnnnnnnnnnnnnnnnnnnnnnnnnnnnnnnnnnnnnnnnnnnnnnnnnnnnnnnnnnnnnnnnnnnnnnnnnnnnnnnnnnnnnnnnnnnnnnnnnnnnnnnnnnnnnnnnnnnnnnnnnnnnnnnnnnnnnnnnnnnnnnnnnnnnnnnnnnnnnnnnnnnnnnnnnnnnnnnnnnnnnnnnnnnnnnnnnnnnnnnnnnnnttaatttttgtagtataatgacatcgactttgtttgtagagataagcttacagtctgcatatctgcttaaggataattttttcagttgcaagatgtgatgtagtaattcgttactcaagctctgtcagcaaaacttgaagctcgatcgactgcaaccatcctgccatctgactgagttactaaactaagccagctatctgttttttttttttttgagagagagtggctatctgacgagagcaataggaattttgttctcaaaaggaaaaaggaaaaaaaaaagagcaataagaattttgctgttcttctcttgggcccaaactgagtactaggccatggcccatagccatgcctattagtatgggcctgacgataacccttacccacccaatctggccctccggatctcttctcttgggccgctttgagcccacgggcctgaagtcattttttgcgcgggaccgagaaggcacccgtggccgtggacaccacacgccagtcccttcgtctctgccggtcgatggcacgatatccaaaccgcgcgcagattgctgtggccgtcgtgccacctgcagagcctctctcgtccaccgcccgccgccgccaccgtgtcgccctcgcagcctcacagcctcgccgctgcgccagcaacacagcccgagcccggcgccgtcgtcccacacccacctagtagcccgtgcggtgaggcgacaaccagtgcgcgtcgcaactccgtcagcttatggccgcgctaccgcgacccatggagctctgcttggccaggacgacgacggccgcgtgccggagggcgccgacaggcattccgaagaagcggcgcgccggcgggagcaccgtgcggtgcgtggcgacggcgcccatgggggagaagacagagtaccgtgacggcccgctagagcgcgcgttcatgggtctgttcgcgcggaagatggagaagtacgcgaccaagaagaagcagccgccgtcgccggagccggaggagaagaagaaggcggtgtgggattgggactacgagagcttcgtggacgtgtcgcggcgcgtgatggtgggccgcacccacgcgcagcagcaggaggcggtgcgggaggtgctcctctccatgctcccgcccggcgcgcccgagcagttccggaagctgttcccgcccacgcgctgggcctgcgagttcaacgccgcgctcaccgtccctttcttccgctggctcgtcggcccctccgaggtcatcgaggtggaggtcgacggcgtgaagcagcgcagcggggtgctcatcaagaaatgcaggtacctcgagaacagcggctgcgttgggatgtgcgtcaacatgtgcaagatccccacgcaggacttcttcaccaacgagtttggactcccactcaccatgaatccaagtgagtacctgaaaatgccctttgttcccattcagttgtcaccaccactacctgaaaatgcagaaacagccttgtgtagttgcgtgtgtgtgactgaacatgctaatgatcatgatgtcaggtttaacacagttcagagaaccagttggcctttttatctttcagaaacatctcagtctagcagattgtttatcacatcaatcatgaacattggcccatctgcagattttgaagacatgagctgtgagatgatatacggtcaggtgccaccacccttggaagaggatccagtgtcaaagcaaccatgctaccctaacctctgtgagtgctctcagattcaccattgcaaaacggtttggttatacattctgaaccttttgtttcttcaggttccatgtcgacgccgtctgcgccggtctgtcccaagcttcaggcgtaggtatacatgagattgagttcatgtccagtgcgcattcagtttcgtcagagaatccacacagttgaaacactctatagtggtagtataggtaagagagttccattagtcgtgctttcttcatgctgcgctgcacgctgaatctctttgttatggttggtttgcttgcaggccatacgttgctagtaggagaccgttgccttgagatggatggtttgcacacggaaattggtttggtgagggaagtatcattagttcctatacagaatatacatagcgttacttgtaagtataaaagttatataagtttgttctgaaccaggacagagcactctgtctgtaaagaatagagacccatggatccaacaggattagtatttcatacactattttctacttgctccaaattaatcttcgtacgtctagttgtgtttgcaaccggtaatgcatacgcatgcccacttaggaacttatgaattttgttaaacccaaaatgaactatcgaagacgagaatacggtgaaactagattcctggatcggctcctgctagagtaaaagagccagagcctcgtgtaagctcaagctcaattccccaccggttcgccacaagagactatgaccctatccgcttgaacttatctgccgaatctgtcagccattcagcagtaacaaatcagcgaacagttatcatgacttttcaacaagtgaacggcctctatgttttgctacagtcgatcaagttgtctttgatcgttgttctttttccagccttagctcaatgactccgtctagatgagtacgtagaatccatcgtccggtatggaaatgtagacaccgagagtccaagacggctagacctagctagagtatttatgagatccccgaaggtccgat

SEQ ID NO: 4756 - DNA, 17436 bp, Sorghum bicolor
agactttgaaaaggtttggtagtagaatagaatttagaatgcttgctgttgtttccataacgctctgtaacttttttgttcgtttgcaaaaatgtaaattcagttcctctttacttctataagattattagatctgctactttgtgatgcctgcctttagtcataatgttttttgttttcctagacctgacattagctcatttgttatttccttattgggccatcaaaatacttaactatactgtatgctgggtagagagacctggcatatttcatgcaaatcttcctaggagaaatgttatggattgttatcctgattaatgcaggtgctttcttctctaaatcggttcaataatttgggaacaagacttgtctccaaactgaagtatctcctcatctcccctttcctttttctgttcacactgtactatgcttgtacaagttgagtaatattttgaacataattcaaggtacatgtctgctaatcgtaaaaaacttatttgggatttgaggattcatcacttcgtcattaggctaccatcacagaattgtgaaagaaaagaacttgccacggtatgttctaatgctgaataacattgccttgcattttttgctcaagggacacgttaatacctgatatttatgtgtgcataagtttacaaattaacttcccaaattcatgtttgaaactgatggataccaattttccctgaacccaaccggaacatgataaactggcattgtttagtttatttcaagttgaaatttaaatttggcatttgatatgtttgtaaataaatcatgtaagtaagtaaatttggaggatgcaagaaatatattatcattttgataatatgaggccccgttttcctgcaatattgtttcaaaatctcaggctcctacaaaaatacaaaattaaatgatgcgctggcttaatgttttaagaagaaaagattattctaatgggtcttgattattgtactgtctctatttaacttgaattggttgattcagtagctattttcttttatcattgagcaattattgtaattgcaggttgttgatgctggggatgtattcattcagtctaaagatacaattgaggatatttctcgaacacaagaaagcaattcctttcttgaccacatatcaaaaagtcttcctagttatttttctgatgacctgttacatggtatccagttggatgagctttataaccagtttgaggttggccttactgggtttcaggtcagacattgtacatggtttattgttccattttttggccattcaatttctttatgaagcaacagtaaatgaatgattgcaggtgaaggtattgttgcctgacaaacatagtgtttcttctacactgattaagcttgatgcttccattgcacttcgattgtgtgtattcctagatgaaacagtgctaaaacagttggaggtaagattttttaagggcagtgactcattatgtctttaattagatctatttttagtaatagctatataagtgtatactaaagtttgttcaccctagtttttgcaatgtgatttgtctgcttatgttattctctgccaatgtaagtttctgtatttctgaactattgttttggcaggtcggttttgttgtgccatttattgatgtatacctctctcagacaatgtacagtgccattgttaatttgcctagagtgaaagaaactaacttcgtcaagggcactgtgtttgataataccaagacacatggacacaagaaaccggccttaaatgtgtctgcgtctttgaagcttgccaagttgggtttacaggttgaccttgatggtaattgtgaggaaaattcaggtctcattgttggcattgaagacattgatatcaggttaataattggctactaattttgcaaccttgaattgactattttctattcttttatgtgatttactgctgtgatttctaggtatgctatctgcgaattgtcagacctttatcttgccatgaagacagtcaatgttacttccaattatcggaaggatgaatcagattcacatgtgctatgcttatctgggaacttaacacgatgtcctgaaaattctgttgacacttgcttgaatctgcattatagaactcacaagcatgatgatcaaatgcatcatgtataccagctgaatttaagtgatgttgatctgcatgttaacccatctgttattggtcagatacggatgtttttgagaaaacttgattcaggaccttcagtcagcagtgatgttgaatccacaatgattggtcagagttccatgaaatctggggcaactaatggcatacttcccaagttttccttgtcaaatttatgtggtgcagatggcacagtattcgcaggagtttctgttgaccagtttccctttttagttgatgttgaagcacaagaaagtttatactcaaagaatgagcaatatcatgacacttcaggtttgaatggttatcatgcatcagatcttgtcagcaatacacaaggtaaaacccagcgttcaaattgttcatccgcctcatcaaatcatgccaagaatgccagcagaactgttttggatctatcacttatttctgttagagtacattttcctgaatcatgtggtactttagcaacaataaccattcctgaatctatatcaacactcacttattttgatgcaagctcatgggacttgctattgtctgctaacaatttgactcttgcttcaccatggactccaccaaatatccatgagctgctctggggcacatcttcacatcgcaattctggtgtgctcaacgttcgagttaaaaaggacttacctgcactgtcaaccgaagtatgtgttggaattcaaaatgtttgttgtgtattgtcatccaagttactggctatgtttgttggattttttttgttggatgattggagtcctattgcagaacaggaattccttgtggcaggtaataatcttgagtgcttgggagaatcacatgactgcgtaacatacaaattcgagatcagtgattgtgttgtaatttttcctgtggaagagcaagatttcttttgtctaaagctggaggttccacattttttctgtgagttcattgcgaccggaagctctgtagaatttgcaaagcgtatccccaaagaactcttcagttcggagtgcatagtttccagaagagttgatatcatctgcatacatgcaagaaatgcatccatatcacttctaattgtaagcgaccaaacagattttatgctgaagcttgatgagaacgttcctaagagaatccattctcttattgaaaagcttgatgctggcatatggattcaggttccttgcaaagatataccatactcccagcagactactttacccacctcaattatgagcaaaatatcacgatgcaacttgattgctgaaggtaccagatcatcatggaacttgtttttcaacttcttcaaatgttttttttgtaatattagcttcaacttttttttgcgaggagctttactttgtcaaattatatgcagatctatatttcataaatgggatggagacagttattggtcttgttgaccagttgatttcgatcggcaatgaaagtaaaatgtacaaaggcaatgccttgcagtttttagatcatagaagtttctacgagggcaaccctgaccctagtgagtgtaccaatctcactatttcgatcaaggatctgatgattctcttgggtcagtctaaaaataaaggtttggcactggagaagattgccactgcaaacatggagtttgatgtttctgctgtactaggtgaaaaaccagagcgcatgaactttgatgttgtttctctaatgctgcagtcacccggtggttacactctcatctccattgtttccgatgggccattatctcctgttttcgtcaagtttacaaagcaccatgctggacaagatgagatattactaaatgtaccccttttcgaggtctggttatatttacaggattggaacacgattatcaatcattcccagtcatatgtaaagacagaagtaaacagtatgcctgtggagcatgcagctgctttgtctcagtttccagaaacagcgtcatcaccacttattgcatcagaatttggtttgccagatgacttcaacttagttgtaacatgtgaaactattgctggtgtactccatatacctatctgggggaaagaagaaaatcacacaagcaatcacatgggtgtgactccttttccaacagaagtgggcactcatcatgaggcagatgatattcaatattgtgaaccaaaaggttgcaagtttgtaaccttaacttttgagagtaaacattttgtggtgatgtcaggtgatagctgcatgaattttaaatgtgatctagagagattgaaggtaatgctggaaatgattcaagagaataagggtacctctgttccatttgtgcatatatctaaggttaaatcttctggttatgttcatcaaacagaaaggaatttggaacatctttctgttgatctacaagctgaatacatggatgttagtttttcacaccagatatttaacttctggcataatatggaactcaaatttcctgctgcatcatctgcatcctctttttattccgtcgcattcaaggcaggattgaggaaaggatctcttctgctaaatgatggaagggtaagttctgtaactgtgctgcttgttcctttactaaacatgaactagctgcttgttaaatgctgggaatgtttggttctggtatgtgcatgaataatactggaagttgatcttatgccaacattctgaagataaaaaaaaaacaattcaatgatattgactttgagaaaagcgcataatgaaatgctaatgtgaattatgtaatactgtaaatatcacaaaatggaaactaactagtactagctattataagacattagattatatgactaattttgtaatcagagatcattatataattttttagctgatagagcagcatgatgctgatatgttttgtcccaaagaagaattggaccatcagaggtgatcaagcacagcacggataattatgtttgcttcattaattgatgatattagataggtttgaagcatattgaattcagtaaataaaacagatttgtatttgttctcctgagctttttatacatcaatatgctgagttacataagttccattcaagctctaacctgctctttatttttcttggcaatgcttttgacagtggagcagtcatggacctgtaatagagaccttattgaagaatttaactgtgcagtttagtcaaatgaaggataggacagaagtttctgcttttgttgaccttttagtaaattacaataacattgacaaggtaaaatactacaacgcctctcgaattttggctatgatagtgctgaaataacaacttatatatttgtaggttatgtgggaaccttttgtagaaccctcaagatttcagttaagtatgctaagaaaatgtggtgatagtggactggatatatcacccagtactgatgtgtgtttaagttcaagcaagcagcttaatctgaatatatcagaacccttaattgaggtatgtgaatgtgatttttctcttgccatgcgttgttcaagaaaagaatttttctcttggcatatagcaaatgggtactccctctgttccaaatagtaagttcttttggcttttctaggtatacggtttttgcaaacagcttacaatttggaacagtgagagtacttctgttatatataattcctagtgatattatttttagtttaactgccattaaaaaactcaattcaataattaggatagtagactctgcaatgaatatttgggttgagcatttctacaagtacaaccattttagtacagtcagagtacaactcaagatccaacatttgaaatcacttggatgaaatcacattcctagaagtgtgtatgtgtgcgtgtgtttttgtaaggggtttctaaatccctgcttttttttcttaatacaataaagcagcacgaggaaagaagaactcataagtgtattggatgattagatgcatcgttgtactagttatactcaaatggttgtatggaaagcttttcccatttggattatatctgctacatatctggttttaaggaaaatgagaggatatttggcttatttgttttcaaggaaaatgagaggtaggagcagaatttgggtctttcaggatttgggtcacttgaatcagttgaggaacacttagaatttacttatgagacacaatttttaaatttattgttttgttcatagtcagaggtgaaattgttttgaactcttcttttgcatatgtaggctatcctcagacttagccagatgattacagattctcttgatccaagtaatggtagtggtcttcgggaagatcctggaatcttgagattaagccatgatgatgttcgtaccagaagatacgcaccatacattctctcgaatgacacatcattgccctttaggttcaaggtgtaccgtggtgctgttaattcagatgatattgacagtttctctgtgatagatgaaaactccgtgccggcagggtatgctgtcccaatttacgtcgaagaaactcttgatgaatttttcttccaacacagagaagcacgatcgtctgaccatctcatcgagaaacgaatgagtgctgtatcacactatatgatctccattgagtttgatggaacgtcaggcccttcaaaggcaatgtcaatggaccttgtgggcatttacttctttgaagtaaatttctcttcaagtagaaagccaattctaggggaagaaagtttaggagcattttcgtctaatggaaaaggcaacgatgggttaattgtgcctgtggtgctcgatgtttccttacagaactacagcaagcatatacgagtttactcaacggtaatgactaatgcccatttcaatagtcagttactgcaccattggatgcatacacagattaatggcctccttttctaggtaatactatacaatgcaacatcaatgcccctcgaattgaggttcgatataccatttggtcttacatcaaaggtacataatcttcgacattgtagccatttcaaaattcagatgaacttactattaggaagtcagtagttgcacttttatgcctttaaatttttcacctctatacaaggtaaatagtttccaccaaaagaacaaaatatgagatttttcaagaaactttattctgcaggtaatagggcccattcctccaaacaaagagattccactgccagttcatttgtctgaagctggccagattaggtggcatcctgttggcagaacatacttgtggagtgaaacccgctccttgtcaagtttgctttcacgtgaaagcagagttgggttcatgaaatcatctgtttgctatccttctcaccctagtaatgatccatttcgttgttgtgtatctgttgaagaatacaatgtcccttcatccgttagtatccagaaaggcgagttgtgcagtgaaagattgaatgcacaggtttctggaagttctactccaaatacttttaagcaaaatttgacaaggacacattttatacggcatgtcaagcttaatactccgcttctcataaagaactatctccctgtttgcatttccttggcaatagataatggtgggtctgcacgtgtagtttcgctaaaggaggtaaagcttctggtgccatgcatatatcttacctcagctggtttggtttttcatttcaaatttgtgactgaatcatattcacaggtagggtctgcctctattttttttgttgatccctccaatgatcttggaattacaattgatattcaagattataggtccttgaacataaagtttccccgggctgaatcattctctactgcagccaagtcaaatggcttcaaattctccataacagagtcaattactttctactcaaatttgtcgaattgtatgtactttgggcttttttgtttttaaaaaacttaagcccaccgtaataaagttctgatgttaatttgttctgcagctcctcttaatgttatgctggaaaaatcaatggatgctcgttctggcgcaagagagttgtatctttctgttccattcttgttgtacaattgcacagatctattgcttactgtcactgaaagcagctctgagaggagtgggtccacccttgtgattcctcctagttttgagttggatggacatgcaagacatttgcttgaaaaaggtggtctttctcttgttgatccatctgtacagtaagtgtctttctgtcctttagaaattcactttcctttctgtttctatatatgtctaacacttttgtgcttgtgtttctcctgcaggtgctttacaggcaaaatgccccagttagatttgatggatggacgctgctcttcttcagagataagctgcaccagtaacagtgagtctgcaaagaaagattttgacaatggtgttaaagcttatatgtttgctcctgatgggcacactccagcaactgaactttcagttaagttgaatgcttctccgcctaataatggaactgaaacaactcggcgaaattggtcaattccatttctccttgtccctgccagtggttcaacaaatgttactattcctcagtcatctacctctggtgccttcttagttgcagtggcatctatacctgtttcaacagaactttttgggaggacaagggctattactttcaggccaaggtaattgaaagatttccattttcatctaccaactgttgtggcaacaaatttgttttaagcagtcatccttatctgccacagctgtataaagactggatttctcatgtataaaatgtgtcagagcacttttatttgaggaaacaactccagtcactagaaagtaaagcaacaaaataacagtttggttgtgtaccaagagcaaaaataaaaattctcaaagacgcaggagagctgcatttctttgcattaagaagaaaaggggtgagaacccttacaaacacacacaacaccaaacacaaaagaacacacaaaacagttcagtttactttccttaacaaaaggctgcacagatcgccgatgaacaacacaatcatgaccctaccaagcctaagccgtctactgttccccattcggcgcaatggcaagaaggttggtaattcctttatgcccggccaaagatcatttcagcagctcctctttagcgagcaataaatttccagctagatttggagatgccccatcgaagacagcgattccggtgttcccaaattatccaagctccaaggattataatagcgtcgagtcctcttcgggtttaattatcaatccagtattttgccctctcccaccaatcatcgaaacagacatcgtcagtctgtggggttagagcctgcaggtggagcttttgcagcagcagaaaccggaatgacaaggggcgagcacagagcaagtgattgatggattcttcctcttgattgcaaagtggatagcgaggagcgtgtggtagacctcgccatgctaaacaatcggcagtccatcacctgttatgagccacaaccacatgaaaaaccaactttttcctagagcccatgacttccaaatcctctccatggtctgaaagaaatagcacccatgaacattccttaataggctgacttggtggagtatttgccggaagtagagaggcatgaaatgtgagagtcctctacttcagattgtaagaccacctgacccagcacgtcccagagatcaaaatactcaacaatcacttcaatacttagtgacactcaacaataattcataagggcctcttggacagctctcctcttcggcacaagtgcaaacagccagggtgcaagatcagcaatccactgtccgtgcaaccatctatcagtccaaaataaagtggaagtgacattgccaacttctgacactactgccaatctgccatggaaaaaaaaaggcccagacacaaccatgaacttgaattgcgaatgcagaccaagggtggttagcctcagtctcttgcagccaaatccatctcatctgtagggcccagttcagattttgaaggttggagcttcctagccctccaataacaagagcaaaatggagctttacttgttctttgacatgggcatgatttcctttgccactgtaaacccaaattgctcataccaggttatatgtgaaatgagtcttgttacaatagctctgcatattttatgatggtaccataaaagaaatttcttgagcaacatggtcgttagaacttactaaaatggagaatgaatttgggcttctgtcaatgatagagtcaattaccaggtcccataaaggtttaaattcattcatcatcctaggagtatgggctatctggactcaccacaatatgtgtgttttttatggcgtttcaccctccctgactggtgttgtgtctctgattttagaggaattaaggttttggaagttttggccagggctcaaagatgtcttatctccttgcccttgtgccactcggtatctaatgttttgtcccaagcaaattatgttagattactcaaaggacacaggtaagagcataaagaaagtagtaaagcagtagcttactcaaagcttgtagaggctagatggtttagtgggctaagcagtagtgcaggcctattatcttctctatacatgggctacacaattattaggcctagtggagttgaacgctgaggagtccgggcagaggcccagggtctcgtcgggccttgtgtctgccagtgactaaaagtaatcatagtagtatggtaatagtatttgttcggacacatagattgctgatgcccacgaggtcctttctaaagatagtatatccgttctctcaggtctttactgccctcttcctgtaccaggtttgttctatcccgctgcctcttcttactttatcgctaattcgggatccctgaggatatgctgctatgcgctggtgcctgtcgaggcctctgtaggatgtggcctttgtaggatgtggccaaaccatctcaatgagtgctcctggaggcttccatttgtcaaaaatttaaatgtagtataacactaatataacaaaattcttgttttctttgttgtgagtgttctaatttgtgcagaatttatatcttggtctcttggatttataatttctgccattaaaacttttccttgtgtttacactgctagcttcttttactttgtacaatttgtcgttccattctttgttcgcctgcctaatatctactttgtcctctgtccctactattttgcagatatgtcatatgtaatgcatgcagcaatgatttgttctttcgacaaaaaggaacacggttttctaagcacttacgttctgggcaacactctttccttcactggtctgatacagcaaggtcatttgcatcattactaccctgtataccttgacaacctgcttcgtttatgaaatgcttaataacgccaaaaaaaagggattttacagtttaggcatgcacactgcagaaacctggatcgaaatcttagacagccctactttctccaatgacttgttcatgccacagtcacttgtttactatatactgatgatgtgacttgtatttaaaactatgaaaatgaaataaatcttattcgactcatttaaaatatgaaagggaactaatctcattcttaccagagtgctattttcatttatctgttctttgtgcatcctccaatcttgtactgtttgtgctgaacaactttgtttttagagagttgctggtctctgttcggtttgatggcccaggatggcaatggtcaggaagttttttccctgatcacctgggagatgctcaattgaaaatgcgcaatagtgcctcaggtttatcatatatggttcgagttgaagtgcaaaatgccgatctagacatatacaacaagagattttctggaaaaaataatgtcaatactggtacagtactgattctgctttctgatgacaagactggttttgtaccttacaggatcgacaatttttcaatggaggtaactagttgtgctgcctggctttgtttgaacacttaacgattatcattcttatgattactctttcaatcaattcagaaactgcggatatatcaacagagatgtgaatctattgaaacaatcgtttatccctacacatcctgtcaatatgcttgggatgagccttgctatcctcatcgccttactgttgaggtaattagcactttaagagttttaaaatagcttgtcttaaacaattacgcaacattgtttctcccccatactgtgtacagattcctggagaacgaagtttgggtacattcaatctggacattctcaacgacgatgttcatgtgtcactaccatccacatctgaggtaaataattgcctttaaatttgactagcatttagtgtagtgagatttcataggccgtgtccttgctgagtcctggggtttgtttcttgttgtttttgttttcccctgttttttgtttggattgagaaagatagacacattgtgtatgtgcttactttggtgtattgtcaagatgtttgtggttacttggcctgtgtgattagagtttagaaatctttggtttcctgtccagatgttttttggaatgacttggtccaatttcacatggaagcactagataatgacatcaaagaaagggagaaagcttgattggtgcttgtctttacatatcacaatctttaactgattttcattatcagcgattgtttatcttttgcattattttccttcctgttatgtatgtcatgcatatcttttacagaaagctgaaaggcaattctgcatctcaatacatgcagaaggagcaattaaggtcagtttctggcccactatctgccctagaactgtctgattcatttcttttgtcaatatttgatttacgatcataatatgtaggtgctaagtgttcttgattcaaattaccacaatacggaaacaaaagaaaagaattttctgggatcaaaggaacctaaagttgctgatcacaaactggagcttgatatgaattttgctgaagttatcaaaatacagttaccattcatagggatatctttaataagttcttctccacaggtgaacttactatgttttactatacttatgtttctcatcacttacgacttaagcaaagtttgtttactatacttatgtttgtttgacaggaattgttgtttgcttctgccaaggagatgacagttgttgccatgcagagtttagatcagcagagatttacagttcaaatacaatctatgcaaatcgataatcagttccctgatagcccacaccctgtcatgttatcatttgagggcagtcataagggaaaatccatgaacttttttaagagtaaagatactaagctgaaatcagcaaatgacattctttccaataccacagagcctgtgctgcagtttactgcagctaaatggagaaccagagatgtatcatttgtttcctaccaatatataaacataaggtactcgttactcattgttgagaattcgtcatatgtgaacttgtggtgacactttttgtttgttggttggcagtgtagcacctgttcgccttgaacttgaagaacgacttgtcttgagcatgattgaattttttagatctgtttcctctagaataaatattggacgcttcgagaaaagtcttgagctaagtattttaggtggtgctacggacatgttaagagaatatgaaaaaatctcaaagaatattacagacaagctcctggtgcaagacagtgaattgttgccttctgttgtcccagttggtgctccatggcaacagatacaccttttagccagaaagcagaaaaaggtgtacattgaattgtttcagttgactcctgtcaagttgactttcaggttattcatctctaacgttttgtggttattactgcaggaaatgtatattattattatcttaccacttacaactatgttttacattatagttttacgagcacaccttggctcaataggactgaaggtggttcagaccccagcataggtttcaacaacactactgcaatccaggtggagacacatatcccttaacaaatgaatttctttctttttatgaaccttttctattttttagtgttgtttagtcagtcctcacaattgcttgtacaacaaagaagttatctttccatgcatttgtgacttcattctgcattgcagtttttttacgacaactaagaacggcacgataatgattgcaccaaaaggaaaatttcaatttaagaagtatatggtggcaccccaccctgggagaaccaccccccccccccccccctggtctcaaccacccacccaacacacatggaacggcctgaacagcatctacacaaatagctaaggttcttaggttggataggcacatgcatgtcgattgtttccaatgttacggtctgcacatattttttttttgtagtttaagtatagataatttcaatggttctttttgtgtttttcccgtacacttgcttttagacgatgcacagttctcctgcatgtttgagaaacaaaaatgctcttagatatttgtttgatctgttggtagtatgtatgatctgcatatatacgttagattgcattgtatcttgccactgaatgtttcaattttggctgcagagaggtcttatggccctcttagatgttgaaggagtaccagtttatcttggagaaattactgcagaaaatcttatggccagctggcaatctgttcaggacattcttgtgaggcattatagcaggcaaatcctccatgaactttataaggtaaacggtagcatcccaaatgaactgactagaatgcattttacaaacctaccaatatcttgagctattgagcatcacttatatgtgggcccaactgaccaagaggggaatgatcacaaagttgtagtttcatgagtgtaatccaaaatagtgttggtttctgaaatgggcacaaaaggttatagatttgcaactattagctcagcattgctaggtttgtgaaatttatgttcgactgtttaatgcaggttttgggttctgctggcgttataggcaatcctatgggttttgctaggaatgttgggtttggtttaaaggacttcatatctgcttcaagaaaagggaaattgcaggtttgtaaatgtgaagtcttaacagcaatgtccactctttaaccttacagtttgtactcaagatctattggttgctcttttacagagcccagttgaactattaaacggtatagcacaaggttcaaaaactcttattggaagtacggtttatgcagtcagcagcgccacttctcacttcagtaaaactgcttataaggtatttatgctgatgacctgtttgatcattgaagaatatgttccctgagaccactgctaaggagaaattccactatgcagggccttgttgcttttacatatgatgagcaagcagcttcgaagatggaagaacgggaaagacagctaggtttgcatggggaaggagtactgaatggttttctagaggtagaagtcctctcttgattgtgcattgccatctgatttcaacaattttacagcatatgcctaattacactttaaaactataatatatgagcttagccttgggataaacatgtgggcattttttttccatttttcactataaatcttgctggatatttatctaagcataatgtgtgttctgcgctgtaatgattttctccagggtctgactgggctccttcagtcaccgattaggggagctgagaaacatggtcttcctggggtcatctcaggtacaaccattctattaagcatttatattcagtttattcccattcgaccaacagcatttctgttcctacaggtttagcaatggggacagctgggcttgtggcacggcctatggccagcattcttgaagccacaggcagaactgcccagagcataagaaaccgaagcaaccctcatgaatccaactacttgcgagtccgtttccccaggcctgttgccagagatcaccctttgttcccgtactcctgggaagaagccatcggtgtatcattgcttgcccaagctgagagtggtagactaaaggaggagacatttgtcatgtgcaagacactcaagggggctgggaagttccttgtgctaactgagaagctgcttctactagtctcaagcccatatttagtggatctaggatcacctcagtttgtcggtgttcctcctgacccacagtggtcaatcgacacagagatgcacctcaagagcgttgttcatctggacaggtctcaggaggtagtgaacattgttgggagcaatggacagacttcacctagggacaaaagaagtggcacgaggaacagggtcatgagctcggcctttgtccccctgtttcacctcagcatcgagctcccaaacgatgaggacgcagaagggacggtgcaggtcctacaggcactcatcgagaaggggaaggcaaggaggtgggacaagaacatcctacaccgaagcaacatcagttgaggttttctcaagacagagcagataccagcatacatgatggagaagagataagaggtagtgtgaataacccattgttacataggtgatcaccgtggcaccgttggacgtgctttggttttttgcagtctagtgtacacttgtagcttctagaagttttgtcgaggagctatgtatagcaacaccattgtaaagattttggcagcaaatatttttctgctcttttatttgaaatgtttacaaacttcgccattcttgggctatggatatttctgattgacatcaaaaatttagtgcactgaaacaggtcaatagccatttgactccaatgaagctaaggtcttcaaagttcaaacagcacatcacaataccacagcctgctcaaataaacttgggtactcgttcaataatcaataaatcggtcaccaaaaatatgcaattctgggaatgactttgcgtttcattttggaaaaaaaatatcaatatctaatactttgatagtttaattgcatgctcgatgaaaaataactgtaaattgcattcttgggtttgagagtctgataagcctaatacacttttcatatttctggaaagacaacttatttgttcgtcacgaaatcataaataccagaagtaggaccaaaccaagagtgagttgcatagacaaggatagatttgtgaatgataaataaaagttgcttgtattctgatcaagaattgggtgaatggaaaattgggattggtatcaagagctcgccagtccaagcagcagaagatgcct

SEQ ID NO: 4757 - DNA, 3916 bp, Sorghum bicolor
tagcgcagttccgtagttacattcttctgtggatggagtgagggactattagatgtggttccgtaattacattttttttgtcaatggagttttttttagagaacatacgtggcatgtatttcattaaaaagaaaaagatagttcaaagtacaatccaccgaaagtttttcgtggatggagtgagggggcagaataaagccttgtttagttgcgaaaagtttttaaattttaacactgtaatacttttgtttttatttgacaattattgtccaactataggctaaggccttgtttagtttgcaaaaattttcaaaattctccgtcacatcgaatctttggtcgcatgcatggagctttaaatatagacaaaaataaaaactaattgcatagtttacatgtaatttgtgagatgaatcttttgagcctagttactctatgattggacaaaacgaaagtgctacagtagccaaaaactcaattttttgccaactaaacaaggcctaattagactcaaaagatttgtctcgtaaattacagttttcgtctatatttagtgctccatgtatcataaaatttgatgtgacgtagaattttgaaaagtttttgaattttagggtgaactaaacaaggcctacaaagtgggtgtccgtacggcctccaagctacagttccaacggaaaggtttgctcctctagctctgaagctctagttggaaggcgcgccaagctaaagctaggccctaggcggaattcaaaccgcaattccaaaccgaggtgtaaagctagcctagcacacacttgtcgcggccggcttgacaagtcagaaccgaatccgccccctccgatctattctagcgaggattaacaattccagcaggttattgttcttgagggaagccgccccatggagcaagcggaaggaattattggcgccaacggggggtggagattcgatggaactatgcaaggaggaggaggagaggtcggggaagagagctagctagctaggcagctgagagatggcgggggcaggcgaattcggccatatccgaaaggcatccatccatcccaggcaggcacacgcacacgcatcgcccatccatccactcagcatcatctcccccggcgccgacgtcggtttctttccgggattcctccatggccagggccaggccaggccagcgagaataataatctatccccccatcccattccccctgccccagagatgagagaatccacctcggctggccggccggccggccatcccccgcgctcccgcccgcccttaaatatgatccctgccccccgtctcctgccaccgtggagctccacaacccaaacccctctctccatcatcgttatcatctccccctctctcctttgctagcttgctgcacaccttcagagctagcttcattaattagctgcagttcaaaggcgccgtccattctagctcggccggtgttcttgccttggtaatacatcttccattcttggtctatgatatgtatacctaccttgcatgcttgggtttagcaagcagcagctctgagtttctcacctgcctatagctagcaaacaggttatgcattgcgtgcgtaccgtgctttacaattcctcctcaccttcaacaacctgcatacagaacaagttcatatatagatctcaggcaaggttgatccatccatgcacagcacacagctagcgcacctgccttgtgtgcatgtcgaattttgcccgccgcaaaatgtgaccagtccacgttcatgccaccatcctttccttttcttcaaatacatatagcaaaacacggtcgcaaatgcagtagaaaatatacatgctgtgtagttcatcctccttttcttttcttttttttcttgaagttcagagagaaagggtagcctgttttaccattgtcagatcaaagtgttgcatcttcttgcacctgaactgggatttggaattctaaccgcaccaatataatttccaactgcaggcatgcatagccagttggtctgcggcggctgcaagcgtcttctccagtaccgcaggggagccaccggcgtctgctgcccaacctgcaacactttcacagccgccaacccatcaggtatactatacacatatcagcataaagcacaaagccttttttcccttgtccgatcgtgatgatgctacagtctaaagaagcaaagatacaattgcctgttcagtccagttttctcagcgaaaaactctgcttttgtttcctctaggaccggagatgtctgaactcgtctgtggcggctgcttcaccatgctggtgcactcccgcagcgccaccaacatacgctgccctcactgtagtaggctcaactccacaagatcaggtgaaacctcatgtccaattccctttagtctgcctgcaacaaacaggctacaactgcattctcatgcaagtttcttcctccagctgacacaagtttcctgatcctaaactgaagcaggaaaccaaatgggtcacctgtcatgcgggcaatgccggacaactctggcatacccaccgggagcgacgacagtcgggtgcccaacatgccgcaacattaatccagtcagggtatgtgtactgcacaactgaatttgtcttctcttcgtcgttgcatatgtcatcaatcgcaactcatattccgtttacaaactacttcctacagaacaaccacaccggtggctctgcacggccagcgccatcggttagtctttcttttttttttgcctagtctccacagtcagtacagttccacacatatatagaacaccaaaagttattaggaggtagtactattggtgtccaaagtaattctatggccctatgggatgggaccattaagcagttgatgaccacagcacaaccacccttttgttgcatcaattgtggggttgtccttcataaaaatcacaactttggtaggttcaggttgctccatggtttgcatgggaatcagttcctcaagtaggcaagtaccaatgattagcacattccgcacgcgtcccaccgagagatttttcgcttgaaatccttggaccatctagtgctgcgatgaaagcactggtccatcgggttgaagcaaaccgtctaaattcagactgatgtcaaatgttcgtcgataatgaaacaggctttattcgctcaactttcatgctccttgcaggatgctcggccccagacggttctggtggagaatcctaagacactggatgaaaagggcaaactggtgagcttatctcaaacactatgaccatagttcgttggttttccctcgttgtcaaagtcaccaagtgaactatgaacaatcaatcagacttgactgttttgtttcttctgatctgttccaggtgagcaatgtcgccgttggtgtcacctcatggaaaagatgaccaagaactccttccggaaatcgtcccaggggttgcctatagactaaacccttcgtggacatgtataactactatcatcgtcaacaacaacaacaacagcagctaatgtaaaatcaagtgtgttttgaagcttgatgtcatatatatataagtaaacaagtaactgttgagcagcaaaagatctgaaaaatgtaaatacgctagccagccgtgtgcgtgcgctagcctgctgtgtactttgagagccgaaaaggaatggaaaggagcgaagcaagcatcgtgtcctggaatttttattcttgccctaccaatgttagacacgctgagtcgactctgcactctagcgctttgcaaattcggattctccggttgaaaaatggagacagctactttgtgtttgtggagaaaggatagtgatagccagccacagggtgtatgcctgcctgcttctttttactgggcacagaaaagtggcactcctaattcgagcgttcctcatg

SEQ ID NO: 4758 - DNA, 3596 bp, Sorghum bicolor
cgagtgggtggtgttcttcctgtctcttgggcatttggtgataaactcttgaagcagtacgttgtcactgaccctgaaatcagggttcgtcgcgtacttctgttttcttatggattacctagatagttctccaagtgtgaggaagtatgctgcctttgtaacaaaaaaaaatagagattctatcataagcaagtcccccagtttagccatctgaaaatgacttttgttgttacaatcatgaggtggttgacagctcccttgaattcctcaccgttgctagtgatggactctgggatgttgtcactaatgaggtacctacagatgttattaaatatttccttcgatgcaattgatctgtctatcactctacctgatgtaatgtatttttcctggaagctgttgccatggtcaagcctattcaggacccccaggaagtagcaaacaagctttatggaagaagcttcccaaaggagaaactccgataacatcacagttgtcatcgtcctcttcctagatggaacaaccggtgataaactctgttgtctcctgtagggatccatcacgcatgtgttcttctggctgttatctaatgctcaaatatagattttctgtgtcttttgctgttgttctgcaaggaaacaagaatagggctgttgttgttacagtatggtccttttttccctttccatcaagctctgatgtagctgccctgcggttgatttatgaaatcatgctagagattttcctggcactctagcagtaagtgcatgtaaaactgttgaattatttgaacgaattgcatactgcagtatgtaacaattaagggccgattatggcggtaaagtttaccatctgttacatcgaatgtttggacacatgcatgaagtactaaatatagactatttgtgaaactaaaaacatatctagagaataatttgcgaggcgaatcttttgagtctaattagtccatgattggacattaattgtcaaataaaacgaaaatactacaatacctgttaaactttaacaaccctaaccaaacaccacctaaatcttgccatattctcctcgtgttctgctgtcatgcgccttaatgctaccaagcggcatggagatgagctatcaactattactcggtgtaagcggcatggagatgagctatcaactattactcggtgtacagaaattggagggtcgaaattctacggagccagtgcatggattatcataattattatgcaaatcgattgttacacataaattttgacctaaacacgaataaactatcataattaggaacatgcatggaagtaaggccttgtttagttttcaaaaaatttaaaggctcctcatcacatcgaatctttaggcgtatacttgaagtattatggggtgtttagtttggggtgttaaagtttaataattactgtagcagtttcgtcttatttgacaattagtatccaattatggattaattaggcttaaaagattcatctctcaaattactctccagctgtgttttttagttttgtaaataatctatattcattattcaatgtatttgtccaaacattcgttgtgacgggtagtaaactttaacggggcaaaccaaatagggccttaaatatagataaaagaaataactaattgcacaatttatctgtaatttgcgagataaattttttaagcctaattaatccatgattggataataattaccaaatacaaacgaaagtgttacagtagccaaaaccaaaaattttctcctaaacaaggcctaaaagaaagctccttctttgaaccatgttaaaaaacacaatggctctaggaccatatgagcatgtgatttcgatgatagcttgccgctcggacaaatcgtcttacttatttgactcataagttataacataaagtattgttggctgatttttctaaaagaaaataatatttttggctaccatattcagagcgacactgatagcttggcgttggtgcacgcgatggccgtggggatcggacatgagcgcgtagtagagcacagggacatgacgccagcaggcacgagcacgaacacgaacacgaacacgacgacgtcgccgtgggcgagacggacgcgggagcaaaggacggcggcgagcacgcggagcttggacattcggccgggaatgggacggtgcctactgcctagcattcctcttccgtacaccggaaggagccccgcattcactacgccaactacctccctgccgggccaaccaaactccatacatccaattcatctctctcttccacgtcagatccaagctgtacttgttaacttaaacaggtacccattctttccacttcagcatgcttccttttcccaatctccacgctacttctcagtcctggccgtccgatcagggtgggtacatgccgcgggttgtaccatatccgcgttggccacgtcgacagatgctgccgggccttgtgctccacagcctgttcgagaaaaccctccaatctttgggcgagatatgggacgacgacgacgacgacgacgacggtaacaagaagactactggctcgtcgtcgtcgtcgtctgcaccaccagcaaaagcagctcagtttcgtcaagacaagcttgccgacatgctgctaaggaaagcgaccaaagaagaggaatggtttaaagaaaaccacggcagggttcttgttcgagacgcagctgtgcttgctggtgcactattaaacacaggcacgagactgcagaagcgaggacagccaaggacgaagctgctggagttcatcttcaatgtgtgggtggacaagctgctgtatgccgccgtcagatgcagcgcggagagccatgccaagcagctcagccgcggcggcgacctcaccaccatactgtggcttattctccaacatgctggcctatttcacatcggagaaattaaactcaaggacatggagcctaaagagaagaagcccgaggagaagaagaatgcccgaggacatggtgcctttgttgcccccaacagctcaaatgccttactggccgcctggctggtctggggagacaccaccgctgataccaacgacatatatacctgatgaggagcagccgacagtagaagcatacgtaccacaagttcgagatgatgaaggcgaagaagagcctgaggatgccgaagaatatgacatgcccagagggtacctttcactgtactaggtttattttatacctgtgcgttgtaatgagaccaaacataacactgtggtaagtcaagtttgcatgtttgtatcattactaaaataatatattttaagtaaggatggaaatggaacagaaatattccgaattaaatcttatcgttttctatatttaatctgatcgaattcatattttcttattcgcctttactattttcgctttcgtatttcaaatgtaaaagtagaaaacaatttatttttattgaccgttttctacttttttacatttagtttaaaatattttaaagtcattggtgtgcaccgtttagtcgttgtaccaccagaggccttgttcgtttcatccgaaaaccaaggggattggagggcctttaattaatcct

SEQ ID NO: 4759 - DNA, 4278 bp, Sorghum bicolor
  misc_feature (1386)..(1485): n is a, c, g, or t
tatcatctctcttcattaatacggtgtcacatcagcatatttaatgtccataaaacttcaatgaaatcccattgagactaccctcgtgcccttagtatcctgcatcctatatatgacctagattcatggttgacatttatatgagttaggacaactcacatcaaacaattataattttcagaaggtattgaattccgtttgctagttaaaaaaaggattagacggtactttggatatgactttaacttaattatctttctaccttcaaaacgtcatctaattatgacccgagagagtataatagaaatattcatatagagctatccagttgtctcactgagctcggtttgagccctcagaggtgacctgaccaatcaagggcacatgtggccttgtttagtttccaaaaattttcaagattttcgtcacatcgaatctttggacgcatgcatagagccttaaatatagataaaaaatataataactaattgtatagtttgtctgtaatttgtgagactaattttttgagtctagttagtccatgattggacaataattgccaattacaaatgaaaatactatagtagccaaacctaaaaattttcgctaactagacacgcctaaattgggagcgatggtccgtgctccggccactagcattcatccggaaaaagccacctctttctccacaaacaatgtctttgtcatttgatccaggagccttccgttagataggaacaactttgctaaatactgagaactctcagataaagtattagaatgaaaagaccattaattttataaggaagaacccaaggttctagcccattcccatttctaaatcactaatttgtctaattacattttattttccattgacaaaggtctattgaacaaatagaattttgtagatagatgggtctctttattgtcactccatattaggtatttgtctacacttcattcaaatgatagggttgcccctcttgcaagaactctcatacaagattattttacttctttaaataaaaattgccaaaaaaaatcacaattttgccagtgtgaataggcaagccagatcaaaggcaatggtgacggtggcatggatgttattgttgtgaaaaaaaaaatcgctgtcatgggtccatgcctccattatttgttaacttaaagtgtccatcattcaaatcaagtaatttttttggggatttcagtcaaatcatgttagtactagcttactagtattggcaagccaagtgggtcccactcgcactcccccccccccccaaccctgcttggggggcattttactcattgggtctcccccctccaccccaaaccacgtaaccctcctcaactgcaccccccaaattcttctccaagggnnnnnnnnnnnnnnnnnnnnnnnnnnnnnnnnnnnnnnnnnnnnnnnnnnnnnnnnnnnnnnnnnnnnnnnnnnnnnnnnnnnnnnnnnnnnnnnnnnnntcttaaaaaaaaatttcccaaaaaaaacccaaattttccccggggtaaaggccaacccgtacaaaagccaagggggccggggccggggtttttttttttggaaaaaaaaaaaacgcgtccgggggcccccccccccattttttgttgcctaaagggggcccccacccaaaccaaaaaattttttggggggtttcccccacaccatgtaggaaccttttttttttttttgaaaccaaaaggggtcccatgggaattccaccccccccccccccccccttggcggccttcatcctcgctggctctcctccatccacgccacgccacgtcaccctcctcacctgctcctcctatcttcttctccagcggccacatgaaaaagaaacaaaaaaaaaaaaacacgcaaagacaaattcgccgtccaccaaccacacactaaacccgaaacgcacccgggcccacctgtcagccacagcacggcccgccttcctaatctcgggtccgcgacgcgaggcaccaaaaagatccacgaattttgttattagtccccaaaaggtctcttcggcggcggcggcggcggtggcgatgtctctccccccggacggcggcggtggcaccggcgacgactggttcctcgactgcggcatcctcgacgacctcccggccgcggcctgcggggccttcccgtgggacgcgtccccgtcgtcttccaaccccaggtccgcccacccgaattgaccgatcgattcctccctccccctccacgccccctttctagttccgaaaggcgcggatgctttgtttagcgtaggttcctggcgatcggttccttggccgctgcgttccgtatctctgcgattagtatcgtggaatctcgacgggcggatgaattatttttttgggatttgggggcgtctatctcgggtagtagatgcatgcgccgggaggcatctgatccggagaggtggttgctttatgctgcagatcttccggtctgttattctatttgtgctataaacttgccgaggctgcttttctattggttaaattagattagagttcccaaaagacaaaaatggttccctcaaaaaataaggctgctgagtttgcgtgctgcaagataacttgtcttggaagatttgttctcgtgtttccgcgactatgtttatgctgtgcaatggatggatcatatgtgatgatgaccagtgatttgcccaaacaattgagatggtctgctctagtgtacactgttttatgttggcgacttaattgatgggggattgtgttaccaatctgatgacgagtatgagtgcgagcgatggggtgtgatgctgggtcatggatggaatcgtaatacaccactgcagagccaaagatatagtttcctgtctgtcatgtatatgctgatgctgctacgatgttaatttgggagtaatttgcagtatcatgttgtttgacccctttttgctttactgaaagcagcctactccatatgggcagagttcaatgccttacatttagctagttttctgattattactttcatcgatgaatgatgttcggttatttggttgaaattaattaggtacttgcaaatggggaaaaaataagttcatgtacaattggaactgctaattgatcttccccttattttacagtgtggaagtgggcagctatgtgaacacaaatgatgtcttcaaggagcccaatgatgtcttcaaggagcctggcagcaataaacggtgtgtctgttatttcactctacggcttaaaagaagtattcatactgtcttgctgtatgcagccaccattgttacaattgtaactctattgcaacttgcagtttaaggtcaggatccaatgatgtgccaacatctaaagcttctagggaaaaaatgaggaggaacaaactgaatgataggtaaatcatagacataattttgctgacactgtagtatcaaagatggattgccatgtcattgacatacgtttcaattgtttcttgtggtttataggtttcttgaattggggtctacattagaaccagggaagccagtaaaagctgacaaagctgctatcctaagtgatgctactcgcatggttattcagcttcgttcagaagcacagcagctcaaggaaactaatggtagccttgaagaaaagattaaagaactaaaggttattcagctattttttgttaactcacatataatacattgtccttttatggtgagagcatgcctgtgttattcaggaatccataacatttcccagtagtactcttatgttcatctatatgagatctttatctaaggctggcaatgctttatggtagcttatggcctgtacatgaatacactgtgattgctcttgcaaagctcacccaagacatttcccagtagcttacaccaaatcagcccctggctgacaacagactacataactagttacctatatgttgattatccacaactgagcacaaagtgtgaattgatcatataaagacttctagacctgtcaatggggagggtatgaacacacccaggcttacccatgccacatttagcactacaggttgtgactgttatggaggggacgtgtgtttcctgtgatatctctgagaaacaactatgttggaaggacacaaggaaaggagaggagattacgggtagaaatggggaggcccgtaccttacccttgatcctaggggtagcaagctacttacccatacctgacccaaatcacatgggtgtgaatttgggggaacatgttagggtatccaatgacaggtctaaa

SEQ ID NO: 4760 - DNA, 4879 bp, Sorghum bicolor
  misc_feature (1)..(1882): n is a, c, g, or t
nnnnnnnnnnnnnnnnnnnnnnnnnnnnnnnnnnnnnnnnnnnnnnnnnnnnnnnnnnnnnnnnnnnnnnnnnnnnnnnnnnnnnnnnnnnnnnnnnnnnnnnnnnnnnnnnnnnnnnnnnnnnnnnnnnnnnnnnnnnnnnnnnnnnnnnnnnnnnnnnnnnnnnnnnnnnnnnnnnnnnnnnnnnnnnnnnnnnnnnnnnnnnnnnnnnnnnnnnnnnnnnnnnnnnnnnnnnnnnnnnnnnnnnnnnnnnnnnnnnnnnnnnnnnnnnnnnnnnnnnnnnnnnnnnnnnnnnnnnnnnnnnnnnnnnnnnnnnnnnnnnnnnnnnnnnnnnnnnnnnnnnnnnnnnnnnnnnnnnnnnnnnnnnnnnnnnnnnnnnnnnnnnnnnnnnnnnnnnnnnnnnnnnnnnnnnnnnnnnnnnnnnnnnnnnnnnnnnnnnnnnnnnnnnnnnnnnnnnnnnnnnnnnnnnnnnnnnnnnnnnnnnnnnnnnnnnnnnnnnnnnnnnnnnnnnnnnnnnnnnnnnnnnnnnnnnnnnnnnnnnnnnnnnnnnnnnnnnnnnnnnnnnnnnnnnnnnnnnnnnnnnnnnnnnnnnnnnnnnnnnnnnnnnnnnnnnnnnnnnnnnnnnnnnnnnnnnnnnnnnnnnnnnnnnnnnnnnnnnnnnnnnnnnnnnnnnnnnnnnnnnnnnnnnnnnnnnnnnnnnnnnnnnnnnnnnnnnnnnnnnnnnnnnnnnnnnnnnnnnnnnnnnnnnnnnnnnnnnnnnnnnnnnnnnnnnnnnnnnnnnnnnnnnnnnnnnnnnnnnnnnnnnnnnnnnnnnnnnnnnnnnnnnnnnnnnnnnnnnnnnnnnnnnnnnnnnnnnnnnnnnnnnnnnnnnnnnnnnnnnnnnnnnnnnnnnnnnnnnnnnnnnnnnnnnnnnnnnnnnnnnnnnnnnnnnnnnnnnnnnnnnnnnnnnnnnnnnnnnnnnnnnnnnnnnnnnnnnnnnnnnnnnnnnnnnnnnnnnnnnnnnnnnnnnnnnnnnnnnnnnnnnnnnnnnnnnnnnnnnnnnnnnnnnnnnnnnnnnnnnnnnnnnnnnnnnnnnnnnnnnnnnnnnnnnnnnnnnnnnnnnnnnnnnnnnnnnnnnnnnnnnnnnnnnnnnnnnnnnnnnnnnnnnnnnnnnnnnnnnnnnnnnnnnnnnnnnnnnnnnnnnnnnnnnnnnnnnnnnnnnnnnnnnnnnnnnnnnnnnnnnnnnnnnnnnnnnnnnnnnnnnnnnnnnnnnnnnnnnnnnnnnnnnnnnnnnnnnnnnnnnnnnnnnnnnnnnnnnnnnnnnnnnnnnnnnnnnnnnnnnnnnnnnnnnnnnnnnnnnnnnnnnnnnnnnnnnnnnnnnnnnnnnnnnnnnnnnnnnnnnnnnnnnnnnnnnnnnnnnnnnnnnnnnnnnnnnnnnnnnnnnnnnnnnnnnnnnnnnnnnnnnnnnnnnnnnnnnnnnnnnnnnnnnnnnnnnnnnnnnnnnnnnnnnnnnnnnnnnnnnnnnnnnnnnnnnnnnnnnnnnnnnnnnnnnnnnnnnnnnnnnnnnnnnnnnnnnnnnnnnnnnnnnnnnnnnnnnnnnnnnnnnnnnnnnnnnnnnnnnnnnnnnnnnnnnnnnnnnnnnnnnnnnnnnnnnnnnnnnnnnnnnnnnnnnnnnnnnnnnnnnnnnnnnnnnnnnnnnnnnnnnnnnnnnnnnnnnnnnnnnnnnnnnnnnnnnnnnnnnnnnnnnnnnnnnnnnnnnnnnnnnnnnnnnnnnnnnnnnnnnnnnnnnnnnnnnnnnnnnnnnnnnnnnnnnnnnnnnnnnnnnnnnnnnnnnnnnnnnnnnnnnnnnnnnnnnnnnnnnnnnnnnnnnnnnnnnnnnnnnnnnnnnnnnnnnnnnnnnnnncattatatattaatatatgctgttaaggtaactttctcatttttatttttggaacattcgttcaggtgtcaacaactgtactggtggagtaataatcgataagatgagtaattcaacaatggcagagttattagtgcacgtgtggaatgtgtgggaaattcagacaatggtgctccttagcttcatgctacagctctttctgttggctactggaagcctccgtcgccgccacaccacagcagtgctcagggctttgatatggttgggctatgtgggagcagacttggtggctgtttacgcccttggcctcttctctcagtatgaggacaaatacaagctagggagggagtcgtttggggacatactgccatttctctgggtgccttttctccttgtgcacctgggtggccaagattcgatcactgccttttctatcgaggacaacaatctatggctgaggcacttgttgaatctagcaacccaggggtttgtagctttgtatatcttctggaaatccttccacagaatcaatgccagtgtattgattcctgcaatgtttgtgtttgtttctgggatcatcaagtatggcgagagggtctgggcactaatgagtgcgagccgaaatggccttggcaagtcagttaagttcagctcatcagcagaactgtatcgtcgtagcaaggaatcatatgctcgtcagacggtgcttcttgctcgaggtttatttgtggggcgaactgtgctccaggttggggacgatgctgaagaacaacttgaatacgattttaacgagatttgtgaagacagaggagagaagctgaagatggtagtgatggagcttggcatgatgttcgatctcctctacaccaaggctaatgtgctgcagagatggaccggtgtcgtgttccggtgtgcttcccagactttgatggtggttgccttcctttccttcctgataagcttaaagggtgcccacaagcacaacagtgtgaatgtcgcgattacctacacattgttcactggggccatgtttatggaagcctgttctattgctgtggtgatggcatcaccttggacaagagcacacttgaacgaatacagtagctttcttcattgcctttgcaacattgctacgtcccttttcaaggctgttcagtgtaacaaggggcaccagaccatgagttgcatttccatggggcagttcaattatatggattactgcatcgctatgaaatacaaacccagactaatttcaatggccatcagtgctattggtctggacaagcaatggagaaacttatggtacgtccaccacatcgtcgatgatgccagctttagatcaggggaggaggggattatcagcggtgttatggaaattcttggcagaccaaacaatgactggtttggacagaggtgtcttggcaggagattgaattatacactgagcctgccctttgagcatgccctttatcgtctgcatatatacacagacttccatataaacaaatactttgcccagtacactcctgcaccagatgatgtaactatgcggcttaaggaacaatgcgagacgctatcaaactacatgatgtacctgatggtggtgcatccttccatgttgccagtcagcacggctgcagaagatcttgaacctgaacttctcaaatgggtaattaggaacaataatcaacactcccaacaggcggcaaccaagctagactttcttggccattacacaagctcagttctcagcaacgagccagactctgtctcccccttcgaagcagagccatgcgggccacttcatctggagcaatcacttatggagatgaaggagatgtggttgaggctgctggtgtatgctgctggtaaatgccgtggagagcaacatgcacggcagcttagcgaaggaggcgagctcatcacctttgtctggttactcatggtgcaccatggtcttggggacgtggcacggcaggagcttagtcttttaacatctaatgatccttgtgtaccccagcctgggtccacagtgtcagttgaaaatagtagctggagactacggcaagaacacccatgttacgccttccaattcttccctgctggtggtcagcaacaggaagagactgcagtggtatcgcgcgagaaagaacagatgatacagctcgcccgaatggtgcaggacattgtgccacaagtgttgagagctggacagtctgtggctgcagatacacagttcattggttatctcatccagcaattgctgtcagccctaacacagcacgatggggctacggctacggcggcaccagatggggcatcagagcaagatgaagccgggacatccggcgaggcagcaggacaagatgacgacgcggtgacaacgtctgagatccacgagcaagaacctgtgatgaatgcagtggaaaacgaaggctcgcgacacgcgtgtagcgctagtttctcttactcagctcatggatttcataatgcataaccggtaagcattgcgctgcgcagccggcgctgctggtgattcaatgatatatttattgttattgttaccacgcatccaattcgtagttcaccgatcgtgtttgctgtcatccgcaatatgtagttttttttgcctagtgtgtattgtattgtccaagaaaacactacgtactgcaccaccttattatgtatctatatgttgtaaaataatcgtttttttacttgtggcgtccatacatgcacctctagtatataaatgcggttatactagcgcgcggacgtgatacgcgcgtccggacgctcgcctactattgtgcctacgacgccgtctcacatctttactgacctctgcgcttactactctttctggttacatctgcactagcacatgcgtagggtccattcaagtgcatgcgagagaaagagaggaagcaccggacgctttacgatgctgcccgatagagccatagaactgagacactactccaactgcatgtgaaa

SEQ ID NO: 4761 - DNA, 7223 bp, Sorghum bicolor
ggatatgaaaatcaaacaaacaacctcgatgaagtgatgcaggatccgtgcaacgacaagactcttgaccggttaaatcctgaagctaagagggatctgaatgccaaagacaacctggtcaacaagaatgcagatgtgatagacctagaagccaatgcttctgtttttggaggtgaacagaaggctcaatattctgctaagccatttgggactgatgatagaacattgaattctgaaaacaagtctaatctttgtcaaaatgatgaccaacagtccatggcgtttgaatgcacaaccacacatgtagcagaaggagggcgcttcctcaaacaccaagaagcaactgtaaaatcaacctttatggcgaacattagggccaaactgcatattcctcaggagagtccttccgtgagaactaacttgacaagttcaacatgggagagtgaaacactgacaattgatggaatctccaaacaagcaactaggctggcatctggcactggacctcagcagattcacaacatcaattctctttctggtgagttattttgctgttctggcaaatattttttgcattcaagttgcataaagtggacctaggattttacgtactgtccctccattctaattgcaaaaaaataacaaacacaagtttctctaaatccaactaaaaactgacattgtaattggatcctgattgtccacgtgttttagagtttagggattactaagaaattgcggatatcttctaaatgccatctctacctgctcctgcccactaaaattatactacttacaaagcaactgtatttcatctatgatcagatgatttccaagcaccagggattcctggcatggatggagcaagaaaaggcattggcaaatggtgcaagggctcaacagctcctggttctgcaagtggaaacagaggcagtctgatagctgtgggaccagatggtcgaggagggaaggtcaaaatcctgagggaccttggccgatctcaggttagttgagtgaggtcttcccacgtgttttccttgttagataaaatcaatttgatctctaacaactaacccctatgcgtgttatttttctgcaggatagcaagtctcaagcgttgtggcccaaggcaccgaaggttggaaacaaaggtggccagtctcagatccatcacttctttggcaagagatgatcctactactgaagtatacatgcctctggtgtggaagagtatctgttgttatgcatggagcctcggtagctgatcccaaatcttgcaggggtatataggctgacagctctgggcctgagatcatagaaccttcccacaatctttcttgccagaaacctgaatctatcttgatcccatgtgcactgtgtcggtatgtaatgcatgctgttgaacaactgaacatgtatctgtatgtcatgcttgagctggtctgcggcagcagaagaggaaaaccagtgttggtcactgaatgaaggctagaagagtttgatggtaggtactggaaggtggtgtgaacttgggatctctggagaacctacacagcagctgtgttggatctaattctccaatcataataggacacggaacatctatgactcttctagtttattttatatccgaaactagtacaagtgttatgcttctggagtccctgaaaatgatgtttaatggacagctacaccagctgcggtctttttcctcaaagatgtgcactttctttgagccatgttgtactagtcagctcctcaaaaattaattgaaccccatgatggcaggtgaaccttgcataatgcctatatacacacatgcactaggtctcttaaaccaggtgttaagcactgctaatttggtgttcaggacctgattggaacacatggaaattcattcaatattctgaacagagggggtttaaggtgtaaatttgtaatttctactttctaagaggccttaaatcgaaaagagaagaaattgcaagtgcagtgcctctgcctccttcctcccccccccctcttctctgttcatccccacctcgccgccgggccggggtggtcggtcgtcttgtcacgtccgtcccttggcctctcgcagcggccagcggccagcggccctccgccccctccaaatcgcagagaaatccctcgcgtttaaacaattccctgatccaactcccccgtctcctcctactcgcctgacgacgcctccttccgtccgtcctctataagggcgccgccgaggagagagagagagcgagcgatgacttcaggttcttcccccgcgcagcttcgtgtaattgcatttaggcccctctgacactcactgccgtcccctcggcgccgtttcttggaggtggccgcagcagctctccggcagaaggcggcgcagatggcttccgcggcggctcagtgcttcagctactcctcgtcaccggccacgtgggctatgcggcagcgcggcggcggcggtgccggtgccggtgccggcgtgcttcggctctcgtcccggcggaccttctcggtctccgcggcggccgggttcgacaaccagaaccgcgagtgggtgccctgtttctcttcaatcctctgaaatagaagagagctgttcaaaaggtaaaaaggaatgatcatggatggtttggttggcggatcgctggactgcaggtatgtgatcgtcggcggagggaacgccgcggggtacgccgccaggacgttcgtcgagcacggcatggctgatggccgcctctgcatcgtctccaaggaggtattgagtgcttgctctgtttcagtagatgctctttgcgtgttactttgtacaaatgatttgggtccttttcttcattgtgccatggtgttgtttgtttctcattggtgcaatgcaatctattgcaaagttctgttaacattttgatttgaactttcgaaggctatctggtcatgtttgatcgtaatggtgtttgttttcatgcagccagttccaccatacgaacggccagccttgaccaaaggctatctttttcctccggacaagaaaccggcccgcctacctgtaagtacaccaacaaatttacaatggcaggcaaaactgaatcatgatagccaggtttaggactgctgagttgctagtcaatgcagtatcttacattcttctcaaaatgtacaaaagatcagcttgttcatgttagtttatttggcctttattacgatctgcttcagtaattagaatgttgaatcaaacttttaaggaagcgttttcatatagtctgttgctcacttcatcaattagaatttagagctgtacaaacaggctcacagtcttaatctttttcttgtggtagggtttccatacatgtgttggatctggtggacagcgacagactgctgaatggtacaaggagaatggtatagaggtagtgatgatgttagcatttgtgttttatgtgctgtgttactgttgcatttttatcttacgctatttgtccttttgctataggtgctgtatgaggatccagttgtagcatttgatggcaaaacacaaaccttaaaaacttcatcagggaaaattctgaaatatggctcacttattatttctactggatgtgaagcttcaaggtatacaacaacacttatgtgattgatgtgcatttaaatgtctggaaaaccagatttcttctgtccttatcatgatgtccatttttattaaattttctctcctgagatttaagacaatcttatatgctaatccagtgaaattcctgttaggttgtgcgtacgaattggatgcacaaactttgtccactcacattgttacaatgaatctcaacattatgttcttctaataccaaaaatcctttctttcagattacctgagaaaattggaggcacattacctggagttcactacatacgggatgttgctgatgctgattctctagtatcctcattggtatgttcagtagattaatgtagtaattatcatcattcctcacccatcagagttaatgttatatcatttgacaatctcgcctctttgatatttacaagtgattctttttttcctttgcttattttttgtagggaagtgcaaagaaggtggtggttattggtgggggctatattggcatggaggtagctgcagcagcttgtggctggaatcttgacacaactgtaaggagatacctttgttcttgttcagtttgatatgctgaagctttgacatctcaatatatgctaaaaaagccacttctctaattaaggctgctacatgaatagattatattcccagaggaccacattatgccaagattatttacaccctcccttgctaagaagtatgaggaactgtatcagcaaaatggtgtcaaattcataaaggtaattgttgcatcaattatttgagttcatttatcagtcttgtttcagtcaatttgagtatgagcatctttattggtaaccagggggctcttatcgacaaacttgaagctggctctgatggaagggtgtcttctgcagtacttaaggatggatctgtagttgaagctgatacagttatgctatttatttccttctaatggttcatgcagtagtactatacaactcaaattattaattttcctgccagataaatttcaatgttatattcatctttttgatccacctctccgctatcaaatagggagaaccaatgctcttcgtagacacaaaatcttcaacagtttgtaatacttatagactcaatttgatagatttgttcactcaatattcaatacaagtgtagttcagtagttgattgatctactcatttactaggtttgacatatgtttagtatacactatgtttcattaaacataaagcccataaagtcaaaaagaagacaaacaaacatatgatattcttgttgttttaacaagatactataagtgcaggtaattgttggtataggagcaaaaccagttgtcagcccctttgaagctgttggagtcagcgctgaagttggtggaatagaggtttgtttccatgctaaagttaattaggcttattaaatctactgctctgcatacgaaagtttctatggaactttttcctttccttttcttttgttttctacctgagatactgatgggattaatttggattagcagcaaacaactataaaacacctcaaattggatcacatttttaagttacatcttacccttatcaatttattggtttatagctgtctcattgtcatccttgttggatgtgtgctgcttcattgtatgatgaattttaatttcgataattacttgctcaagtgtttggcatcctgtaaatcaattgtgatttattcttggtcaagagagctaattcagtatatttttgtaggttgattccctgttcagaactagtgtacctggcatctttgcaattggagatgtagcagcctttcccctgaaggttggtatatgtttttttttatcttttgaggcaaagttggatcccagaatatgatattttgtccaaactcattgcagatgtacgatagagttgctcgagtggaacatgtggatcatgctcggaaatctgcacaccactgtgtagaaactctcctaacatcccagacaaaagcgtaagtttatggctgtcaagtgtactcagttagtttagctcctagtgcttcttttgattcaccgtgttggatgcaggtatgactaccttccatatttctattcaagagtttttgagtatgaaggaagtgcgaggaaaatttggtggcagttttatggtgataacggtacgagtaccatgacagccattttctacattacaagttggtccttgtgattcatcatgtgtactcatgatattaatgcctttaatttgtgctctgagcagttggcgaagcagttgaagtagggagctttgatccaaagattgcaactttctggattgactctggtaatcagtagtttggaatacatttttgattcttctcagttgtacttaaacatagtatgacttttctgccttgacaaaactgtagatagtcgactgaagggtgttttccttgagagtggaacctcagaggtaaatgcacttgacaccacctgtcttgaacaagacattgcaaatctaggacagttctgtatctgttgaacttagtaccaagttatacgaaacgttaagtatgagagcatgtaatgttccacatgttcatgatgagcttcctgcattctttcaggaattctcgcttcttccgcagctcgctaaatctcagcctgttgtcgacaagtctaagctccaggccgcaacttctgttgaaaatgcattagagattgcaagaagctcactccagtccagcgcttcggtttagttctcaaaatctagtacttcttgaacctgagactgtgcgctgctcgaacttttcaaagcgtcaagatcacatcaacaataaagcacaattccatagcattagtttccacttgaggctgtgcacctgcgtcggccatttctggcttcaaataaacttgattgccctttgaggggttgatgaggatgataggatgaagactttatgctactttttcttgatgctctactgatcaatcatacatatatgcttgcttctcgatatatagtttgtttagtactccatcctttccaaatcataagacgttgacacttcatattcattgtttttattgtgtatctagacataatgtatatttaagtgcagtggcagacccaacactagggccactagggctatggccctagtcttagcccttaattgcattagataaattatcattttttctacagtcaagcacaattagtgcatatgtctaatgcaatggccctagtcgttagccaatcctgggtccgcccttgtccaagtgcataacaagctatgtatctagaaaagacaaaatatcctgtaatttggaatgcggggagtacgtagtaaactgagaatgaggtcactcatcttatctatggatctttggaagtgtacgcctcttatgcccatgaagcttaggctacgttcttgtcttggtaattgtctatttgagcatttgtcttgccaaaaattcctgggaatatgcatggcaatgacttgcatcgtcacaccgtacctgacggagagctctgtcccagggccaaatgacaaataaaacagtcagtaacttatctatggcttcttgctgatacatacagttcactcttgctctca

SEQ ID NO: 4762 - DNA, 7885 bp, Sorghum bicolor
caaacttttctaaatttgaccaaatttatatgataaaataataattattatgataccaactaaatatcattagattcttttttaattatatttttatagtatattcactttacgttacaaatcttagtatttctctctataattttggtcaaaagtgaaaatgttttgactctccaagattcttggaatgacttggaagaagtatgaaatttgccgtgtagcaaacatggctctaggtaaatatatctgatgaatcgcgaaatctgcaatgatccatacaactcagaaaccaaaatctgccgagctgatggaacacggatcggacatacagaatgcgtctgggtccccagcaaaatccagcaggcggctccggccaccagtgcacaaaatataacgcgactaatgattggtggtcaaacaaacacattagatacataaaatatttgaatttttaaacaagtcgcttgaacgagtcgtccccggcgtggtcatggcatccggcggatattctcagcttatcccatgaacgagatatgactcaggttacggcatgacaacacttgagatgtctgtttctgaatgctgctgcagcaacctgccaagaaccgtcttctaatgaagttttttagtacatttgcagatgaatccaacagaagtgctccagccaaaaaaaagtgcatgtcacctttccagtttccagatgaaattccaagctctgagagtggcggaactgcaaacctgaggcatttgtactcaaattttggagaatgaacccatttggttccctcagacaaaacaatgtccagttcaaacttcagacatttatcaaaaatcaccaccttagtcatctgtcgagagcttccgtgtggcaaacagcagcctgcaaaagagtttcggtgaagctgttagttagatgcatggcagatcagataaagttcagggcgaccaatggtccggcttctgttatcgtcagttttgttggcagcaacgaggaggaacactgcaagaactctcctttttggtgcttctctcttggaagtgtttccaggccaggtgcaaacaaacattcagggctggttgcaatgacagtatgacacatgacatggacagccgtatgtcctatgtgcagtctcaaagggcatatgctcgaattatgccccaattattccttgacacccgccttgataatgtaagcactctttaacctattgtatatatgcagatcagaccttctgcatttctaacaggcaggattgtcatactaggagcaagaggcgagggatttgtttagttattggtcatcagggcaagggatctttaaagtgagatccaagacactggttttactttctgatggaacctccattgtcataggaactgtctgcaatgtcaatattaaactttggaaaataatatctgtaatcgatttgtgatacagaaattatatcagcatatttttcatcaaaagtaccctaacttattatacgaatgaatgagaatctttgctgacaaaaaaatagaatgcatgaaacgatgtcttctcactcttttatttgtgactagagggagcatctgagtagcccatctgatggtaatggcttattgctctgtttcgtagagataatatgcaaataattgggttttcagttttctcaatccaaagtttcccctattctccacctacatcttaatggatgaaagaatcgatttgataatgaactgttgtcagcttaagcaaaattgttatgtggaagtagaaccttgggattacctactctactatagtgcttgtttgaagccagactattttattttcagccttgggaatgcctactgtagtgttttttggaagccattttgggagatatggttgtcagtatctacatctacatgtaaactggcatgcccaaaatgcaacgtctatatgcctataataccgatgccatctatgcatctcctttaccataccgcaaaacgatcccaaaatccactgggaaaaaatggccatgaactactatgaagatcactcgatgtcatcatctcatgctgatgacacggatgaaaggaaaagcacagtttcagtctcccccgaggctagcgccgacgaggagccattttcattctttgagctgctttgctacgccgatacagtagattggctcctcatggccctgggaaccattgggtctgtcatccatggcatggcattcccagttggatatctccttcttggaaaggcgcttgatgccttcggaaccaacataaatgatccggagggcatggttcatgctttgtacaaggtgaacttgctaaaaccctttatcatatcattagccttttgaattccgattctattggcctgcaattgttttctacttgcatgaggatttcctgcttgttgcttgaaggtggtcccctttgtgtggtacatggcagcagccactcttccagctggaatggttggtaagtcaagactctctcgtcaattccttccatgatgcacctgctagtgaaaaacaagatgacaacttttcagtggtgaaatgttcctaaccttttatctgatgaactggctgcatgcagagatctcctgctggatatactcgagtgagagacagttagcacgcatgcggctcgcgtttctgagatcagtccttaatcaagaggttggggccttcgacactgacttgactactgcaaccatcatcacaggagtaaccaactacatgagtgtcatacaagatgcaataggagagaaggtaatggatttcataatcatgtgagcattctattgatgcaagacttttgaaactctgcagtcagatctgaatcttaagttcactcttctgcagctgggtcatttcatcgcaagcttctccactttctttgctggcatcataattgcgtttatcagctgctggcaagttgcaatgctttccttcctggtcattccccttatcctcatcattggagcagcatacacaaaaaagttgaatgtattatctctgtcacgcaatgctattgtttcagaggcaatatcagttgtagagcaggtattcctgaatagataaaaatgttgatacacagatcatctcccacttcgctatatatgtttataatccttcgtatacatttgttcacagactttgtcacatatcaagaccgtcttctccttcgttggagagagctgggccatgaagtcctttgtccaatgcatggaaaaccaatttaatctaagcaagaaggaagctttgataaagggaataggactcggaatgttccaagcagtgaccttttgttcatgggcactgatggtttggattggggcagttgcaataaccaaaaacaaggcaacaggaggtggcacgatagctgccattatgagcatcctctttggtgcaatgtaataatcacacaaactcactgattgatttcattgcactatttcttttccaaatatagttaccattcaaacaaaacattgaagcaactcacatcctttagccaaagttgccattatttattattattattattattattttcatgtattctagacttaatggatttccctactacatggattcagatcaattacctatgccgcaccagaccttcagaccttcaatcaggcaaaagctgcaggaaaagaggtcttcaaggtgataaagagaaagccatccataagttatggaaaaagtggattagtactagacaagattcatggagagatcaaattccgtagggttcactttgcatatccttcccgccacgataagccgattctccaaggattctcattgtccatccccgcaggcaaagtcatcgctctggtaggaagcagtggctgtgggaagagcactgtcatttcactacttcagaggttttatgatccaacttcaggtatgcttctacagtcttacctgtgcaactatatgcatgatctaagtcactatttttcaattaaaccctgaacaaaaaaaggttatatattgtttattagtagtacttatgtgaagcattagtaactgtaagcttaagtagtattaaaatgtttcagtcatgtaacaaggcctaatactgcaggtgacatattcattgatggccacagtatcaagaaacttgatctgaaatcgctgcgcagaaatatagcttcagtctctcaggaaccatcactgttttctggtaacataaaggacaacttgaagattggtaaaatggatgcaagtgacgaagagataactgaagcagcaacaacagctaatgttcattcattcatatccaagctaccaaatgagtacttaaccgaggtacttcaccacttcctatggaaacttataaatacttggggtcgtcgatcatcgtatttaaccaaatatggattagggttctgactcatgatttattaaattccaacaagatctctcaaggactgaagtcgactgagtgatgcattaagaatagaactttaaaatttcagatagtcacaatttatttccataggagaatcatggatgtttccatattattagatattcaaagatagaaaaataactcccgctgggacttcctacaattaaattgtttcaggtaggagaaaggggtgtgcagttatcgggaggccagaaacaaagaatagctatcgcaagggcaatgctgaaggatccaccaatcctacttctcgacgaagcaacaagtgcccttgattcagaatcagagaaactagttcaagatgcacttgagagagcaatgcacggaaggactgttatcttgatagcccacaggatgtccacaattgtaaatgctgacactattgttgtcgtcgaaaatggaagagtagcacaaactgggacacatcatgagttacttgacaaaagcacattctactccaatgtatgcagcatgcaaaatatagaaaaggaagctgaaaataaagtggcaaggtaaagttaaatgtagccaactaaaagttttacttgaccaagaaaataatgttttatactcagttaagaaattcttcaatataacttatcgcttcaaaagtatatgcatcatgcatgggttgggggtgtaccttagaatcctagtgaatgaagatttttcgaactggaagccagcagttgaaactaaagcaagagttactccactatttacaaacgatgaacagaacaagaaactgcaatatatatatatatatatatatatatatatatatatatatatatatatatatatatatatatatatatatatatatatatagagagagagagagagagagagagagagatgtttagtgatattattacatatatgtagaattactagggagaacttaactttttagtttgagtgattaaaccgcacttctgaaaacatggaggaacaaattagcgaagcacaaatcacgcagtcctcgacaaatcggggaccaaagaaaaagctagaaagactggagtcaaaacaaccaagcagtgagaatgtaaaggacccacaccctttctttagactttggtatggattgcgtaaagaggacattatgaagattctatttggctcctcagcagcagccatctctggaatctcaaagcctttatttggttatttcatcatgacaattggtgtggcatattatgatccggatgcaaaaaagaaagtcaccaagtattctttgatattcttcacagcaggaatggttacaatggtgagtaacatcttgcagcactatatttatggtatcattggagaaagggcaatgaaaaacctaagggaggcactcttttcaggtatgtcacatgaaaaccttgaatttgttaagtgttcaccataaattctcacaagagacaacattatatacatacctcatacccttgataatatgaaattattttgttcaatgcaacgcagctgttctccaaaatgagcttggttggtttgagaaaccaaataatggcataggatttcttacctcacgcattgtcagtgacacgtcaacagtcaagaccatcatatcagacagaatggcagttattgtgcaatgcatctcttcaattctgatagcaacaatagtaagcatgaaggtcaattggagaatggctttagtttcatgggcagtcatgccatgccatttcattggtggccttattcaagccaagtcagcaaaaggattttatggtgactctgctattgctcaccgggaacttgtctccctagcttcagaggctgctagcaacatccggactgtggcatcctttgtttatgaagatgaaataatcaagaaagcagaattgtcactgcaagagcccttgaagatcaccaagattgagagcatgaagtatggggtcatccaagggatctcgctctgcctctggaatattgcacatgcagtggcgctatggtacaccacagttttggttcagaggaagcaagcctcatttgaggacagcataagatcataccagatattttcactcacagtgccttccatcacagagctatggaccctaattcctatggtcatgtcagccatttcaatactgaatcctgtatttgacacacttgacagagagacacagattgtgccggataaaccagaaaacccaggcaaagggtggctcatcggtagaactgagtttcaggatgtgagcttcaattatccatcaagaccagaggtgaccattctggatggcttcaatctagttattgaacctggccaaagagtagcattggttggccccagtggtgcaggaaagtcctctgtactggctttaatactgagattctacgatccttccagaggtagagtgctaattgacaacaagaacataaaggactacaatctccgatggctcaggaagcagattgggctagttcaacaagaaccaatcctgttcaacacatccatcagagataacattagctatggaagtgaaagcccttcagagaccgaaatcatccaggctgcaatggaggcaaacattcacgaattcatcagtggtctaccagaagggtatggcactgttgttggagacaaagggagtcagctttcaggagggcagaaacagaggattgctattgcaagaacaatactaaagaggcctgccattctgcttcttgatgaggcaaccagcgcacttgacggtgaatctgagagggtggttatgagctctttaggggccaaagtgtggaaggacgaaaatgagcaagccagtatgattacaagtatcacagttgcacacagattgtccacggtcataaatgcagatacgatagttgtgatggaaaaaggaaaggttgttgaacttggtaatcaccaagcattgatctccgctgaagatggagtttactcaagattattccacttgcaaagtaacatgaaagattgaccaccatctattcaagttccaatgtggccaaagaccaaagacacttagcaagaatagctttaggagattaagcatcgcttaaatggacttgtgtcacttcacaaattgtaatacatagctatctcatcatacaccgatgatgtatagtccaccagttagggcaaaaaacaactactattcattacttgaatgatatctgtttggggcgcctccactgccatatgtttaaccttattcttcctatgcaatataaggctagccaaaatatcgaagctagagtaacagtatttaagccaggaaagggattcagtaatattactaatataagctgctacccctgcatgcagtccatcaactagtttaaccatcttttaaggttgaggacaacttgaacaaagcttcaagaaactagctgaatatctattttttttaaaataaataggcaagaaatataacatagaaagaaagaaaacatcatgaacaaaaaaattgagctacct

SEQ ID NO: 4763 - DNA, 7928 bp, Sorghum bicolor
actactatgcatgtagctctttcctcaatcctgtaatatagtttattttaacattcaaaatttattctaaaatatgatacattctacaaaactcatttttatattaaatactttatatttatcagttaatcaccattaatcaagttgatgataacgtttgattaggaaataaaatgagggtacatgtgtttttttatgttttctcttaatttattttaatatttatagaatgtactatattagaggacaaagggagtatgctaatagatagtgtgaaatatacatgcacttgcacatgaatacccctaaagccggtggttcattggtggagctaacgctcaaagcaagcaggggccaaacgggcctcaagaacacactgctacaggcaagcatgacactatagctaacaagcttgcatgcatcgggcatctagtcagtagtaaaaaaacaactatgccagtaaacgatgtgaaaatatacttgcacttgcacatgagaccatgaaacttgatgtacgacaaagaggggccatggccccctatggccctaacgtagctccaccagtgatatctatcctttctactgacactggcttgaaagaccctatacacgacttgcaatatctgtattatattatccttagcagtaaataaataaaaggcacatttgaaattttctgttcattcataattgctcttgcaaatccctcttctctaatagaagatgagcattcctaggtaaggatatttgtgtaaagcgtcatgtcatttttactattgctacatcgacgtaaccaacttgttactgtcttttcacatacatgacccaccatgtagtgtcgaggtagttaatttattaccatctttgcacattcatagcccatatagtgttttatgtaataaggattagttagattaggtatattgttataaatatataaatatgataaaatatacacactctgttgttagtgtcgttttctgatgagatggtagctccatgatcaatttgaccattaatactcactagaaaagctgtaaacatgacttgagatatcgtggcgcatcatttgattcaaacccacaaacaatatcatacatttgttattttgtaattattaccattatccttagccataaataaaaatgcaactttgtgatatcctcttccaaaagaaaaatgagcactcttaagcaaggacatttgtgtaaaaacaacatgttgccttaccatcgtaaccaatttttttactacctttgcatacacatgaccatctatatattttttctgaatatgataaggactagtcgaattgctcgagctgctctaagtcaatgttcaccatcaaactataagaacataatacgtacaaggcatattgacgttactacatcacatatgacaacacgtacaacaaccgtacgcgtatatgtaaccgtctttaccataaacgcatgctacatacataaccgacttatcccataaaagcacgttgtgttatactcaccgagctccgcaaatgcgtttctccgaggtggcaactaacacgcctaatctggaccgatggatcctccacggaccatccaaacacacctcttgccctaccttttttgttgcacaacaattaattcaaaacccaaaccaccacgcacatatcatatatctctagccataaataaagagatggcatgacatctctagtgagagttccttttgctgatacatacattcatatgctggttttgtgtctctctacatttgcttttttatctctcctctgctctccgtcccttctttttccgcttttttatacccccagcaacaaaaaccccacaccacgagagagaagagagagggagagaggccaaaaaccccccttggcaaggcaaagcagggctcggcgcagacgagagagtacgcaggacgtacgagagggagggagttggtagagcgcggcgcgcacgccacaactagcgcaggagaagcgagagaaccatcccatggcggcggcggcgatgacggtcgccgtggtgctcgcggccgtcgtggccgcggcggcgacggcggaggtgcgctgggaggtggcgtacctcaccgtggagcccctcggccccgcgcagaaggcgcgtacttcttgtcgccaccacctctgtttctctctgttcttgtgtctctgctgtctgaaagttcttgatttctaccggaaaaaaaaagttttcgatttgcttgaaaattttacgtgttcttttttcttcgctctgtattttctttttacgcctcttggcttcgtaagatcttgatctttcgggaagaaaaaaaagaatcgccatatatgtctttttagatgttttgattgatttttggcggacgtttgttcgttggttcgatcgacgtgtgcttgtctcaaaaacgcatcctttactttattttctcttcttcgcgcgagcagtttcgtcgaaacgatcttcatcgtggtcgcttcgtttgcgatttcgttgtcttgtaaacgtttcgaaacgctcgggctcctccgaaaacaaattaaatccgccgttgatgctgcaaggacactcttttttggtcgtgatatgtgttcttcagacctttttttttttggcgaaattttacttgatttttgtggcgcatggccgaaagatttcttgcgctgtgtgtgcctgtctaaagatctctcctttgtgaatgaaccatttcaaagcccaaaggttcattttgtttttttggcaaacaatcaatatgagatactgagatcttgtactctgtttttttgtcattttttttggtttttaatacagtagaggagtttcgtcatgtgggttatggcagggcttgatgagacgcaaaaattctgagaacacgcattttttttctctcttcaggtgattgggataaacaaccagttcccgggtcctctcttgaacgtgacgacgaaccagaacgtgagggtgaacgtccagaacaaccttgacgagcccctcctcatcacctggtacttacttactactgatgatgcctcttgcctctctgatcacttcattttgatgcagtcgatcttaagtagtagtagtagtcctatcacgtgaagcaaaattagtttcttgggatttttttttattccacacatgcattttcattttataccaaattaaaaaaaaaaacttgacgagtcaaattatgtcagtagccaaatctatggtttccttccatctctgatgggcctgcacttccatttctgcgcttcctctttgccttcctatatttgccataaaacgtgccatattttgcgtagtgcatttgagacatttatgggcttaattgatcatgacatataggcatatacggacaggaatatcatgttttttccagcagattggttcaggtgcatgcatctgtgcggcatcataacatttatttatatccagatagttcataccaccactaaaaaaatgattttacaagacaccacctaaatattaatcgtgtcggttgcaaaatccaactgcctcataaaatggttgatgatttttgaacacggttatttttatttatcgaagcagtcacgattaaacgtctcgtaaatagatttacgagagcagtaaaaaaataaccacctactacaattaatttcaaaaaatggagactaatttcgaagttggaaaacctaaaaggcccgcttgggttaatatgaccaagcctacaaaaaattagaaaaaaaaccaccgcaagcccgtaagcaggccatagtatataaatgaaatgaaatcctagcccacctacaatccccactctctctctctctcactcagccgtcaacgcctcttcttctttcttcacctctttgcgagctcgcaggcggagggcggcagaggtcaaatccacgacacctcttctcagcgcacaacgaagggtggtggggtgccacgcgctccacgcgggcgcggccttgcctctcgtggcagccgggttgctgccttgacggtggcatacctcggcgccaccctctctcctctccccctcttacggtgtgccgcccggggaggtcggacctagtagtggcatggtgcagggaggccaaatctgatgatggcatggcgcgggagttgtctctctcctccctctagcatgtgaggagccagatcctagtggtgacggctcgcgtgggggctagatccaccggcgggacgtgcggggaggcctctcctgtttgcatcgacgcttggaggagctagatccggctacaacagcgctcggaggaggtggatccagctgcagtgtgcaggggaggcctgcagtggtggtggggcccgcacagagcaggcgggctctgaaacaatctcgctggtgggttttctttttaatggatttttgtaggtaggccctcgaaccacctcagaaaaaagtgatttacacaagtctttcgtcttaggcgagcacgatgcccaccttgataaaccgaaattatccgtctgcaataaaaatactatagtcatgtagcaaaatgttagtatttgctctagtgactgaagatgcaacggtttctattatttttagatatatctgtgttcttgaattacatctgtaccaaataaaatctgcataacattttctagccatgctatctccttatagattatcatatcactttttactaccaaataaatttgcagatgttagaccatccttggaaacatgattgaaatgcttaatacctgagggttgcttttgcaattcctttttttttcaaaaactgaactcattggcgccaattttctcctctggcaattggcaactgaactagtttgctcacttatctcttttccatgggaatggcagggacggaatccagatgaggatgaactcgtggcaggacggcgtgatgggcaccaactgccccatacctccgggatggaactggacctacgagttccagctcaaggaccagatcggcagtttcttctacttcccgtcgctcggcctccagcgagctgccggcgggtttggccctatcactgtcaacaatcgtgcaaccgtgcccctccccttcgaccaccctcatggcgatatcaccctgttcattggggattggtacaccaagagccacgttgtaagagctttgtttttgtgcctgttaatgcaatctggatggtttatctatttgtttctgagatagtcggggaaaatattgcactttcttgatctttggtggcacaatgatctcgattttcactgaaaatggagttgttgcacagtatttagcttggtagttgaataagcttttgcatattcttcttgtaatttgagtattctatcccatgtaggaactaaggaacatgctagatgacggtcaggatctaggggcaccagatggcattctgattaatggaagggcaccttacagatatgacagtgcactggttccggatggccttcagtatgaaactgttggagttgagccaggttggctttggtcaaacttttacttgcaaatttgcagctctatgtgcaatttttataaaatagaatcatacacccatgctgaatgctcgaagttatgtttgtatgctagttatatttcaaacatctcttactttggtagcacaaaaggttggattttatcagtcactgatgtgaagtggaaatgagtggaagtaggaatgcagcttagcagtcaatctttatctgcattactataacaccaccatatgtatcatgagtcacgtgaagtctgatgctctgaatacttgtaacaggcaaaacatatcgcttccgtgtccacaatgttggcatctcaactagcctcaacttcaggatccagaatcacaacatgcgtctggtagagactgaaggaacctataccaatcagcagaactacaccaacctagacatccatgtgggacagtcttactctttcttggtaaccatggatcagaatgcaagcaccgactactacattgtggcgagcccaaggtttagcaatcctagatggcatgaagtagctggtgtagccattcttcagtactcaaactccaagggcagggcttctggcagcctccctgatgctccaaatgatcactatgacaagtactactccatgaaccaggcaaggtccatcaggtattatgttcacaagagtacagtattacgttcttcagttcttggcatggaaattcatttctgatcttgtgttaaggtggactctgattttcatttagcttaactgattgttctcctgtatttgaagttgtcatttgtttttctatatttgttataatgatatccatatgttctccatcaagagccattgatattattgttgtttcagaatgaacacaagcgctggtgctgctcgtccaaacccacagggatcattccactatggatcgatcaacatcactcagacctttgttctcaagaacgagcaacccttgagcatcaatggaaagcgtcggaggactatcaacagggtgtcatactctcctccagagacaccactgaggcttgctgacctccataacctaactggagtctacacagctgacttccctgcaatgcccagcaatgctccagcaaggatagcttcatctgtgctgaacgcatcctacaagggtttcctagagatcgttttccagaacaatgacactgatgtccagacctaccatcttgatggctactcattctttgttgttgggtacgtgctgaaccgtcacaatcttcagttttaaccaatgtatatcagcctgtgaacatctgaaaagaacaccaccttcctgtgaatttcaggatgaattatttttttgatgaaatttcaggatgaattatggcgagtggacaccagacaggaggaatgaatacaacaagtgggatgccatctctcgttgcaccactcaggtatacaacctttccaagacacatctgataatgtgccaaaagttctgtacttcacattagctgttccattggtaattctgaagaacacaaatttctgaatatttgcaatgacaaacaggccttccccgggggctggactgcggtcctagtctcacttgacaatgttggtatctggaatctgcgtgctgaaaagctggataactggtacagagggcaggaggtctatgtgaaggttgctgatccactgggctacaacatcactgaaatggtcatcccggataatgccctgtactgtggtctactgaaggagaggcaaaagtatgtctcagcatgtctcttttcacctaatgcagtgttatattttactgttcttgacctgcaactcacatcctgctccaagaaccctgcaggccacaggttcatgagtcaaacagcaagtcgtcggcgcaaggagatgctggatggagctacaaactcctcgcaaccatgatgctggtcgtcgcagctgtgatcttcagttgattctttcaaagttttttgctagatttttgcgtagaagaaatagaacattgaaacatctaccttacaagttcagcatagggtaatttgtggagataggatctggtgatgactctcaagctggttgatagtgtaggacaacttgaaatgatgtttgtggaaaaggcaagaagcatgatacttaagtgagaatttaacaaaacccagtgcgtgttctgatttgtatcgccgcagtttgtcctgagttttttttttatatattttttatttttttttttgggcaaggagtttgtcctgaagttaacagtttcatgtctcgttgcttaactggcattttcacattatatgatgaaggcatagtcgcctggcattattgctgcttcacaagatatctttgaatctgaacttcattttgacacgaaccactcgcaacccaggtaaactccatcaagactaacagattgcagcaaacgtacaaaaagcaaaacaatatcaataaattt

SEQ ID NO: 4764 - DNA, 7676 bp, Sorghum bicolor
aattgagaaggttgtgaactcaagttattccttcctttatcgacgaaaagtaaaaacaaagtgaggaaggcttcatcgggcacaaacgttggataccattattcatatgtacactttccatttgttcaagccgtattaggtttgttttaagttaatattttgaattttggctatcaattttaaaatctacttagtttcacaatatgtgaaccatatattgtgaaaagtatttctcacagtaaacttaaaaacataaatcttatcttgccagactatatttatatattaaaaatgatagttaaagatagaaatatttgatttaaaacaaaactaatatgccatgtaaagagaaaggagtagtcttcacagccatatgataggttagatactaactcaatgtaacttatgtattcaaccatatggttagttcactgaagcccttttatagggtaacttttggtccgcttagagtctctaacaaataaaaaaaacataaaaacaccctttgagaacctaatccgtttctaggatttaaaatatttcaatcacttgaaatttaggagtaaagtataatttgaaggtacgagggaacagaaaacctttcgaaatacaagtatacaactgcaccttaattggattggactgagtacattaattaagtgttgtttactcacgtacgtgtgtaccaaatcgggctcggtcgcatataaagtcaaatcgtcccaaaaattaccatgtatcccaaagtacgaatgaaacaaaagccactgatgataaccattacccaatccaagagggagtcatggattatccaaatcatttttaaatatttccgtgtactatgcacatgtcactctcaacgtcccctcggtgttatcgaagcctcggcacatgggatcgacaaaaccccactggctgcacggagagacaaggttcaaattaccaatctgcccacagctttctaccgatgtatactagcattgcatttttatgaacaaatcttaaactttctatccaacgacgattggcacgactacatgagtaaagcaaattggtgtcaattttggatgcaagaatcggttccgattctctttagatacgtagaaatgtttgtagtgattctctctttttttactagagatcaaaatcaccactagagtagtttctctagattttgtttaacacgttcctacctcccatatagtctagaaatatttctagtgatcatctttaagtgaaactaatttaaattggttgctttttgatttgatttgatattttgccaataatactttttataaaacttatatatttttatgatttttttctggcaaactaatgatttctgccacccttctagaatcagaatcggatcgacttgccaaacgatttgagaaagcgattctgattcacttgaagaaacgtttctaagaataatctgaatctcaaacgtttatgcgagaatatctctaccaaactcacccttgagaagaagaattgaactagaaactaaagtaaaacggtaaattaggaacctgcatcactgttcagagttccaccaaaaatatctaaatacaataacctgttgtcaacttgtcatatttatatgcttggagtattgcttctcattgtctcatatttaagacaataacctactagaagcatgccgtataaatttaattctaacttttagtgaaagtgcacggaagagacattttatgaaccattgctctacttagaacacatattttccctatatttacatttttctatgaaattagaccattctagtacctttttttttatgaaattactgcattccaagctttcatgttccagtctcattacatagataattcacatctacccaagttttgaacaatattagaacgcaacatgaaaatcctattaggttgaaatgagagtttctttaacatttaaaggtcaatctggtcattgcacagaaaattaattaattctagttatctccggatcctagcatcgctcttctttcactccgcatctcctcttcacttccagagtccaccggctccgatcccaactcccatggcgctctccatctccacgcccacctcctcctccctcgtcccggcctcccgtcaggtactacaccctctctacccgtctcccctcctctgatcctctccagcaagctcccattcgcgcagttcggccgctcgccgccaccgtagccacctggtcatctccccctgtttcacctgttcttggtcgttgcttcaggtggtcaggttgacttcgcggtcggcaaagcctgcgactttcagcctccggaggccgcctctcgccgcggcggccgccgctggcaacgcacccacgtccccggtcagcggtactgctcctcttggcccccaatcagtgtcctgtcctgcggcttctcgtgacgtgtagctttcgactttcctgactcccgattcgctctgtttcggcgcagaggtcgtcactgagctcgacgcggtggccggcttcagcgagatcgtgccggacaccgtcgtgttcgatgatttcgagaggtactgtaacagtcttcctgccttgtttttgtgtcttgttgccccattggatttggacatttggtgggtgggttgaccgaggctggcgcattgtgctgttatgaacaatcgcaggttcgcacccacggcagccacggtgagctcgtcgctgctgcttggaatcgctgggctcccagacaccaagttcaaggtgagaagctgtcgcgattcgaatgttcagctattgaattaatcctgcagtgcaagaatgacatggttcatgtttgttggggctgtttggttgttgcagagtgcgatagatactgcgctggcagatggtgagtgtaacgcattggagaagcctgaggacaggatgtcctgttacctcaccaaggtctgcatgtttcatatcagatttcgctgttactactgtgatagactgatatgatagctaggcaatgtgggggattctgtgcatctgaggggctgaatcgggaagaactttcgcaggctctggcaaacgttggcgctgaactagctcatcaagtccctggacgcgtttcgactgaaatagatgctcggttggcttatgacacccagggcattatccacagggtatgaggttttatttttctcttttcgtattgcttgaatggaatttggtgcatatctgcaattattaataattgtatggaccttctgttagcattatagtttgttaacagaaaacggttaagaagttctttctagcaatgtctgtatgtcagctttcttggcatctgcagttcaacctgcaatgtaacactccaatgcacacaaaaaacaatggtgatagcaacaatattttgttccagcatattcttttatgttaccaatgctagtgtttcatatgcaaatatgcacaaggatagttcagtactgtcaagatagaaagaagacttatttgtggcataactcccaaagtgggccaatagatgtaagatagcagggatatatttagctgcatgacactagtatggacatatggattagtactcttattactaagttatttatatgtctatcgaacacctcttagttataaccttactttgatcaaattatcgtactagtaaatttgatcaataatttttcatggaacaagcacttgtctggctctgatgggctacagctggcaacgaacaaaacactagctgtttgcttgatatacaattgtacagtgcagacgtgcagtataaagttgtgatttctgacagaacaatatttctgagacttcaaatatgcattttttaaactcttgagcgacctttgaacacattttagtcatcagacagtcaaattctctcatgctcatattatcaacaattcgacacctcacttttttttaaaaaaaagttcaacatctctatgctaccatcatagcaatcaatattactgatttctaccagttgcacacattttttttattcacattctcattatcatacagatcacactttttacaatttaacagaaatggcgacttaatgtttaaataactgttcctaaacctcagcacaaggatacgggcatatcaagatatttgctatctgagtaattgtactcaaagattgttcttatccttgaccttgttgctgatgcttgtgactaagcatggctattggatatgctttgagaaaaatatctgtgcttcttctccttttttactgaaaaacgtctgcgcttatcagtcacaatttccttaaaactcgtatctttgtatatttaggtgcatgaactgttgaatctatacaaccagcatgatgtctcaactgaccgcctgttattcaaaattcctgctacatggcaagtaagtatgcaatgcactactctaagttctgccttgttgtaccttctgtctcgataaatttttgcttccaacttgtttatcatcagggcatagaggcctcaaggttgcttgaatctgaaggagttcaaacacatctaacatttgtttacaggtaatatacaaaacattttgtataatttgctccttattctatagcttaatggttagagcagggtactatatggacattttccccccacttcgcaacatttttatgttacaatatttgggtgcttagcagtacccccttctttaaagtggagcatgaaaacaagctattggcaatctgcttggattttcatattatgcttttacatggagtggtattctgttgagttcatcttgtggataataattattcaggcttactgttaatcaggaagaacaagtttggaactaaagcacctgctatagtgcaagtttggccctttactttacagttttatataagatgaaaaataacttggagcttatatacatcttttgttttgtggctgaccattcttgcccagtttcgcacaagcagcagcggcagcacaagctggtgcatctgttgtacagatatttgtggggcggttgcgggtaaatttatcaagccatcttttaccatgactctcttctaaaacagtatgttgtgctaaccacaaactacccaggattgggcaaggaatcactctggtgatccagagatagatgaggctctgaagaagggagaagatgcagggcttgctttggttagtttcagttcttttatcttttagttacttatgcacgattatatcaacataaaagaaatttgaagaatcaaatgtctggaaacaggagcttcaacctgcaactttactgacttacagtagtttttgtgcttgctgcctgtctattaagctaaaaaacaaaggaatagattgggagttcttctactcagctgtcaggaagtaattttgagttatctttgagtcaattttagcgtttgtcattttttatcatcccatatcatgtagagaattagggaaacacctcatgccttttttttttttgggggggggggggactttcatatatatagatatcagatacaacttggaggtacaagtaacatgatatacatgtgttacactatacatatctctaatacatcatttgattaatatcagcagataatgtgttggtattttagtttccttacggtaatgcagtataagtgagtaattaacaagactaacataggtggataactatggtgcttagtattaaggtagtcatcaataagggagttacttcttatagatgagctgtacacttgcaatttctgctactaagctagagtttataacttcatatatttgtgggttataatccaggcgaagaaagtatatgcctatattcacagaaatgggtacaaaacaaagttgatggttgctgccatacggaacaagcaggacgtatttagccttctggggtaattttttgttgttgtattacttgtttttgctggatattggatacaaattcacaagtcattgtcactaacatggaactaatgtttcttaaatgtaggattgattacatcatcgcaccactgaagatattgcagtctctggaagaatctgtcaccgatcctgatgtgaagtacggttatgtcccaaagttgacccctgctattggcaagacgtacaacttcactgaagaggaggttcgtgcactcatggatttgttccaaattcacatatctgaagttctgaaccgcttaattggcaaataacttaatgatgatcagtaatcatgcattgtttagattttttttaaaagggcacctttgagtactccactaattgttcccaataggaaccattgcaagtgtgatgttgtatgtcaatttatattgtcttcaccaggcttgtgcatttccgctagacgaatatagagagatatggtagcagagagttgtgtagaaggaccaggacatatctgtaggatccttttatagaactctctgcaagggaaaactctgtttccagaattgatgaatgagaatgactccctgctagtctgatgaaaataaaagtctctgataagtgccaaccttaatcaagataaaataaagccaagaaaagaaaaaaaaactgatcagttctctacttttttttaatcttgtatctttatgctgattgattgttcatttccgataaatggtgtttgcagcttgtgaagtgggaccagttgagcctatcagctgcgatggggccagctgctgaagaactgcttgcttcaggactagagggatatgtgaaccaagcacgccgcgttgaggagctcttcgggaagatctggccacctcccaatgtttaataacgccttgccgcgccacagttttcagttccaacagagagcaataacaaccggcaagggaacaacacttcgcttgcttgccactggttctccaatgtgatttgcctggcagtcccacaatgctgtgcaaaagacgttttgcttcttcttttggatcctacaaggggcgcttcagtgttttcgtgaacttgcattgtgtattgtgtttttgtgattcaaacgatgtactaaactgatgagaacctgtctcctgatattccctgcatcttcaaatgtcctggtactgctaccaaacagcttcttggttcaggtggcaatgtgccaatgtgccaatgttgttccatgagaatcctccatccaactattccaacaccacctaagctgcagttacatgattatctgtctgctatcaaaagccattctatgctagttagccaagttcatgttttcaagatacaatcgcccacctaacatcaaaactctgttgtgaagcatcatgctgaatgtatgaatttaccatatgcttctgttacttggcctgtttttattgttatgtgtgtgtaagtaagcgattggtaggtggtatatgcggattagaaggaggtgtaacctattgtttggtcaaagtttgtcgatgaaggtcggcagggcaggccggtggttcacgctgatacggtgggtggagcaagcaatgaaccggtggacggaggagccaaaaatatttctcatttttggcttttcatctatatttcaatttcgacacccatctttctttgctcgtagcgtttagtttccttcttgtggagtttgcgttttttttttttgccttgtaattttgtttcaattttttttgccttgtaaacgtcctctcaagtcgtgaaagttaactaaccccaaattttattagt

SEQ ID NO: 4765 - DNA, 4801 bp, Sorghum bicolor
gcctagattacaattttatgccttagtataagtactaatttttcttctcctttgtgcaggttcaatcggcgggttcgaatgaggtgcctccgtccggagggttagcgaatccaccacttctacagcttcagccaccgtcgagtgggtcggggtatgggtatccaccacgtgcgcctccgtcgcagcagctgcctccaggaggggcaaattgggatgcatggcagcagtgaacttgtggatgttgtgaaactttgagatactttatgatattttgagataatgtgatggacatggtatggatattgtgatacactttgttaatatatgtgatggacatgttggttttgcaatttgagttggatgtgttatatctgttaattgttaatatgtgttttatctgtgaataatagctggaatcaaaacagaattaaaaaaagctctctggagcctttgccgagagctaaacgtttgccgagagccgaaactgcacggctctatgcaaatcctggaccttagccgagaggccagctctcggcaaagagtcagtctaccgagagccaagctctaagctctcggcaaattaactgtttgccgagaggcgagctctcggcaaagccctgtaaaaaatggtggaatccttctttcatttttttaaaaagtctttgccgagctgggctctcggcaaacctcaatataaaataaattttgcaaaccagctcgactgccattctttttcttttttttacaaaaattatttaccaagcggggctctcggcaaagaagttcgaaaagttgtcagaactgaccgttaacggtcgttttggccgttactagcgctaacgttcgccgagagctatagtttgccgagaggtggactccatgtgctcgggaacaattttcccgagagcggctctcggcaaacgatcctttgccggtagcttgtttgtcggcgtttctttggcgagagctgctctcggcaaaatgtttgccgagtgtgtttgcccatttgccgagcgttctaagctctcggcaaaggactggaatccggtagtctatgtagggccatgttcagttgttagccatagtttttgctactgcgagtagaatacacaggcacatatatggtgtcacaaatattttattagttttgtggattaaattatgtctaaaatttcctaaatatctttttttagaattacacagtacaacatagaagcctaacacgcacgcacactcacccgtaaactctacccggcctataagcaattccgaaggactgagttgacagatcttgagattcatgaagtcaccacatgtgtcttgctgttgacggggacatcgcttaatactgaaaagcacatatatagcgtcattaaatcctaaaaaaatctagaaaatgcgaaacgcatgtactaaacacgagcactttaattagctcgggtggacagattctaccgtaaggaatccaaccaactcatttatgatcaattcacaaaattacctaaatatctaacgatcaatctcggctgcatcactttttgctacagatgaaaaaacctgtagaagccctgacaaagaggacgtaattataccgaaatcaaagtgaagcgcgcgtagtgtctcagctgcttttatctctgcatgctttggtattgaagaagcaacacagcatggcaaaaggcatgtagtaatacatgtatacaacacaaaacgtacccaccagttatgcaaactaaagcttaacaatcttcagacccgcagtttcccaaaagtacatactacgtactcctaggtggtagctacagcaaaaagtaattaattacttagccaatataatacaagcaactagtacccagctagatgcaggagtagggatagtaggggtatacatgcatgggatggagcaaatactactactagagaagctggccgccgatgaatgcccaccagcgcaaccagtctacagatcatggcgcgcaatctttcaggcggaggttttcatggcggctgcgggcatgctgctctttttcgagctagtgtgcggttctctccggcgacgaagcaacaactcgtttgtccaccgggggctatgggtggcctacaccctccttccccttctcatcacctacaccctcggcctgatgcagtccgctcatgccaaagtgctcatgtatcccgtgtgggcgctgtccctgatgatcgccggaggcgccacctccatcaccgcccatgacctcgacgacaacaagcagtggaagcgagctctgttcgtcattctccagtatgacatgtacttctgcataatactgtttcagctggtgtaccccaaccccaaccagcagataagcgtcgcccacgcagcgacccccgtcctggacagcataaagcttctgctatggcaccccatcgccgtccccgtcttgctcctcttcaccactgtctgcattgcccatacctttggagcaatcgctggctggagggccaactactcctaccctagcaaaatggttgccgactacatgaagcgtcatgccgctgcagcggcagcggcatccagatcaagatcaccatcatcgtcgtcgtcgtcaggccgaggctacttggatcctgtcagcatgaagtacttggtcagctggccggcctacaaggtatcccgcactacagcaccaagtggccataggagctcctccactgtctccagaatgatgagatgccaagcgcaagcggtggcagaagaggacgacgaagggctcatcactgtggagaagatcggggactggtgctgcaggaacgaagacaagttcaggtcatggggcgtcagcacgtcccggatcaaaggcgcctgccttgcatattccctgtctcacctgctgatgcgccgcttcttcgggatggattgcgcggaggcaagccttccggagacgcgccacttcgtgcttcgagggctgctgtcagagagcaacactgacgagtacatcaaggcattcagggtgatcgaggtagagctagcattcctgtacgacttcttctacaccaagtacgcattgatctttgggatggaagggttcttctttctcatggtcctagtgaagatagtatgcgcatccaccattggagtacttatgctctacagaccatttgcccaaggttttccccagtgctggtacggtgacattgtcatcagccctagcctgactagtgtcaacatcacagtcgcaatcatcgcaatattccttacagtagaagcactgcagttcgtactgtacatgggatcggattgggccatggtatcactcgcctgctgccatatcaccgaaggaaggccccatggatatatcccactatcatttcgcaagctgtttgggtttcttttcagtaggcagaggctaccgttattcgggtattggcagaataaactaggccagtactctgtcatacaaggctccagattcttcagctctagcaaccaatttgctttcgaatgtagtggcctgaccacgttcatcctttccaaagccattgcttacctgggtcaatgtgtggtcagtctgttttcaagccaaggtctgcattttgtcaagttacctgaaataatcaagagccatattggatccacactgaaatccagtactgacgatggtggctacctgactaacgggaaaacgtcgttgcagcgcaaccatgttcttgggaatttctcctggacattgcagaatgagactcagactgagagcatgcttatttggcacattgcaactgactactgcagcatcatggtgtctgacgagggaaacagcaggcagatttctaattccagctatcgtcagcaccgtgaggtggcaaccaaattgtcatgctactgtgcgtacctgatgtctaatgttccccagctgcttccggggaactctgtagataccaaatttgtgttcgaccaagctatgtaccaagccagagaagcactgggaaccaagaagcgtgatagagctggattgcggaatgccgccgccactgtcatcagcaaccaagatgaaggcagtagcaatagcatcttcaccaaaggtctcaagcttggagctgagcttgcgagcatacaagatgattgcctgcgatggagagtggtggccgagttctgggtagaaaccatcctctacattgcaccgtcagagaacgccaaggcgcacatggagtgcctaccgcaaggtggggagtttctcacgcacctctgggctctcctcactcacgccggtatcctcagtcgacagtcgccaccggccggagccggagcaaacccaagaggatgatgccaggccactacatctacatgagagtattcgctactgcagttcatgactgttgcctcgttgttgtactgatgaagtagttcagtgtttcagtctgcatctgtgttgtcgcttgtgatactcctgtattatgccttgacctttgtaggttcggtgtctttctcccctatatgtttgttgtagggggttgtttctccctgtttgtgtgttggtggtgtttgtgttcttttcttgcctccattactttgtaactctgggttaccatttgccgatttggggatagttcattcccctgatgattgcctaaaaattgttgtattatattgcttccaccatgacaaatggaagctcatgcttgtgatttgctaacatatttattttatattttttagagaaaacaagagggattgaaggccgatccctactgacatatattaaagcaaagaaaacaaagttacaaaaatgcatagaggctaaggaagaaatttaagatacaaaga

SEQ ID NO: 4766 - DNA, 4870 bp, Sorghum bicolor
taaaaaatctgacttactgtaagtctttatatttttggactggagtataataattgtgcgttcaattgatggcaacatataaaggcaatggagagcagaggatgcaaagctatctgaaacattttccttctgtatgcaagaaacaagaaacctaatttgtttgagtatccatcgtccatacagctttcagtatgcaagaaacaagaaacctaatttgttctgaatttcattatgtgaggtctttagtctttctatctgcatgactgcagcagcgcgcagctacttgcgcttaggtgaggtctttagtctttctattgtccatgtttaatttgttgattcaaccagtttatgctggagcctagagctctgaaatgagcatagctagcgtgttccgtgctctgaacctcttttgagctgataaccgattttttgttcatcttcctgttgcagtaatgaattgttgttgaaagtttcgactactaaactggctggggcaaattaatggccgccagcccccaagtcgggacaacaaccacgaatcccacagtgatttgctgccgtgaagaaacaagtgtcagatccttctttttcatgcgagacacggcaccagtcgtggagattaataacacgatcgattgatcgaggctgggtcggaactcgggagatcaataacggcatgcagcagcttgtatttgttgctgtaatctgattacacaaaaaaaaaacaccaaagcaaacagcatcgcattttttttatttaacgtacttaacgtctgctggactcaatactacgtactccgtagcttttgtcatgctcttttgtgtatttatttgcgtctgtgagagtgtaattcttttgggggcagaaaagaatggtcgctgtaggatgatgcttgatgcatatgagagtaagtatgaatggtgaactggaatctactgctgctgctagatgattgaataacatgcttattttggtcacaaccgcaggatggggacgctgccatggcaatggcaatggcaatggcattggcatctaatttggtcttttagagcagtcagcggctagtgatgagattctatgcccactgcctagcagcagcagcagcagcagcatatttcacaaccacttgcccacttggctggttccattggagcatatccgactggcaccaagcattttcacatcactcccatgcttgtgtccgtctgctatctatgctcatcagcatctcatctttttgggcaatgtacccaactggatcggatggcaagttgaaacgctcaacttgcaaatgcttgaatggaatgaagcagtgatttatgcaagaatccctgttgcaatggatagaatgattgatgaactgttcactgttcagtagaagcttctggctgctgctctgttgatttatgcctaccgttcatgagcattgtcctgtttggctgtttgttacttcttccatttatgagtatcagttggtggttaactggttatgtgctgtcctttaatgcctccatgtccaagcagttagctgctaattggtgcacactgctgtcactgcatagtgaattatcaatgcttcctcattttctcatagaccttttctgactgaataacaaaaatgtatcaatcaatatctttaaaatggtccatccgtgaatgaacctaaggtgcctttgtataaagaagtaatttcacagaaactgtacaaaaatttcaaagaaatccattcatttccatagaaaaaacacagaaaaataaagaaaagttccatattccaaagggaccttaattcataacactaacaatttgcgtttttttcctaacttattattactaacatttttcttttgaaaatctagaaattattctaaggatctgtctgcgaaactttgcccaatacaggggctcctccataattaaattcggaaacagggggtttctcagtacgtaggaatttcagtactgcgctatataagcggatccgatctagtcgccagtcatcgttaaaaccgagaagaagagaagaggccgaaggaaaacaaatcctgaaaccaagccatgggtctgcaggtacacggctcaccactccctaaatcgccatcaaatctttattcatctgatgatctccaagattggttctttttccccccatttgttctgaatgttcagttccgtttagattgttgcactgtaacccatagtagtgtcggtacgagcgagcttggttagattgtccagagaaacgatgtagacttggagggtcttaatttccgtctagatttgtatgcgtagccaagatctggtggattcagactgttggctcttagcagcacttggaaattgtagaggctgtgctcattatcttcatgcttaagaggggatccaatgcttttgcgccgccctgactcctgagcggcagttactgttgtgttcatcatgcctttggatgtaagatgggaaattcccagtttgttttaagtattttgcgatctctcgggtttctatacaaaattctataaagaaatagagtgtggcgaagtgtgtggttcaaagactggatttcttaaaacgatttacatgaaagatttaccttgtgaaatagtttagcctagtattgcaatcgtggcccccccaaggaacataacatgtgagctgtatctctgttgcaggaggaatttgaggagtacgctgaaaaggcaaagaccttgcctgagagcacgagcaatgagaacaagctgatcctctacggactgtacaagcaagccactgttggaaatgtgaataccggttagtatgtaatcacacagctacttttgttctcttgtttctagttccctttgtaagtttgcagtgtggatgaagctcttggtttgcagaaacccagtttaaatgtcatggctcaatactattcctagcatggatagtgtttaactttgtgtcataatacgaattccctaaaagtttcacgatttgcttcccctccataaattaataaacagcaggccctgccagtttactttcaaggtttaacaatttagaaattcaaaccgtggtgaatacgtatcatgaattcatgatactttacatgataagaatataaaattgggggagagagagggggggggggggggagagagggctaagaatataaaatacaggtaaaatcatatagtaagaaaacaaaacagtattatataaagaataagatgaacctatttactgtagaatctttttatttcttcccaagtttggacaactaaccatggttctaggatttgaagttttagattagatgttgaccaacctcttcggacttgggggttcaaccaatactgaaatgtagtattctatgctctgtcctgcaacatctatttactgatgaaatttgctgcacctagatgcagatgaatggtaaattcaagttcatggggctaggcagagtaactgaacagttaaaaaaatgtaatgctcatatgctttttcttccatatctcacttgtaactaaagtcataattatgctctgcttgtgccgtactaaatgaacctctagtccgtttgacatcagaatctagccagttgccattaactcatgggatcatgatagtgtctcttgaaacttatctgtgtatcttttgtttgtgtttacaatagtatttcttttcaacacaattgtgcttacatgtttattcgttaataaacttttgaagaccgtcctggcatattctaccagaaggacagggccaaatgggatgcatggaaggctgttgaaggttcatatacttatctgattgttgtattttgggcagcttatatatttttgttatttaccacaatactagtgttctacatagatgcatatgcatctattcaagtagtatcacaagatattatagtacttgctaaaacttttgagattttggcaggtaaaccgaaggaagaggcaatgaatgattacatcaccaaggtgaagcagctccaggaggaggctgcggctgccacttcttaaagtctcttaatagttgccaaacagctattgtcagctgagctttatgccatttgttcgtgagaaatagatcatttgatccactggggatctgtgaactatgtacctgcttatgtaactggttaccaatgttatccatctatctacatgtgaagacttaatatgtctgtgtattaaggctgtgtttggttcagtttctaggaagtgcgcttctgctggccaaacgggtagaacacgaagctgtttttccaaaataggctgttttcatgtagtataattatcccacaccttggaccctgctttgcctttcagctttcagttttccaaatgggtgaataaaataaagagatgttttcatttgcttcaaggaagataacgaggggtagattttatagttgcttcaatcaaacgacttacagttttttacagcacataggccacaacagcttggttttccacagctcgctggtttacaaaccagtttgtatttgacataaatcagtaggtaagtataagtttgccaaagctaaaattacaacagctatacattaagaaaatagcactgcagtgatcatacgcttctttctacatatttgctccccctcccctgatatggcatgttaaatggcaagaaacaatactgccctgaaaaaagcatgctcagagctcaggggtatccatatccccagactttcccgccggagaagagattgaggcagagcacgcacgcggccagcatcacacctgggatccaccagccattgccgccgtcggagaacatggcgcacagcaccaggcacaggagcagcagcatgtagaaccccagcccggcgccgcctccgccgctccagtcgccgccgaaacc

SEQ ID NO: 4767 - DNA, 7143 bp, Sorghum bicolor
cgtttgggccgtccatctgaagatctagggcgctgattagaagataccccttcggggtgtattttcgtaaagagtccctgagtttttccaaattaaacccgcgatccaaagcgccatatcaggtttacgttttctgggttttgaaaacgtattttctcccggctcagttctaaatacgttttcactatttacaagattgccattgattttgtaatgctcataaaatattcattttaactccgttttaatccattcaaatttcgttaggtccgtagttacatgctctacatgttagaaacattagtttactgttttgaaactttttaatttcctggtactattaaattcattattcatccacagaaaatcttagaaaaatcataacttctccgttttaactccgtttttcgtgctctttacgcctgtgaaatcgtagcgatgcgtagaatcattttataaacttttcatacagtttttatatgattggtgtactgttctaattgtagctttgtttgctcgtgtatgctttctccgattgtttgtgtgatcgatgatcgagtttagacggagagcagttttgggtgatcaagatcaaagctttggcaacaagtgagaccagcagaaccaaaaggataagcaagagcatttggattaaggcaagtatagcatttggattttatttctgtgaccatgatcctgtgactagattaatgttaagtaataaatgataaaaatgactttttagccacttgatgatttatctgtaagtgataaccgggacaacagtgcaaccatgagggctataatggctctggctttagttaagtatgagtaacttttctagctcgttagcggttacccgttgtggcgcaattggggaatagcagaccgtggattcctgcgggtgaatcacatggactgactaatgaaaccaagcggccctaacttgttagacgaacctttgaatgacttcatagtgatccctgccgacctccctaggaagggggttaagagactagctacctcgggcgaaagggtaaatcatgactcatgggtaaagatgtgcaacctctgcagagggttaaaaactagtatactagccgagctcacggtcaggagcggccttggggattcttgctgcgacgatgatgattctcgtgtgttaaatatgcccattatttattatttaatgctttacattatttatgtcacattgatcatgagattgtgagagctatacaatctagctgctatacttgtggagttcgacatggactcactcttgctatttcccccacacttcaggagatgtgttaggcttgtgatcaaccagtcagttggatcctgtagagagaagttaatacccgaagtttggagttgtctatccgctgtttgttattaaaggttatctcttttatactaagtacgttatatatttatgcattgtcttttgatattacctcttatttgtatctatatgtgagatttgacttctaagactcacatatggtgcatatctggttttatccttaaaatcgggtattacaacatttatttgggatactaataaattttaaataaaaaacatgtcaactacaaagttgtaaattatatcgaactacaacattagtatagaccatgtgcacatttgacgttgtttaaaaaatctaaattttaaattatgaaaagtttaaacaaactttaatttcgcgactctaaatagaggcaggcggtatttcctcgagacccgcatgaccattacaaagtggctcttaattaaaaaaaactcgcctctattaattagagagtctgtgtcttgtcaccatattcaaagtagtacagtgagtggcttaataatccaagtattttatacgaactttgacactgcccacatcattctcgtgtaggagagacgtgactagatgaagccaacttgttgctatagctgcccttgcctatatataagtcgaccacacagcttcccagcaaagcacacgatcgagttggtactacgataagctttgccactagttagcttcggtcttgtattcttgttgctgttagttctctgtgtgccagcagcatccggccggtaggaaaaatgacgactgggaaggtaacattggaggcggtgagaaaggcgcagcgcgccgagggacctgctacggtgttggccattgggacggcgacaccggcaaactgcgtgtatcaggctgactacccggactactacttccgggtcaccaagagcgaacaccttaccgacctcaaggaaaaattcaagaggatatgtacgtacacacttagactattcatccatatatagtgttgctacttactaggctcgcgaacgtcattgtctgcgtgcatcatctttgtccttgtttaggcccttatttagtgcttacggcatatgcatggagtattaaatatagataaaagaaataattaattacacagtttatctataatttgcaagacgaattttttaagcctagttagtctacgatttgataatatttgccaaatacaaaccaaagtgttactgtgtctattttgtaaaattttttgaactaaacaaggcctcttgcagccaaaaatcaaaaactttgcttgcaaaatataatttaaaaacttttcaagattttccgttgaatcttacggcatatgtatagagcattaaatatagataaaaaataactaattatatagtttgtctgtaatttatgagataaatcttttgaatctagttagtccatgattgataataattaccaatacaaataaaattgctacaatattcaaaatctaaaaaagtttttgaatctatacaatgtatagacgacgtctagtactggtgagactttttttaagagattagtacaggtgagactgagatgccgtgctagcacatctcggccttgtcatgcatgcttcgtgtgccactatagatcatgattctgaggcctgctgcaagtgtcctttatttggtccgtgcatggccatgtcattgttgccttttttatgccgtgatagctcaaacaccgtcctcttgtttacgtgcgaaaagattttggattttgacactatagcacttttgtttttatttaacaaacattgtccaactatggagtaactaggcttaaaagattcatctcacgatttatagacaaacccgtaagattcgatatgacagagaatcttgaaaagtttttattttttagggtgaactaaacaaggcccgaattatgaacttgtaaagctataattgtactttcgtttttatccaaaaagttttgacactatagaactttcgttttaatttgacaaatattgtccaatcaaagagtaattaggcttaaaagattcatctcgcgatttacaggcaaactgtacaattattttttatttttatctatatttaatgctccatgcatgtgccgcagtgacaaagaatcttgaatattgtttggtttaggccttgtttagttcaccccaaaaaccaaaatgttttcaagattccccgtcacatcgaatattgcggcacatgcataaaacattaaatatagacgaaaataaaaattaattacacagtttgactgtaaatcacgagatgaatcttttgaccatatttagtccatgattagataatatttgccacaaacaaacaaaagtgctacagtggtcgaaaacttttcatttcgtgaactaaacgaggccttaggtagacttgtagacaactgcacagtggactagctaggccttaaattcgcagtctgttatgaataagttttacttggcatcttgactaatactaggctgccaacttttacttatcgtgtataaatcatactattaaccccacgggtagagcgtatgagtcatactcctgtttcactttatgagcttcttaaaaagatcccgattctgaaaaggtatgaccaatagttgggctcacataagtgtgttcttgtaagaatactccgcagaatagtatgtggctataaaagctttagaacatattacgacaaagtcagtcttccctatagaaatgagagtaccatagctccaacggagtgagttaaaggtagattctactttcccatcaaccaacagcttgttcttcccatattctaattcacgagatctctaatcacacacataagttgggttaccactgaggttaactcacatgggcctaagtcccatctccttgtatggattgtcattcacagaaggtgatagtctctttgcaaagggatctatcatgttcttagctatttggatgcaatccagagttattattctggaacttctcaattttctaacagacttatatagtctgcgcttcacatatttgttggacttcatattatcctaactactactcacctttgtaataacctttggttgtcgtagtttgtgagaatacaaggaattatatctcgtaggagagttgcctctgaaaaattgaattctagagactggacaaagcccttttgacccctaaatcatttatagaggcggtagaataatgtgcccacctcaataaataaaatgagtgtctcctaaaatcattttatagtagtgagataggtcatttttgtgccaagcttgtccaaaaaccgtgtcagatgctggtcatggtgtgcaagccattgtgccgagatcctaagttaggccttgtttagttcccaccaaaatccaaaaagttttcaagattctccgtcacatcgaatcttgcggcatatgcatgaagcattaaatatagacaaaaacaaaaactaattatatctgtaaattgcgagacaaatcttttgaccctagttagtctatgattgaacaattatgccacaaacaaacgaaagtgctacagtagcgaaatcaaaaagttttcgcatctaaacaaggccagtcatggcccaatttttatcattttgcattgtggccctgaaaaatgttattccggcctgtgtgggcgacaacccatgaatggagtggctcaagtctaatcttggtaattgtgatatgttgaatgaatcttgataaaaatggtggtcacaagattggtttagtttgtattactctatggatataaagtgcaaacagtttctgtatgtttggttaagtgtctggaatgaaacaacaatgtaacttctatgtaattagctacgtatacgtactctctctattccaaatcatggtcatgttaactttaattatgaatctgtttataacgttgacctagttttcatatatataacacaaagtaaatgtattgttatcaaacacagttatttttttacacttgaaatgtaaatttattcctgaacctttccaaatattgtggatgttggtgttggtgttggtgtttgtgcaggccacaagtcgatgattaggaagcgttacatgcatttgactgaggacatcctagaggagaaccccaacatgagctcgtactgggcaccatccctagacgcacgccaggatatcctgatacaggagatacccaagctgggcgcggaagctgcagagaaggcgctcaaagagtggggccagccacgttcccggatcacgcacctcgtcttctgcaccacctccggcgtggacatgcctggcgccgactaccagctcatcaagctactcggtctctgcccctctgtgaaccgagcgatgatgtaccaccagggttgcttcgccggcggaatggtgctccgtcttgccaaggaccttgccgagaacaaccgtggtgcccgggtgctcatcgtgtgctccgagatcaccgtggtcacgttccgggggccctcggagtctcaccttgactcgcttgtcggccaagctctcttcggtgacggcgcagctgcggtgatcgtcggcgcagaccccagcgagcctgctgagcggccattgttccatctagtatcagcgagccagaccattctcccagactcagagggtgccatcgagggccacctccgtgaggtggggctcaccttccatctccaggacagggttccacagctcatctccatgaacattgagcgcttgctggaagacgctttcgcaccgcttggcatctccgattggaactccatcttttgggtggcgcaccctggcggtccagccatactgaacatggtggaggctaaggttggccttgacaaggccagaatgtgtgccacccgccacatcctggcagagtatggcaacatgtcaagcgtttgtgtcctcttcatccttgatgagatgcgaaacaggtctgccaaggacggacacaccacaactggggagggtatggagtggggtgtcctcttcggcttcggccccggcctcaccgtcgagaccatcgttcttcacagcgttcccatcaccacagtggctgcatgaccgctgtgtgcatgttgctccgggtgacgcgtgtgcatggctattcacctttacactttacagtttattttggtttctcacacaaataatgtactgcggcttctatgtgccgtgctgtgtgggtgcttgctgtttgtctttacacgaatacctgagatatctgtgctagtgttaaatgaataaaacatgtacaagtcaacacagtgcagtggttataataatttattaataccatgtgcccctaatattatactcgatccctccattccaaattatatatttttttctcgatatattcataagttttattatatatgccaacaagagacagtggaacttaagctggcatggcaaccgtgggctaagacattttagcagtggctttcctaaaaaagctataaaaactatagaaggatatattggaagctatttcatttagtgaaaaaattcaaattcataattagtctatgcagtgttatttgacctctaaaactttagcatccaagacaagcaacattttcaaaggtggaccgtactctaaaaagaatctgcatgctttatgatataacaatcattaaaaaataacctttacttttatctcaagctaagacttcttttttaaaaattcatcacaggcaattgtgtgttgtattctagaacttatattgaatttatttttttatgtatttatttttgcaggatcatagaagcgaatgttaagaaaatatgctaaacgaagtagcggagattcaaaat

SEQ ID NO: 4768 - DNA, 8017 bp, Sorghum bicolor
acggatcggtacggcggcagatcggtgcggcggatcaatcgctagggaataggataagctcgatcccgtgtggcctgagttggagaaaaaaggaattgatataggtccaagcagaactagcctaaataatcacctctttggagggatagtttttttggatgggctagttgcaaaaaactaactctaacccttctgtttggctacttttgggctagttgagcgtaaactagcccaaactaactctagccccctggattcaaacagggccatatgatcaatagttgtattaagtagtaagagtacaatgtcaaaaccaccttgtttgattggaagcaagatctgattatgctttaacacgtgctctttatggttttgtctctatcactaggggtagatccaatgatgagacgcatgaggctcaagctcttcgtatcaatttcgccacaatagagtctctcctctagatctcatcaattttttatactagttaacatgaaaaagaagaaaatatgctttaaatttttagatcgctaccatccagtattagtttgaagttaattttctcactataacaattctatagaaaatgtttactaagcaatgaaacaaataaaggctaagagtacgttttcgccacaccaaacctacgcgcgccgcaattgtttgggctagcgttttgctccatggccacatgttaaaacgtagccgcacattttccttaggtgccagtgcagtcaaggcatgtttggatagcagccgcgcgccgcattttggggcaggcgttttgcttcactgatgcagctcgcaacgtcaccatgctcctctaattgattttcgccgcccaaaattgacgaaagtgtgcggcggccagtttcagcgccatatgcactattggtgtagccacaatgccgatgcaacgtgtcgtgaggtgccatccaaacacatccttattttattttatatatttcttaccaaaatatttgccacctgttttgctcgccacaaatctagcggctcctctgttaggatttgacatactcagatgcaggccaagcaggccgtaaccaaccgttgagatagggaaacccacaaacaaccactttgaggccttgtttagttcgcaaaaaaaatttagctttggctactgtagtattactttcgtttgtatttactaattattgttcaaacataaactaactagacttaaaagattcgtttcgtaaattatagataaattgtatagttaatttttggttttatctatatttaatattctatgtatgcatttaaaaattcgatgggataaaaaatcttgaaatattttttgataactaaaccaggcctgagttggtggtgatcatacgaaacgaaactttgtgtgctgcccctccctgcccggtgttgggccatccgcacgggatcccgcgtctcgccgccccacgccgtcccactcccacccacacgcgcgagccccgtttcgttgactccgttccggcaccgccacgccgtcccagtcccagtctccatctcctgcgctgcgtgcctgcgttctttggcgccgctaatcctaaacccacgcccacgcttataataaacaaaaaaacataagccaaaacacacacagaagcgagaagcttaaaagcgcttaacccccgctcccctttcttcttcttcttcttcagaaaaacaatatcccgttcgattccgtccccaccacccgtgtctcgtatcgcaattctacgcaaccgcagcagcgaaaaggaggagagcccaggcgaggccgaggccgtcgaaaagcgagcgcagcagagcgtgggaggaagtgagaaggcccggggatcgattcggagagatcgagaaaagagggggatcgagtcctcgccggccggatcgcccgacctgccgggggcggcggctgcggacggcctgatccgaccgatccggcgggaatggcggcggtccgaggagggatctagcggaggtcgcggggtcgcgcggcaatggctgcggcggaggcttcgcggcggcgacggtgggcgttgtgggcgctgctgctgctgcggctgctgcacccggccgcgctcgtgctcgccaacaccgaaggtacgcggctctctctctctccccgctttgttcgccttgccttgtccctgagttgctccgtctgccgctgggcgctggccgctgggggtgtttccgggagctctgccctgcttccactggaccgaattcaaatggaggtcgtgggtttacgcctgtgctatcgaccgcggaaccccagtgccgtttccggggtttggttggctgccatttctggccctcgcgggcgggcgggcgggcgggtacgagtcgtttctgcgttgttaggtcaaacaaagttcgaatttactctgcaccggattcgggtgtttggcaactggccgagccgaacaaattcgtccttccttctgcaccaaatttgtgtctattttgctctctgatgagaccacttagagtttgcgtcttttgctgttagcatgttcaattggattcctactccccactctgaattcattggactttgagtgtccaggccgatccccgttctggtgtttgtttctgctgcgcccctgcgcccctgtgcgttctgatgactgctgtcgcttagcatcgtactactgttgcattaaattgcttcgctagattctgcttaacgtttgctgcgcgctgatttgcttgggcaacgatagtatagtcgcgttaccggtcgttaggcttgatttggacgtctcctgacgtggttttgttgtttctggatatacttctgtttctactagttggtggctggccaattctcaggggggccttttggtgcccgtgattggttatgctacgcagagtgattttttcatcctcctagtcccatgatttgcttgttgggggagttgagggggagggggatgagcagcggtttatggttggttttaagttgctgatgcttgggatgggattggttaggagttaggaccttgctttacttgcttgtgttgtttgcttgtttcgggtgccgttaggctcatgctgatggcgcttgcttgagtattcttggttatttatgctacttggatattgtgtgatggtcatggggcctatgggctatatttcgtttgtttggagcaaagtgttttgtcatagaatggacagttgtcttgctgcgtttttgctcggatgcttctactaatgaggggaattgttcaaattctgaactgtagagctgaagctttgtcttacttgatgtcattagcccattagctacaagtactaatggaatggatgttgatattattgttttcatttgtgtgatgttgatcttttttaatttatggctacctaagctacctaagtcctaaaagggatattggttgccacaactctacggctttactgattgatgtatccctttactcgtttgggtgacatttctaacaaaagaagtctgtattttctattctgctattgacaggtgatgccttgcatagcttaaggactaacttaaatgatcctaataatgttctacaaagttgggatcccactctggtcaacccctgcacttggtttcatgttacctgcaacaatgacaacagtgttatcagagtgtaggttcaccttttcctccactatatttcatcagtgacttgcacctattctgtatttcctagtgaaagtttttcttcatttgcagtgatcttggaaatgctgcactatcaggaactttggttccgcaacttggccagctcaaaaacttgcagtacctgtaagttctcttcctttgctgtgccttgaaatcccataccgattttgcatgtggcggaagattttattatctttctaggtgaaaacatttcatgcatgattgctcatataagaaatatcctgttcagaatacttattacatagatgaaaataaggttatgctgctgtgttgctctggtgaggcataatacatagtacatcttcctgtcaaaataagtgactggcatattctgtcttcaaatggcgagcctgtcttgtataaaatgacaatgctgttggcactattaactgtgatgacatcatagtaacattcaccgccttcgttaatcactaatgacctcaaccatttactgtggcatgccataactcagttactttgtttttaaaatattagtcactgccttcatatattatttttaatgcagggagctctacagtaataatatcagcggcattatacctagtgaacttgggaatcttacaaacttggtcagtttggatttgtacctgaacaacttcactggttcgataccagattcattggggaagctattgaagctgcggttcttgtaagatatctgcactgattttccctactattcactaaagtaaaacctgttaagagtaggaatcttttggcttacgcactgaatctatctgtcgtcgttggttgcttcatcccatctatatgtgttgaccaagtgagatcttctatgatgttgagatttcactaggccacatacatggtagctggcttgttaaatgacttaaatcacgattttgtttactcatgaatgaagttacttttttcattgaagttttaagaatgtagctgcatagcctcattgggtcccatattcccattggaagaagttagattttccaggacagatttgctattcatggcagacttgagtgattccttgtgtttgaaagtgacccttgccgcatctatattgtatagttagattatttatatccagcaatctgtttttaatgttttaaggtgtctatctctatcattttgttaggtttttaacttattataatttctaagttgtcttattttttgtatgaaattgcctgtgtatgtttctcatttgacacatctttgaacttttgtgcggggcataggcgtcttaacaacaacagccttactggttcaattccaaaatcattaactgctatcactgcactccaagttctgtaagtatttatttctcagtttgcatagttagtctggttttaattagtaaatataacatggaaattaaatgtttctattatcacagggatctgtcaaataacaatttgtctggagaagttccatcaactggttccttttcattattcacccctatcaggtaaagctataattttagcggaaaatttcatttttttaagccataatgcttctgctattcacacctgtcttcttttgcagttttgcgaacaaccctaatttatgtggtcctggcactacaaaaccttgtcctggtgctcctcccttttctccacctcctccatacaaccctacaacccctgcgcaatcaccaggtgatttattcagattgtccagtgaaatccttgagttcaataggacctttcctgtcttgctctttcatccaaatgacatcctaattgggatttgtgtacctccaaaacaagcataatgctttctaggctggtgagtgataaggaataactgcacttttttcctgaaaattaagtttaaaaaaataattcgtaataagtagccagatcctaacaatttggtactatgattctgtgctgcactattagtcagtgactcagcgatatgtctgtgttgtactgctgttaacttgctatagtgggatactgggataggacaggaagctacatgacctgtacctcgtgtgatgcagggatgcagcacaagtcaataactaccgtcttttcttttgtccttatctgcattagtatgtcagtaattaagggtatggaacatatggctttgctgctgacatcttatttcgtgcaggaagtagctcttccagtactggagcaattgctggtggagtggctgctggcgcagccttgctgtttgctattcctgcaattggttttgcctattggcgacgcaggaaacctcaagagcatttcttcgatgtacctggtaagtattcaacagcaggagaataatttaggcaataacattgaatcaacttaatgtgagattttgaatgtggcagccgaggaagatccagaggtgcatcttggccagcttaaaagattttcactacgagaattacaagttgcaacagatggcttcagcaataagaacattcttggaagaggtggatttggcaaagtctacaaaggacggctggcagatggatcattagttgctgttaagagactaaaggaagagcgcacgcctggtggggaattacagtttcaaacagaagttgagatgattagtatggctgtacacagaaatctattgcgtcttcgtggattctgtatgacaccaacagaaaggttgcttgtgtatccatacatggctaatggaagtgttgcatcacgtttaagaggtatttttattttctattatagtgctgttcacatacttcatgttacacctctctaacagcagtatcaaactctgaagttttaattactttggttttattttgtagaccggccaccagctgaacctccgctagattggcaaacaagaagaaggattgcattgggttctgctaggggcctgtcttatttacatgatcattgtgatccaaagattattcatcgtgatgtcaaagctgcaaatattttgttagatgaagacttcgaagctgtggtgggggattttggtttggccaaactaatggattacaaggatacccatgtaactactgctgttcgtggaacgattgggcacattgcacctgaatacctttcaacaggaaaatcctctgagaaaactgatgtatttggctatggaattacgcttttagagcttattacaggacaacgtgcctttgatctagctcgccttgctaatgatgatgatgtcatgcttcttgactgggtaattaactaagccatttcctttgttcagattgcaacctaaatgttcgtgcctttttgtggcttcaatactatgtaggggtaggtggtcgctttttcctatgcaatcattaaaaatttgctaatcgtttcatccaatgacaaatagagctttgataatgtctaagaaataaacattttaactgaattggtgcattgtgacaggctgacagctaaaacaagtagagtggcatgctcctgtctctgaaatttcttatatttgcattcttttgatatgacctgacttggctagcaaattaattaacattgtgttcgtgttcatttgctttgtgcaggtcaaaggattgctcaaggagaagaaactggagagtctggtcgatttagatctagagcacacctacatcgatgttgaggtggaatctctaatccaggtcgcgctcctctgcactcagagcaacccctcggagcgtcctaagatgtcagaggttgtgaggatgctcgaaggcgatggtctcgccgagaggtgggaggagtggcagaaggtagaagtagtacggcaagaggtcgagctaggccctcatcgaacttcagaatggattctcgactcgaccgacaacctccacgctgaacagctgtcagggccgaggtgaaggcagcttgagaccatggacccccactaattcttatattttgcaagggcaatagcgacgcgtatcaatcatcctagtcaaaaatcccccgaatattgttcataccaatcggtgggtgaagcgaagatgcgatgtgctttggatgtatattgctgacgcgtcactgttgagttcttatatgggaggtcagcagagctcgaggagctaatgtcatgtgcagtgcagttgctgcaagcaccagtgcttctgtatttgtaaaggtaggagctgaggtgctgcggctatcatctgggtctgcgataagttaattgtactgatagttgacatctaactattttgtgtatcaaaatgtaaggttggaactggtgggaaccattttgtatctcccctcctattaaaggatcggatgatataggtgtgcctatgaacctgttctggctggcaagtttaaccagaaatgtccgtactgattgttgtagtaatgtctgtagttacctaaa

SEQ ID NO: 4769 - DNA, 7234 bp, Sorghum bicolor
ttctctaataaaccatctataaggttgtctcttatttcttttaaggcttatatgtgtatatataggataggatgacaatttgcacaccgtctctatggctatttgtgtgcctcatcttggatatgatgaacaaagtaatcagaaaatatgttgagtttccccaaacaaagattaaccgacacttccttacatctcattatctcaacaaactagaatattataatatggagagtttagccactacatactgaagtccatatgaaaaccactcgacattatatttcatctcatgacaaaaatttacaatgatggaagagggaaactaaaaactattggtattatgcattggccatgaatgacatagaagacctaaattgtacttgttaaacaagaacaactaaaaagcaacaactttcaccccccccacttgataaagccaaacatagaaatgtatatagaactagcgaaagaagatgagctcatgattcgaacccctacgattactacaccatgattatgttggttatcaaccatgcacaacaagtttgatctcaccaagaatgtttcttctacaagcaaatcaagaacacaagcaagaaggtaaaatgacacaattaatctgatattgaaatagagatgaagtatgtcaaactgaaatggttcaagtttttaaattgaaatgactaatcaacacagtcgaaaaaagaacaataatgggggcctaattcatggcagtcgaactcagcattacaagtgatatgaagaatgtttgtttcacgaggaaaaactagaagtcaacaaaacttcaataatcaaaccttaaaggaagcgacaaccatgaattataaaaggtcttaggtgcacacataaccccttgacaccccctaatgggctccgacatgatatacaggaggctagcaacccacaatacggtgatgcaacaccctgtctggacgtcccacctgtttcaatgattcctgctgagtcaaaggagttttgatgtgagaccggtagcattgaaaagcttatatccttactttttcttgcattattattctcataatcacagaaagggtcacatgttaggaatgggctcgtctgtgaatttaattgtcgcgctcgagctctagtaatcagtccttgcatagttgcatgagggatgacgtttgtatctaaagaagcaatgtcctcatcaactgaagttcaataaatattgcataagtgaagaatcagtaaacaaggttggcaatgacaaaagaagatatgtgttgatgcatgttaattgctctttgttacttgtcatggatattcaagttcatattaattgatctatctattttgttcatgtgtttttatttgtttgtttgtttgtaggttttgggaggaatcaactcgccacatattcggtaacctttggcaacaagtaggagtagaatcgtttagatatatgtgtaaactttgttgattatatatacattaatactatgtatcaaaatttccgctcctcttatccgtcgccaagcttatatttttcagacacgcttaattcacccctcctctgtacaagtctcgatcctttcaattttaatgttgattcagttttatgtatataactaataatataataataattcattttccctagaaaaaaaaattagaccttgtttagttggagaaaaattttcgcttggactactgtagcatttttatttgtatttgtaattattgtccaattatagactaactagaataaaaagattcatctacaaattacagataaaccatacaattagttatttttattaatatttaatgttttatatatatgtgtctaaagattcgatgcgatcgtgttaaaactaaacacaaggccccggtctggactgggctcgcatgtcgcatggcctcggcctcatgggcccactggaggtggacccacctgtgcagcccatgcttatccaactgcagaagaagaggaaagatgctgctgctccctcgtcatcccattcccaacgcagctgctgcaaaatggggagaaacggggtttaagcgagtagtcgaggaaggagaggttctcctcacttccacctcggctcgctggagccgataaggctgccgcgccctccctccctccctctctctcctgctccccatggagtcggcggcgattgggtcgcagtccccgctctccttcccctccagcctctggtgcgtgcctctccgctccctttgcttaattccttccgaggaacaatttatcctcgcggcgggatggtgcgggtgtcttgttgtgattcgcggcgggatggtcacggggaaaaactctagagctggtaccattttggggggggggggggggggggcatgaaaacccccccttgcccaaatttccgggaaaaccgcgggggcgtccccattcccgggtgcctgcgtgttattcggccggtggtggacgcctgtgctgtgcggcttgctagcgcgaattttcacggtgtacaaatgtggccttggaagggtagcctgctgctcccttctgccttggccaaggatggttagttaaccaagcattcgggctgcttccactgtcctgttcagtcagaatgtgccccggcccccctagctttacggtgaagaagaaaaatgttgttttgcaacattagcagcgcacctctcaattggaagctaaatttctgtcgcactcaaatttcgtgcgttctgtgtttttgagtgaatagtggattatatacactcattggagctcattggagttccaggattggatacatttgattatttgtggtagtcgctgatctcctattctctaaaaccatgacgctcgcatttctgatgtcaaactgattctgactgtatatctgctcatgtcattatttatggggttaataaattccagtctgatgggcttgtgattgcaaacaccctgcgtccaggttgccattcaacatgcttaaagaattctgcttcatttcttattccttttgtgtgtgtgtgttgggggtgcggggtctgcgaaagtcatttcttgctcagtatttagggttcacagggatctgtcgaaatcatgttatatctacttccagataaaaggagaacagtttcgtcatgtaaattctgtataatcaataaattaacatgcatttgaatgtgttacatcttgcttttacctgatgatgctttcgctcccttgcttaactctgcttggaatgtgtttgactgtttcagcaaagcaaaagtgtcctctggtttaccaatatacaatgtgaagatcaagagcaatcacaggcttgaggtggtttgccgtgggatgttagctacaagaaagtttatgcaaaggaaaaagaaagaagaagttttcaaggatgctgctgatgaggccgagcagatgaattggaggagaatgatgagagagatagaggaggcaggatcagctgtacccattctgaagactcagcggagcgggaaagggccacttccaagagatgttatccttgggactctcgtgcggttcaaacaactgaaaaaatggaatattgtcagtgaggtatattcacttgcaccagatgacccatatagaaactgacttggtgactaacagctagatgtgattcttgaatataaaaacaatccactttcaggattctctactaatttatatacccttttcttctcagattcttgaatggctcagaacacagcattggtgggacttcagtgagatggacttcttgatgcttgtgacagcttatggaaagttgggggattttagcagggcagaaagggtcctaaagtacatgaacaagaaaggttaccagcctagcgtcatatcacaaactggtctgatggaggcatatggaagagggaagcagtaccgtaaggctgaagcagtattccgtaggatgcaaacatcaggccctgaaccatcacctgtgacatatcaaatcatcttgaaatctttagttgaggtcagtatacctgtcatatatttatccactaaagatagatgaaaacaggcccaatatttaaccacacctctctctcgattccaactagaacaaacaaccactctgctactatgattctgctttttatactgtacatttacatgtagatgtttacaagtttgcgggtcctttttataataataattattagaacagtcattgtgaggttcagtttaccaccccacatctctcctattgcatctcacacctgggacagggcatatggcctgcaaaattgaaatttaaactgaagttagcttacgcaaagcatactcaaattgaaaccaaaccaccaatactttttttagaaaggacggcaaaagctttgccacaatttctattagacgaagcaaaccaccatatttcactttaataacatggaattaccttacaatttagctcacttaacaccattggagaccctaaccctaccaccaactcaagaaatcagcaccgaacagggtttaaatgacccgcaagccatagctacattctcctccatcaaataccttccaagtgtgaatctgaaacaaaagagatgtggattgctaaatgtaactatttaacttgtagtgggatatttgcaaccaccggtgattggaatagggtatttgcaattttgcctataatcaatcccatcagaaaactagttatgatgatttctgaattccgattccctgaactaatacttttggctgtacaaatttatttgtaattggtggcagggtgacaaatataaggaagctgaagctatatttgaggacctccttaatgaaaaaagaacttcttttaagccagaccagaagatgtttcatatgatgatttatatgtacaagaaagctggtgactatgcccaggcacggaagctatttgcacagatgtcggagagaaaaattccactatctacagtcacttttaatagtttgatgtcatttgagacagactacaaggaagtttcaagtatttatgatcaggtactttctcgcttaattgcacaattgtattatcagtatttagttgtgaaatcgttatgatacagaatggatttttttttgaagtaaacagaatgaaaaatatatagggtgtatcagtattcttttccctaataaatgccacaaattttagatgcaaagagctggaatgaaaccagatgttgtgagctattccctgctcatcaaagcttatgggaaagccagaagggaagaagaagcattggcggtttttgaagagatgcttgatgctggagtcaggtctttctctgtcactatttttattgtcttaatacagcttaaggcttgatcttcctgcgctacatgaaaaatgcagacagttttagtgcagttaagggtgtttggggatcttcctcaatccttgttaaggacttctagacccaactggtgaagatttttagagaattcagagtttggaattagttatagaagtatagaacctaaaatgtttgatctactcaaacttttaccactaattttctgaaaagttattctatttagttgaatacatgcaattcttaagcatactgaagagttgacccatgaccatgtatgattgttaggcttgataatgttcattttgagttgtggaagccaaattggaggccttctttcatgtttttaagtcatggataagctgaaaactatgagtgaagttaaaacaaaatttcagtgcagaatagctgcttgagattgaaatgttcctgtgagtactattctgaagtatgttattttgcaggccgacacgcaaatcatataacattttgcttgatgcatttgcaatatctggattggtagacgaggctaatacagttttcaaggcaatgagaagacacaggtataacccatgtttctgcctaactttaggaaataaattgaaatgttgatttctcaccttgtcacaccatttgcccttgcagggttgagcctgatctttgctcttatacaactatggtcttagcttatgtaaatgcatctgacatgaatggagcagagaaattctttcgtaggattaaagatgatggtctgaagcccaatgttgtggtttatggtactctgatgaaaggctattcaaagttaaataatgttgagaaagttatgcgggtgtatgagagaatgcggatccagggtgttgaacccaaccagactatatatactactatcatggatgcacatggcaggaactcagattttggaaatgctgtcatttggttcaaagaaatggaagctcgtggatacccaccagaccagaaagcaaaaaatatcctactttcacttgccaacacaccagaagaacaacaagaagcgaatgaattggtaggtaatggtgcaattcagctggaagtgaaacctgataatgaagaggtggatgatgatgggcatgaagttatacatactgatgctggaagtcaccgtttgcttgacgacacacaaacaagaaaccacgtaaatggtaggatcagagctggtaattatacttttgatgaggatgataacgatgatgacgacgatgattatgaggaagaggatgatgaagagttcaattttgtttctttcaaagataagagagaactaaattttgcaagttgatgtcataaatcttggtgtatattttttccacaaactcatgatcacacgatggcctttcctatacaaagagactaacttgaaatgttaatagaatttggctcgaaccttgaacgatattttctgtctagccttgtcttttgaaggaaagtgatttaaggcagaaggacattagtgggtccctacggcgctgatagtttgtcagcgtaatttataccatgtatttctgattgattgcagccgcactggatatcagaccaaacaccccttatcaactagtcagtttcacctgatgtgtaaaaattacagcagtttatattactcaacaccgccacagttgagtatactaaaacttcttgactcttcatacatgtttctggactttctgactgggttacacgtgattaaaccactgttcaattatttatgtactttggatatgtgatacagaaacatgctgtttaggaaatatagtttaacatgctggaactttcaaagatgccgataagataactataagcatcaaggactaatttctgccaacagaagccagtaatctttctgaaatggatgtagacagtaacaccttgtgactgtccatgactccatccttgatgc

SEQ ID NO: 4770 - DNA, 4652 bp, Sorghum bicolor
gtgggaatgatagataaaaaaaagaatgtatccatacatgtgagctagttaatcaagcttgcataaagtacggtagcaaaacaacccaaaaaactattctaggtcatttgaaaggtattaggtatttttaagagttataatgggttatatttatcggattatggagtaaactctcaatatgctagggagtcatttagatttttttctattagggagaattggctgtaggacatgcagaatggtggccatttgccagcggacactaggaaaaaatagattgctcaaagacactcagtttcttatcaaatttgctggcggacactacgtctaatcaaatattattataaaatagatataaaatcatataagtgctaaaaaattatagtataaatttttttacactctacatgatgagaactatagtgcaaaaatattgttttgcactgaaatgaccattttgcccctcttcataaatagacaaagataaccatggttaattagttaaaaatattagtaagatactaaaaatactaaataatatttttacactatagttctcatcatgtagagtgtaaaaaaaattatactataatttcctagcacttatatgattttatatctattttgtaataatgtttgattaaatgtagtgtccgccagcaaatttgacaagaaacgaagtgtctttgagcaatctaattttttctagtgtccgctggcaaatggccaccactctgcatgtcccacagccaattctccctttctattattatggacatacattcatataatatgacacgtcaccaaaatacataaggttatttgcatattttaatattttattaaatgacaaaaaaaagttctatggcatctgtccagatggatgatcaccaataattaagaggttaattatacttttctgactgcactctcaagtgcgtactggactactggttaacatttcagggttgtatcaagataagggcgctctcaatgctaaaaagcacaagtagtttctatgtatacttaattcatatagatacttcataaaaattatgtttccaatccataaattctacgtaataatttttgtccaatcacacgtcttctcactcactcatctacctatcatcgtgtagatatgatttcttattaattcttccttttttttctttaattgcagtgtcatatcacattttttttgcttagttgacagctaattaatacgctcttcgttcataaaagaattaatccctagaatatatgcttatcaaacttttttaagtttgactaattatatagaaaaaagtaacaacatctatgacataaaacagtattgaaaatatattatatgataaatataatgatactaatttaatacaaaaaaaattaatattttttctagaaatttagtcaaacttaaaaagtttgatttagaataaatctagaaattaattctttcgtcggatggaggaagtaaataaaaaaatatagtgttcctaggtggaaagtggcctgtgtacaccaaagtgaataaatgatcgcagaagccggattgctcgtgagacgcacacaattcgtgcggtccaaactcacgcgcgaaactcaatccccaaaaatgctacgcgcacccagcgtactcacccgtcccgcatccccactcccactgcttccgggccccacatctcccaaacacacacgtcatcgtcggctccgtccccaagtcccacccaccacacaaaccgccctgcgtcctcgtagcatttctcacaccctcgaccaggggccagtcgtcagatgccctccacgtggcacgctccggcatccccgccctccacgccccgctgcccgcggtcacgcggactcccagcgctggccgtccgatcctgcccttcgccgccagtggacggcccagatcctgcccggccccgcgcgggcagcccccgcgctgctattaaaggcaccccccattccgctcctcacctcacctcctcctcgtcccgcaacgcaaaccagcatcgccgaacgggtcgcgcccgcccgagcccgataagcccgcgaagcccaggcccacccgcgaagcgatgcgacggaggagatcgtgagatcgcgcgccgccgccgccccgctgccgccggcgatgacctccgccgtcctcgccggccggaatgaggtccaccacgcgcacccgcaccaccaccgccactggggcggcgcccgcgtccccctcatgcccaagccgtcctccaaccctaaccctaggcgccaccaccgcccgggcccaaaccctatccccacaggctcgccgccgccgcgggccgtcccggcggtcgcggccgagcccctgccgtcgtcatcggggcacgtgaagttcaggccgtcggaaatgacccccgccgaggccagccttctccgcgcgcggctcaccggcgagctcggccgcgtccgcgctttcctctcccgcatcgactcgtggcaggacgggcagcgccggcgccggcgcccggagcccgagcacgagcacgcgccggagccccccgtcgggcgccgctcgtccccgccgccggcgctggtggaggcgatgcggaagcggtgcgcggacatcctgatgcggctgcggagatcgaagaagagcgtgtggttcaactcccccgtcgacgtggagggcctcaagctgcacgactaccgcgccatcatacggagccccatggatctcggcaccgtcaagcagaacctcaccgccggccggtacccttcccacgaggcgttcgctggcgacgtccggctcaccttcaacaacgcgctgcggtacaacccgcccgaccaccacgtgcacaggtacgccggcaacctcctcgcctcgttcgaggggatgtacaaggaggccgtctcgtggttcgagcagcagcgccagcaactcgagccaccaatgcagcttgatctgccgccaccgccaccaccacagatgccagtttctgtgccagtgcaagcgccccagaggatggggggtgggaggaggcccaagcccaaggcgagggagccaaacaagagggagatggatgaggaggagaagcagaagctgagggtggagattgagaacctgcctgaggagaagatgctgaatgtgctgcagattgtgcagaagaggaacagtgatccagcattgacgggggaggaggtggagcttgattttgatgagctggatatcgagaccctgtgggagcttgatcgatttgtggtcaattggaggaaggcgctaaagaagagccagcggaattctatgatgaatggtgatgctgctgccatgaatggagacgccattgatgtgacaattgttccggatgatgatgacatggtcgaggttgctgtcaatccgtctgtggtggttgaaattggagagtcggtatgtcattctgaagcaaccttagctgtctctattttgtagttttcatgaaccagttatgtttggactttgttctaatgttgatcctgttttttgtctcctatttcaggagactgacattccaaagaagagggaaatggaagcggaggacgagtatgttgatataggtgacgagatgccaacggtgaattaccagtcggtggagattgagccagattccccggcagctagcagctcaagcggatcaggaagtggctcatcttcatccagtggtacggtggagcaaatgagtatttgtcaccacaaatgctgagtcatcgattgagtatctctttaattcattatttgaaattcgttgcagattctgactcggactctgaatctgatggggatgatgcaagcgccccgcactaggtggttgctcttttatctgactgtaggattagtgatgagtaggtgactgaggttccattgggtgaggcattttgaagaatggtatagcaaattggaggggctcttgttgatgcaagtcgttgtcaggtgtgttcgtttgtgtatgtgggtgcagcttaggttgtcggtacttggtagtgaataggtagatgcttgggtagattgggagactactgtaaagaagggaatataatctggaatggaactaagaggaaaagtagcaatgccttggcatttcattatgtctgttgctttctttgtacatgtttattactgcagtagccgatctattgtgcacatctgtcttcttaatgttcatctgacatcacaaactacatcaaaaaagagtttgctggaatgtcttaatttggtgccaaaacactgaaacagccaaacagactatggtacattgatcctggtgcgaattgctgtcatgctaatgttttttgcctattgcagaaatatgtatatgtttgactgactattatcttctaaatgttgctaaatattgtaatcctgattgtcatcattagcataccgctggaagtgtttcctttacatatttgctcaagtcataactttaatctgcaactgtctttgctgcgacatctcagcatgatctcacctttctaatctgaatatccaggttgagactggtattctggcatgtgttagaacatcttctgtattcaaggaactgtttggatgctgccctcgcctggtactgcctgctaggcaagcgaggcgctcgaaatcgaacgatttcgaacgcctgggagtgatgcctggcgcaggc

SEQ ID NO: 4771 - DNA, 4298 bp, Sorghum bicolor
tagtaaaataaataaatattattaaaatatttttattgacaaaacacttcataacaaaataaataatattatataaaaattttaaataagagaacggtcaaataagaaaccttaaaatagaaaacgatactttcaatgggttagagggagtacaccgtaatctttatatatgtgtggtcctatggtctgcgcatagatgaatcttagaattttacgctcatttctttgtctaaggataaccaatacaccatcagatgaagcaagcatcttgtggccatgacgtagggatggattcattagctgataggcgttggttgtcgcctactcataggacaatgacacaatgaggcactaccggcaacgggcacctgctacgagcgacgacgtgagtgagcgagcatcagaacgagagggttgagattaagattaggatgaaacaatgagagaggcgtcggttccttatctatttgggctggttgctagcctgaaagttgataataataataattttttagaaacaaatgataactattattaaagtgtacctagattttatggatcatgactagggccttggccctagtggccttaggcctggatccgccaatgcctccatcattatctaaaaagaacgtgtaattaacggtaaggacgactcaatgaaaacatgcatgttagacccaattggtaatatgatgatgtgctgaaacaatgtgcttgcatgattaagaagtacgttggggggggggggtgaacattcttctatatgaaattatctatggagtgcaagaatgatgccatgcatatttggccgtggtggaaaccaaagtgcaaaaagttcatctggcctccttcaactatatattgcagcagtctgatttgtctgtgtcaactaacaactacgactctctccatcccaaattataagtcattctaaaaatcttgaagagacaaagtatcttatgtttgaccagcattatagaaaaaattaagaaagatttataacattatagaaactattgcagtgccatatgtcgccgtggcgagaactcgacgatgtgtcccattaaaggcttaaaagccacccatccgtggctctgacgtcgctcgctgccgccgtcggctccgccgtgtttgtgaccatcatctccacatccggtctaacgaccttctttagggcttggcagtcatcacgcccgggaccctttggtagcctgacagcggcatgcaagctagggactgggtcttaatttggggtcttggccgggcgacagatcgcagtgagaaatcacatgtgctacaagactttgatcgagttcattttcataagaaaaacacagcaaataataaaatttcttgagttccaaataaattagaccttagctgcatgctcatatcagaacattctagctagctagagcggattgcatgcattgcacctgcaggtccaggtggcattactagctagtgcatgcatgcatgtgaaaagtaatgaaaaacgtctgcatgcatgtcgccaccccgggttagttcatcgaaaaccaaaaacttttcaaaattttccgtcacgtcaaatcttacgacacctatatagagcactaaatataaacgaaaataaaaactaattgcacagtttacctataaatcgcgagatgaatcatttaaacctcatcattgaacaatatttatcaaataaaaataaaaatgctatagtttcgaaaaccaaaaaccctaagttgttgattgtttcacggccaagcatacgcctgcacagtatgcctccatcacaaaaaaaattttcccattcccatcgtcccagcgagacgaaaactcgttgggcgtccacacaaaatcctcagaggataacgttgtgggccagggatatcggggtccagccactcgcgcgccgccacgtggcgcgccggccgtcgcacctgtcctcctcctcccgggcgggcatcatttgtcaggtttcggcgccacaggtatattggctccgcagctaacgacctgggggctccatatccatccatcatctatcagcaaagcacactccaggcggaaaaaggaagcaacaagcagcgatggcggcctccatgatctcgtcgtcagctctggtggcgccgccgtccagggcgcagggcctgccgtccctcggccgccgcgcctcctccttcgccgtcgtctgcggcaccggcaagaagatcaagaccgacaagcccttcggtgcgtgccatgctgcgttcatgtgttggagcagctgctttggctccgttcgtttgttttataagtcgtactcagctatggcttttgaggatgtatatatgcatgtgtctgtgtttgtgtttggttctgagatgagtcgtgtgtgataaatgtgcagggattggaggtggcctgaccgtcgataaggatgcctccgggaggaaggtcaaggtgagcacttgacttgtctatgtgatttacaacacgacatgcatgtatgttaatcattaattgaattcattagaagatttcgaatacagtaagagcaacaacaacacagctcgaacagatttcctatatcctttctaattatagagattttgttgaaaaaaaaatatatccttcaacaacttttttttaattagttatttaaacatagacacatcttttgttctagatttcttgctctagctgaaaaatagaaatggagagtgagaatgagtctatgcaacataggatgtagaaaaaacgggagactgaaaaaaaaatgtacaaagcgatttttatgtaaattgttctctctaaatgatgatttagagtagaaaaactcttgtatattgagggaggccaaatttgatgcatggttctatatatagctaactacacgcatggcatgatgcagggcaagggcgtgtaccagttcgtcgacaagtacggcgctaacgtcgacggatacaggtgagccgcacatcatcagtccaaattcaaaaatatgcaaatccatatatataggcactagtacacatatagccgtgcgaattttatattaattagtagttgatttgactgtgtttttggcaatcgatttgcagcccaatctacaacgagaatgagtggtctcccagcggcaacgtctacgtcggtggtaagtacagtgattaatattctactcgcacttgtctagctacaataatacagtgctcaactactcctcatacaagcaaagtagctatatatatatatatatatatatatatatatatatatatatatatatatatatatatatatatatatatatatatatatatatatatatatatatatatatatatatatatatatatatatatatatatatatatatatatatatatatatatatatatatatatagactaaaaaatgaatcaaagtttgtgatgtgtggtacttatccttgggccttattacaggaacgactgggcttctgatctgggccatcaccctcgctgggctcctcggcggcggcgccctcctcgtctacaacaccagcgccctctccggctaaggatactcatttccaatcgtgatccatgcgcttcttcttgatgcggttcatcatgtaaaatcatgccagcagggtgtctgtctgtaatctagcctccttcgatgcccactgtaatgcaagcttcatcatgtaacaatgctactctctactactacgacgtactcttcatacttaattttgggacaacgactatcattatattattaattgatgctatatatttagaatattattaatatataactggtagtaacttcgttctatctgcctcgtgagtttcatgaattgtgataaaagatggtgaacctaattataagtgaaaactaggttcagctgtagattacgaaacccttttttatttgagcaggtaagtataaaacacactagatcaatttcagtgcaattattactcgtcagcttatttgtatttactagcaaacgtatccgtgtattgcaacggatccgatacgtcttgtaatttacttcatactagtattcgacacgcattgttctatgggcactcacaatgcaagactctatcacagagtccaagacaattaattacataatatttatggtattttgctgatgtggcagcatatttattgaagaaagaggtagaaaaaataagactccaagtcttatttaaactctaagtccacattgttcgaggtaataaataactttagactctatgatagagtctgcattgtgagtgtcctaactcatacgagcatagatcattgagtcgggccacatatat

SEQ ID NO: 4772 - DNA, 2671 bp, Sorghum bicolor
tcatatccttgcaataaaaaaaaactacgctttttttgtcaaaaaattgcgctttgcgtgtattctgctgcatgaaaccattgatatatgcgctttgcgtgtattgtgctgcatgcactgaaatagagaccattgacatatttgttgaggttgacaaaatacatcatcagatccaaagccctgggcctaaagcgaacagaacaaaatgctttgacttccaactaaatccttgcataaatttgcttgtcatatgcagatggtagtcttcttttgagaggaaaatcatttgcagctagaccagcttacacacaataaacaaggcaaaagcgaaccacagaactgagacgattctaagcttctggtaacagcgagagctcaagcacaagatatacaaccgtgcagggaacatggctactggctaccgacctcaaaaatgtagaaattgagggcaagatgtaacacactgttgaaagagaaattcgggggtaagatgtaatacactgttgatgctatcatcttcatatatatttttacttcttcccgccaccagacacgttgaatttgaaaaagatgatgtccccgtcctgaaccacataggttttcccctcctgcttgtattttccagcagcctaggtacagttcgcacattcaaaatttcaagtcagaaactcaaaataggcacttgacaagaatgtccttggggaaggagtataaccttaacagcagattcactgcccagttctttcagatcttcaaacttcattacctgacccacaaaagtagaagtaacaatcatatatatatgaaactatactgttcaaacatgaatagagctagagtaaacaatgctaaaagactggcctctaagactggcctcatcagcatacatccaatttataatgacaaggtaaaagaaaaattgtcaacgggaattggatgctatatgttttctagaagacatgcctgcaactacatattattaagtgctcctacggccacagccatacctcatttatagtatatacataaatgctacaatattcaaatcagttaattggtccattgctgatttttaaatgggcatgtattatcttgtatttttccttctaaaagtgtgcactgtatgaacatcaaaaaatggaggggttgctgataaacaatgggtatcagacagaattaccaagaagtcaatttgagtaactctaaaagcatctagattcacaaacaatcaaaatggtcatcaagtaggacagctatccaaaatctggtcctgtttaaccaatagctgatgcaaatcacaatagttaacaactatatcagctacttaattaaatagcagaggttacatcagcacatataaagcccctttcgaaatcagtgtgaattgcaccagcagcttgaggagctttagtctgacgtctgatctgccaacactttacctgaacaaaaattcacaaccagctaattcagatcacattctcttactggaaaagtgcacatagaaatgatctttcagcttcaactatttgcacaacttttcaaaaatattcaaaatagtgaaagaaattactaaagttcaatgaaaagcacatgaaacatactacaatataagataggcacctttgtattacaacttcttttacagttttagcaacacataacaaaaggatagattatgctgcactgaaaagaacaagtacctcatcaggaccagcagtgaaaaagtatatcagatgaattgctgcaaaaccagtcttgataatttttgggatcatgctgcaaggcataatagataacattttaggtgaaatttagaaccaatgagaactagaaagttgtcaaacaattgacagttacaaatatgttttttctttcacaaaaagttgccttgtatagaagaaatatgtcaacacgatatttgtattagagatgaatattccagcttctcaaaatttgaattttgtaaatcatagaaataacatacatgtattttaagatgtgctgggctctccggcgtggggaggcgcgcacgggactacgtgtgcgggctgctgcacaagatccggaggatggagaagaaggcccatgacagtgcggcacaggcccagaagaagcccacgcctgttccgcttagctggatcttcgataggcccgtcagtgttgtgattccgtaatttcctcgaaacatttcttcgatacgcctggtcataggtagcttgttttttttgcctattccctatgtcctataatataacacattctagtattcaaaaattgttgtcaaatatatgacatttcagaagtcagaaaccagttttgtatttaaaactttttatttatcaaccaatcatcactaatcttattgatgataacgttttatttggaaacaaagtaagggcacatattttttggtgttttgttttaatttgtcctaaaattatagaatatattatattacgaggagggagtagaccaatcacggacttaaaacacacggacaagcatccatgagcctgcagcctaggaaacaaatcggctttggtttctcgcgagctcgacctcgcattgggccacttgtgttgtgctggcgggctcttgtggcaggcttgcacagcagggggaatgaatcttgttggtctatttggttaggccttatttagttctaaaaagg

SEQ ID NO: 4773 - DNA, 8611 bp, Sorghum bicolor
ccactttcattgggttgaaaacgggggcaccagatcctaccaagtgatcaccggacgctcgacccccagcgtccggtgctcaggggttggccacgtgtccttcttgaatctcgcatgtcagtctctaacggctacctgcgaatcaccggacactctgcaggtccacaccggacgcgtccggtgcacaccggactaaaactcagggaggtatgcaaaacctcggggtcacccgacgctgagcaccggacccaccggtgctcaccgaactcatacccagagaggttcgcaaaacgcccccacaccggacgctgagcaccggactctctccggtgcgtccggtgcactctgctacacccgacagcacaccggatgataaaggccatcatccagtgcctccgcgcagagcgtccggtgagtacacttaattttctcaaaagcgccgaatcctgtcgagcaagctcggcgggagggagagaggaacccacacccctctcaactctaggaactccacatcctttgcaaatgtgctaacaccaataagtgttcaccaccaaagtgtatatgtgttagattttcacaaacatttcacccaaaggagttaagttagcactttactagatcctaatgcatatgctcaagatgtagacctagtagcacttgattcgagagatgaccgtgatttcccctcttgatagtcggctatctatcctaaacccggtcaatcacttctctactcatcttataccggcaaaagtaaaaccctatgtttatacctttgccttgataactttgctcctcgtctatcattatgatctccacattatggtacatctcttttgtaatcatgtggccacctttccatgccaccatgcaccttcatcacatgtgttgctatgcctaaatccattcacttaaacacaatgcattagcaacttggtgtcattaattaccaaaaccaaacttggtctttcaaactgttagagaagttttttcccctctttttaccaaaatgtcaaatagggacttcattttttttaaaaaacttttggaatttctcttgcggacatataaaatttgagcaaaaaagcatttttatcaccaaaatacctagaatatcaatgttttcaaatcgtgtattaccacaaatgcaaaatccaagccaaaaatttaatccctaaagatgtggtatagatacactaaatacgtactccctccattccaaattataagtcattccaaaaatcttggagagtgaaagcatctaaagtttgaccaaatttatataataagataataacatttataataccaactaagtattattagattctttattaattatattttcataacatagccatttgatgtcatgaatctttgtaattatttctataattttgatcaaacttaaaatgctttgactttcaaagattcttgtaatgacttataatttggaacggtgggagtacgtggaatctatgaccatccaggattcatcgtgccatgacacaaccaaagtgaccgtgggaatagtaaccatttttttttaatttagtcttttttttctatcaaaatttcacatatataccgctagatgttaaaactcatatttggatcttaagctcggtgctaacacgtcttggcgccataagtcatggtggagtggttggagatcaaggttgacgtggcttaaggatatggcgctaacgtggccatagctccacgtcacgactcacggcgcccgctggatcatgggccgacatgtaagattgaccataggatacatgtaatatcctacatgtaaagatgttgttaactttttttttgagatataaacacatttttttttgttaacttaacatatggtagttatagaaaaaaaaaaacaacccctgcctgaacccattttgggccggaggttttcgtgcttggctgacgagcccgatttcggcccataggcttcagatgccgtgtcctgagctttagctggagcagtcgtcggaacactccctggaggcctcgacgacaccccgcgtcgcggcgccgccgccgccgcctacgcctacgcctgcagcagcctgctgcgtccccggccagctccacggcgccatccgacctcgaatcgcctccctcgctcgccctcctgcttgatcccgccgtcgccacctcaaccgcccccacctccctctagggttgccctgccgctccctcgaatcgcgccatcggaggccttcccgaccgccctccactgtgagttcctctcctccccgctactccactgccttattttcggctccctgctctcctcttctgtaattagaatggtatcagtttatcctgtgcagagcaaggtagcagacagatggcgccgcagtctcggttgctgccgccggcgttgcagatgcttcgccgctgccggtgccgtgcctcgcgctcccacttctctaccgcgcccactctcgtctcgccaccatccaaggccgtggtctacgacgagcacggcccacctgagcaggtgctgaggacggtggacgtgccaccggtggaggtcggcgaccgcgacgtctgcgtcaggatgctggctgcccccatcaacccctcggacatcaaccgcgtcgagggcgtctaccccgtcaggcccccgctccccgccgccatcggaggctacgagggcgtcggccaggtccacgccgtcggccccgccgtcaccgccccgctctcccccggcgactgggtcataccgtccccgccatcgttcggtcggtaattgtaattgcctcgtcttgctgcttcgggttcgggtcttcgactcaatttttttcaactagtaataagtactaccgttttatgctcttcagggacctggcagacgtacattgtcaaggatgagaacgtctggcacaaggtccgcagcgatgtacccatggagtatgctgccaccatcaccgtcaacccctcgaccgcgtttaggatgctccaagactttgtaaaactcaatcctggtgctctttttgcttctttggacccatgctttcaagtagtttcttccttcccttgacatttgacacgtccgtcgtagaattcacttgccagtcatctcgtgacctccagtctctactctgtcaccaggtgattccattgtccagaatggtgctaccagcatcgttggccagtgtgttattcagcttgctaaagtacatggaatccacactatcaacattataagggacaggtacaatacaaatttccttctcaaagttggtgccaccaacagggatcaaggattctgttggtgtcttgcctttccacatgattcctgtgccaattctctcttatgactcactttcgagttacttactcatcttatcccactgttgttcaatagtaatctgtagtagctgaattgatgtaggcctgggtcagaggaagcaaaaaacaaactcaaacaacttggtgcagatgaggtgttcacagaatctcagctagacatgaagaatgtcaagagcttgctggtactgctccactacccgcttttccaatccaaattgctgctcatccttgacagctagtatttgtctacttgtgaatgaaaattaaaatctgtgtgagaactagaaagtaatttcttgtccaaatagggaggttgcaagctgatgttgacaaatgcagtttatagactagaaagcaacgcgtggcgttgccgcgcacatcttagagagcttgccagtttcagccaattttgcgttgtcatttcattacacattgctacgtagctcagaggcagcgttgtaattagttgttgtcagtagagttgttgggcagcgatccagtagcgggagacttttgaaaaagagaatcaggagaattttaaataagattagtttcagataaacttgaataggagtttttttcctaaacaaaacacatttctcatgatattcctttagaaagaagtgtcaagaaaactaacttacgaaacataaaagaaacatatacagaggtgtttcagatataattgaaggggttgtttggatcccatgttttataaaactagattttctagaacaagttttagcccaggtgcccaacatccagcacaaaggtgtttggacactcttaaataacttgggtttaactgaaacaagttctcaataacctagaaaagtgagctttaacaaaaacaagtttttcagagaaccggattatgtatggtatctcaattgccaacgtccaacaaatctagcaatcagtctccaacaaatctaacaagttctaccaaaaaaaaaacacctggcagcaacagcgtgctgtgtgcataaactaactactgaacaaatacttagatcagagaaagtgctatcgatcgctggtgctgtgttgcatccagacccaaacaaagaaatatttaaacacagagtaataaactaaccacaaccacaaactgtcttttcccccctctaaaatttcaaataaaatttgtttttaataaatctagcatctaattaggagatccaaacagccatgaagaaatcaactcacccaagtcttccttttagataaaatttcataaaccgatcctcccataatttttggtgctctggctcagagaactgaattcgccgtcaacccaaatgttgttctcaggagatccacagtgtgtggttgtttccatcctctttgtttgcacataacaagaacaaacaacctgaactcaattatgactggaagcaggcacgattgccaaagtggagctcaaaccgtcaaatatcaactaactttttatttatttggaagaaactaaatcaagcttatggggataaccaagcaacgacatatggataagatgcagcgtagggagttactgaagctgcttgcttaagctaataagtaacagtagtttactatcaatagttcacgagacaatgctagctgtgaagaaatgagtcaaagcatgcatatctgaacaaacagatttggagccataagtctggtgctttcagctgccaagggtaatggttcgtcagatgacaagctggagtgtgactctggggttagctagatattagctaatttgcaactaactgtgaactatttgtgatttaatgtttatttctttttcatggtttgcgctaccttataatgcaataaatcaaggtatagaatatttgtgacaaacatgtttgatacatatctgtatgaatggatttactaacattttctccgtagcagataaacacccaaagttagcattgaggattctcaaatatagggtagttgctgtatctctgtgtttggctcccagcggcatagaataggaattacagataaaactgcaattgccatactgctgaattcctaaagctcttcacagataaaaatgtcaatgtaacaagattttagaatacaagtgaactgtgtcttaaaaaaaaatcaaaatgctaggtgaaagcattagagcaatgttggaattagattcatgataaaggagacaattttccttctatgatcttctgattcacatgccactagtcttcaaagaatttcaccatagttcagacatccaggaaagcagtagcagagaagttactgcattatactttgtactcacacttccgatattctgtatatactattgtagaaatgctacggtagaagtgaagagggaatgataggtcattagcatatcacacaatattgtcatgatccttctattgcaattttaaagaaaatcattaatggtctataggaaatcaagaaacaactaccagtccatttgaaatatgcatacatacagtttgaagcatatattactcctgacccatagaatcacagaattacatatgcgcctttttgttacaaatacacacaacctggatcaacctagcccctaggaataagggccgacaaggagaaccctcgcgctccagccattgcccaaagctgggcagcaaggcagtaaggcagtagccgtattggtgtcaaagtcatcagagacacatttgatccaattgttccaaagtgttcaagccctaggataatgatgggattgatgcctctttgcatttgtgcatcggccatctcattaattctattccaccagtcctcaaaagaagtatcattcattatcagcgcctagagtttgctgcccaaagcgatttaggacggagaaccggaattgccttgcaaacacacagctagtgagcaagtgatcaattgtttcctcagcctgattgcaatgaggatactaaaccggatggccaaggaggtgcctcatggcaggagaaggtgggtgacgaggggcggtggagcgcggcagggcgtaatgccgtgcctcagcctggctcggcactcatgggcatagggaagccttggtgttgggcggcaagcggggtagggttcatggctggagacactgcatgtgcatggtggcccggtggggctggacgatggaggatggatgaggtagatgagatgaaacagtagcagagatgaaggacgtctcgagctcaagtagtggaggggaatggtgtctcaagctcgagcagcggaggtgatgtgccacaaaacttcgcaacgattcgagtgggtgagacccaaactgatacgcatcggacggatgagtggcactatctggtgcccgcttttggtgcaagatttgtattattagagattagttgttgtagtttatggaaacccaatctcaagtgcggtagaatcgtgtagtttattgtttttttccttggagtgctattactgcctgacattggcattgtaacaacaaattacagtttttctacctataaagagttggattgtttcaagtttgaaccaacatgtatctagttaatgttttgtttcctgtgttctcagggtgccatgccggagcctgcattaggatttaactgtgttggaggaaatgctgcttctctaatactcaagcttttgaagtaatgtgctgaatttgaaaaaaaaaaacccctagaataatccatttttctcccacacttagacataactcttgttctgtaggcaaggaggcaccatggtgacttatggtggaatgtccaagagacctgtcactgtccctacttcatatttcatttttaaggtctgtacacaagaccctgcttgtgaaacttatgcatctgctgttttgctctacttgtccaggccacttcaaacattttaaatgcttattatagtaaacactattttatgtgagcaatgttcagtagatgatgacaatgctaaaaaagtagtgctgaagtatcagcatgttgagacaaacaaactatttgatagatggtttcatgttgtgttcaagggatggttatttcctattgtttatatgatattgccccaaatgtcaaaaaattactaaacacaatgaaatatatgttttgaaaggatctttcgctacgagggttctggctccagaagtggctgaactcagataaaacagaagactgcagaagaatgatagactacctcttgggccttgtgcatgaaggcaaactcaaatacgagtatgtaatgttaatgccattctgttgttgggttgcttttagatcttgttgacatgctctcgtctagacatttccttatctgtaaagagaaaacttaagtgcctttggaaacatattaatttgtttgcaggatggagtcgatttctttcggtgagttcagcttggctctggagaaggccctgggcaaacatggaagccatccaaagcaagttatcaggttctgagacgagggtaggctagaggatcagagagcatgcaattgccattgattctgtatgaatgatgaatccaacagttggtatggcaattgtaagagtgacctggagttgtatataaaataaaataaagtaaagtatgttgttcgcttgagcttatcagccaaatccaccagtcatttagtagtgtttttctcttataacaaatcagccaacaatacttttcgtcatggcttatgagccaaacgaacaagttagctaagtgagtgaaggatcacttgttggtggcgggcggttgtacacaagttgtgcgtgaagtattagtttctttgtggcggacggttaatacgaattcaacagagttgtttatatcaccctctcggccccgccatcatctccccgctctcctgtggcaaatgggtcatactgctgctccgttgttcggtcggcgattgccttgtcacgctacttgggattactagtttacatagtagcaacaacgagaacgagagaaatttgacagacaacgactttctctcagcgatagttcaactgaccaacaaacgatataactcccctcaaagagcaaaagactaactgaactacaagagatacgacttaatgtgcgcttgacgagatcaggtttatcatctcttccgccatgggttccaatttcgctttagggagccacgacttgatcaacattagagtcttgtaaatgatcaccattggggacgcaagcaccttcttgttaaacaagccacttcattccttaattgtccacaacgcgcctgcacgaacaaagagtgttagcttgcgtttgatttgtcgacttttctcaacgaactctaccaaaaagtcagcacagtt

SEQ ID NO: 4774 - DNA, 11299 bp, Sorghum bicolor
acaaaggagctcctacatcctcgttgttgaggtaaccataaaagtcggagtctctttcatctccttgcctctctaggcaaccacaaaggtcacttgagctttccactaaatataaacttcctaaggctcttccacaagatggaagctcttaggcgacgcctagccagctagggttccaagaaccaaagagtaatagatgcaaatccaaccggcttgacaaagaaatcaagtgctcaagcttgccaaagtgattttctcactcaaaccactatcctatcactcaaatccttaggggaatcaaagttaggagcaaaggggaaatgataggggagtcttgaattcttgagatctgttttggccgaagttaggtcgcaatgaataaagttagaagagaggggagagctatttacactcataatagaaatctaaccattcagatctacgtcgaaagttccgacgcttatcttggaactcctggcttatgtcaggacttctggtagtcagaactcctgatgtaggttgggacctccaacaggcacagacagtcagccagctaagatctaggtaagccagctaagatttaggtatcgggactctcgacttgggtcaggacttctaactatcgggagttctgactcacgtcaagatttccaacgatcacagtcatcatacaggctaagtgactgggtgtcaagagttctgacggtcaggagttccaacttacgtctggacttttgacactaaaaagtctcaaactattctacgtgctcgtgaagtgctatggtgtctctcttttgattttatttttatgcttgggcactctatcttccttagaccaaccttagtttgtatctctctttatagtacggctgatcctacactcaaaacaaaaatataaaacttttgaagagcgctttgagttcatctgtctttacaacttcaagaattgatggatatcatttcatctttatcaactctttgaatctttcatgggactaatagctgtgacatatctcattaagatcatattagtctctaatttggatgtcatcaatataccaaaatccatcgtagggggacaaatgcactttcacatagctatatacggaattgataccaagctcccatttctctcttggtacagtacgtgtacgaaagggaaaatggacgcccacagcacatggcatctaactggactccgtgccactatataaattattaatgagacaggcgcagtatcttaacaatcagaaccctaatgttaacttccttctagttaccatgagtccatgacaattagtacactattatatttattactaataatgtcctgaattttgtcatatctatgttgctattattcatagggtcaatctttgtaattatgttttttgttcacttagctcaaatgagacgtccttcgtccttccctatcctctcgtacacttagctcaagtactattgggctgcaaagacctaaccataaggtgctgagccttcccattgacaatggactcagcaccgtaccatagcatgactatacaagggcagcaagttttggattcagtttaatcagaaatttgcgtaaccgccagtgttctaagaacaggtcaccgtctctgaaaagtgaaaacattgtttaacacgtatacagctcaccagtttgaaaccaaagttgaaagtgcatgcagttcctgtgatgaacgaagcacgacaacacatgcatggagacctctccaggaactgaagctgtggcttcgcatgaccagggccaggcgcgccggcgcgcgcacacataagccatttccccgggttctcagctgccaagcaagctcccttctggacggctccacggttgtgttgtgcaggagaagagagtcgacacattccgtggcaacttgaccttggggtcatgggttccacgtgatctcccagcgataaatagggactcagcagcctgattggcaatgcacgtcacccggctctcttcaactgtggctgctgcttcttgtgatggttgccatcccacattgtgacattgggcgatgattgcacctgcaaacaaggaacaataaaaagtcctgtaagtgtggctcttttagctgtgcatccatttacatgcatgatgcattcgtaattctcttccgagaagagctagaatcaagcagtttcaccattttaggtttgtataggagaacaaattgcatctgacaatgtatatcaaagcaagctcaaatactacagagatcagaaaatagtcagctatgtcaaattagagtcggcacactgcatttccactgcaaccagacagccttgtaaaactgagtagcaccactgcaggaaggaacgagcaaaaactcgaagagtaaaatagtactagacaacattacctcaacacactgacatccttctgaaacttctaaggggatattatgttcactctgaacagacagctaatcttaaaacagttttttttttggcagcaggtaactctttagagtagaagcagaaagatatattttcagctgtagaatatgtggaggctcaagattgccaagggtggaccgtggctcaagagtggcaacagtcacattggaagagaaacatgggagtttgatcaagattttggatcaaaagaagagagggaagctgttgactctgcacgggaagaattcaagaagaacaggttccaaatgagacacagctccgatattttggcccgcatgcaggtaacatgttgaattatggttgttgcacaaaccttcatatggcatagtatcagacccccacggaatatatgaaacttcaaaagaaacacatgtatctttccaagaccttatatgtaggctacatctttgtacatttgtaaatcctgtgtgattaaccatgatggtccttacaaagcaaagtactaccactaaaataaattgcaaatataatataagacaatttagcatcttgaaatgccatctgaactacttttttacagttagcaaaggagaacggtttcagtcttgatctacagaagacaaaagatgaatctcctttagttataaactccagcacagtgtcggagatactgagaaaggcacttaattacttctcagccatacaagcacacgatgggcactggccaggagattttccaggtccattgtttaccacagcaaccatggtaaggattatgatacaccaaaattgttgttttctgtattattattattaccatttagttgattatgcctgctttattactttcaacatctagtattaaatgtcacagatctcttaagtttccttgttttctactacagattatagttctatacgtcacagagtcattaagtagtacactatcgtcagaacactgcaaggagatttgtcgttacctgtacaaccgtcaggtaatctggacatttgcaaggaattatgaacaattttaaaaacacctaaaacatttcaaaaatatgtcgacaagcatttaatgatcgtgtgaaacagaacatggacggaggatgggggctacatgcagaaggtgaaagctccatgcttagcacagctctcaactatactactctaaggctacttggtgagaatatagatgatggaccagatatgtctatgcttaaagcaagaaaatggatacatgatcatggtggtgcaacaatgataccaatcttggggaaagtgtggctctcggtaaccatccttgcagttgaattgtcatcctcatactcatttgttttgcagaaataatttaattaatttaccttggtttataaaatattgcaaacctatctcatctgaattgggggttgcacttactaatcctttaatagcatgatgtttaacggtgtagccattgagttattcaaagcattgtaaaatgggacaacagactctggaaaggaccaaataacagtggcaggcataaaatagattacaataatcaactgtaataagaacaaccatttattcacaacaggacctttgttgtaactgcttacctgataatgcaggtgcttggagtttttgaatggtcaggtgtaaatcccatccccccagaattgtttcttcttccatcatgggttcctattcaaccaggtagatttttcttcaacctggtgcatgtgtagatttagtagtattagaacggcgacttggttgttgagcaacctaattatcagaccaattgtgcttaaaccatgtcaactagaaccagtggcggagcttgaccaacatgtcagggggagccatagccagtgcaagggtggctggattattactgcatgcatatgtgttattggttggtctccaccaagctctgccgctggatagaactcataacttctacttaattgaaaggcagagttcctgccgttgctttcaaaaaaaaattcaaaacttctttgtatactgatattatctaagataatgtaaccatcttgacaggtgatataggaatcaccatcacagccaacaacctgaagtagactattattaagtaaattttaccatttagtattacaataattattctaccacatccattgctgttaataatgtgttattatattacttagacctataatagttatgtaaagttagataaagcagatctaatcatctttgtattttttttctttccaaattcaggacgattgtggagtcacttcagaatggcattcattcccatgtgctatttatatggcaagaaatttgtcggccccattacgagattggttatgtcactaagggaagagctacatattcatccctataaaaagattgactggaagcaagctcgtaaattatgtgcaaaggttagtctgttataagcatctagcagatatattgaacgattctatatgattccagagttaatgattggtattcagataaatacaaatgaagttaaatcacattgttttgtgtgtagagatttagattggtaaggcatttatgtacattgcaaatattcacatgctttctgtatgccatgttattccctatatcataatgtaaagaaagatatcagacatcaagttctgccatttgaacccacaagcatgtcagcatatgtcatatgtttatgtttcagaattgatgaaatacttgacaaattccaatgcaggaagatgtgtataatccacatacatggctacaggagtgtctatctgactgcctttacagttttggtgaaccttttctcacacgttggccaatttcctacatgagaaagaaagccctaaaacaagtggctgaattcttgaaatacgaagatgagaattctcaatacatctgcattggtgccgcacagaaggtaggacaattatgtcttctcaaaacaactcagacaagttttgaacatcacagcagaaaacaagttcacattgaatagtattagttactgatggacagttcgttatttttagtttttttaagaaattgaacatttagtatcagaacattatttagttacatgaagtgaacaaaaaatgttctgatagtgcagcgaaaactgcattgagccattgattacacttgttttataagcatccccaaggagcaatgtctatcaatctatgtagtgtagtgttatagcaccaatagttgcaactgaataatgacaaaagaaaagggagcgaaacccaatcgaagaaattttggaaccaaaactcatgaatttaagggttttccaagattccttgttcattaaatcataacggattaatctgacagaaaaacactagaaatatatgaccataaggaagcatttttcttatgcagaaagtagaaaaaacacgggacacaaatgtggcctaaggttgagaagaggttgagaactttagatgggtgaagtcatgagacatgtgtccaagctcacactcatattacttccctatttataattaatgtgtgtactttatccggtttgtgtttctttttaaaataagaaataggtccacaaaaataatttatgaaaggacttttcacttttgtacacacttaatcaatcattcacttcttgacaatacatgctaggaaagatgggtacagtaacaatttaggaaatattttgcatttatgaacacttcgaattttagtactaatgaacatgacaaacgtccttacaaagagtaaacattgcagaaatccttcccttcttgacaatacatgctaggaaagatgggtatagtaacaatttaggaaatatttacatttatgaacacttcaaattttagtcagtgctaatgaacatgacaaacgtccttacaaagagtaaacattgcaggcattgtccatgttgtgctgttggatcgaaaaatccaactcagatgcattcaagcgccatttggctagagttgctgatttcctatggattggtgaagatggcatgaaagtgcgggtaaattaaacattactttaagatctctctatctacaaggcactgtcaagccacaacaccttgtgtgctaatatttatgtatcatcgctttacaaaggtctgtgctggtcaactatgggatgttgcttttgcagtccaagcaatattagcatgtaatattgcagaagaatatagaagcaccctcaagaaagcgcatgatttcataaaagcctcccaggtattattgtgtaagattgaagttatattaactctatttctcttaacttacctgcttaactctactaacttaaattttaagatcatggacaatccttctggtgacttcagcagaaagtaccgtcacatatctaaaggagggtggggcttccaggttgcagatcaggggtggcaggtttcagattgcacagcagaagctcttaaggttcaacaccttctttcaccataccattaccagactcaaaacaacacatcaaaactataagaccataaaataacatatcatgttttctctggtttcaggttttgttaatgctgtccaaattttcatcagacattggtagtgatcagatggaaacatgccgcttatataatgcagtgaatgtattattatccttacaggcatggaactactttactttgcattacacatctaggtctaccattagaaaggttcaaggtagttgaacaaatattgtttcatggacattttggcagcgaatgaaaaaaaaacctatatgctgctaatagcactaatcctaagtaacaattagaaactaatatactatgcaaatgcagcagtgatgcacattttcctctttagaaaatgattatggtacactccagagatgaaaagtgtgaacagattaacagaatactgtacaggaattaaaaaaaactcaaagcttaatttccagacataccaaaagaaaatgaatagccatcagttaagtatagatgatgggttaactaacagcattttggttgaagaaaaaattaaataaaagcagagagtaaatatgtactaaccctgaattggatgcagaacccaaacggtggctatggaacttgggagctagctcgcacatatccatggatggaggtatgtttccagttcctgctttactgtttagctaaattcatgcattaagattgcattaaataacatatatacatgttttttttgagaatatatatacatgtttttggataataggttcaggtctttatgctttaggtaatttcataacgtaaaccagcatttcatgcaacaatgatcaaaagatatttagaagcaattatgtctgctcagagtttcttactttgggcatatagtaggtgaattatagctactttgttgtttcttcacttatggcaaaacgtgcttaggaacaataggatatcatactgagggcaagcatgtaaatttatttttcagcttcaaaaaaaaaataacttgcagattcaagttaagttatataaataggagccaaaatgcatctaaaaccgggtaagaaagaaagtaggcacgtatacactggtaatttggagtcaaatgaccagcacttctagtctgaacaaatatagtgatgaaatcccaagaaaattctggtatgtaaaagcgatcattattgagccaaattacttgtcatagctatatcgaaaagaaaagtaagtattgtctttagggaacaattattgtagacttgtagagcataatatctacatgtggacatatagagcactgaaaactggggctttggatcttttttcatggcagattttcaacatgacagaaatatatgcagacatcatggtggagcatcagtaagaattttacaacattctcagcaatacctctcttatggcaaaacaaataacatgcatacatactgcaggtacgtcgagtgtacctcatcagtcatgcaagcattagcattgtttcaggagaagtacccttggcatcgaaaagatgagatagatcaatgcattaggggagctactgaattcattgagaagttacagaatgatgatggctcatggtcagtacttttatacatgaccatagaaaggtttcaatttggcacatttagtccttattgggttgcttgaagttttgacactattaaacctaagtctacagaataattcccagtatagctcagcagaactgaagtacatagtcccaaagagtacagtcaatatcttcaatgagataataactatgttatcaacttaccgtgatatgcagacttatattcagaagagaaccaataaagacagtcaaaatactttcctactgcaccaaaagacatatagcataggttgctaaccagaataccaaaaggtgcaacctttaatacagcaaataaaactagataagttcctagttaaatagaaccagtggcatgcagagcagcacatattaaaacatagccgaaattcatggaacattgagaaaatagataatcaatgatcgataaattgttctacaggtttggatcttggggtatttgtttcacatatggcacatggtttgctattgagggtctatcagctgttggacagagttatggtaacagcacttgtatccggaaggcctgtaagtttctcttaacaaagcagctaaacaatggtggatggggtgagagttatctttcatcaagaaccaaggtaaccatttctggtatgcttttgcaatgtagatggactgcatctttcatcaagaaccaagctaaacaatgttttagagtaagcaacacatccagacaatggaaacatgctttgatcctgtttctgttcaacttccagcaaattatagtacagcaatctgtatgaattcataaccagatagtaattcaataggaacatgaagcgttgagaggaaagtaggaaacaagtaacctggttcagccttatttagagaaaatgaaacaagcaataaagtagatggactttatgttaaaaaaatgcaattgcatggcaacaagagcatgagtcgtaatatgtcgttccaagaattccatatctacctaaatgcaagctgaacatttgctggttggaaacattatgcatctttcgctttcacaaagtttacagtgcacctctatttatgctgaagatttttgtctcagaattagtcttgacttgctgcattttcaatccatgagactaagcagatattcaaattataaacaggcatacacaaatctggataggcagaagtcacacatagtgaacactgcatgggcaatgttggcgctcatgaaagctggacaggtgattattttatttaacactacaaaatatttaacaggcaaatggagcagagcatatttaacatcagcataaatcaaccaacctgcttaaaggtttagatctatttcacttttgaagtatggagtaatttccaacttttcttctaagttcaggtggaaagagatcctactccactgcacaaagctgcaagacttatcatgagtatgcagctcggcaatggtgacttcccacaggaggtaactgctaagtgtgctctgtattatatacagttccctttttaatattgacattctctgttataatgacattaagcatgatgaagcaataaagatgttccattgacagatgtgggtgaccttttgcttgataaacaacgaaaggttttgatcttcaaactaccctcacaggaacgtttatagaagaatacccccactaaatagttttgtactgtggaaaacctgagttatttcctcataattattggaaagtattcgcaggataacttcaacctcttctccttattaatataatgataggcagctctcctaccagcttgaaacaaaatggcttgaaactgtcaagttattttcccttttaccattataggaatttcccaatttctagtaagtagaaacatgtaaatcgccttcattcaaagatctactgttgctactaacagtttctttattgttctgtaggaaatgattggaagtttcttgaaaaatggtcccttgtgctacatggcttatcgtaacatatttcctatatgggcgcttggagagtatcagaaattagtcctccagtgtgacctccaacggccaaccttctagccaaaagcagcaaatacaattccatctgctgacagtgctactttgcataatttggtagctgtggtgccatcttgatttgtcgaaaagaattggaaggtatcatatgccttcgagtaaaacaatagtgcaaatagtacagtgtaatcaaggtggtgtgaatatctaaagttttagaacaaaaaatgtacacccataatttgttgcattattttttaccactgtaagagaaccacattcttcagatcttatgtgcaagaggaatgcaaagggtaacagcatttcttattaacggttaacgcactgacagtactaaagcaaactacaaattaatgacagatattaacggttaacgcactgacagtactaagcctgtacagggtaatagtaaggaagttatcaattaaattgtagattacctcatccaaccaagcacatcatgttggaaagtttaccacagcaaacctttctacatcacagaaagtcaaaaactgcttactatagattcttctttttaaagaccattactacagattcttgggaaacagtattcttcacagccttaaccagcaccgtaatctcaacacgcaactcatacaccctgcagtcacccctagtaggccttgtttagttccaaaaaaaatttgcaaaatttttcagattccccatcacatcgaattttacggcacatgtatgaagcattaaatatagataaaagaaataaataattgcacagtttatatgtaatttgcgagacgaatcttttgagcccagttagtcaaaattt

SEQ ID NO: 4775 - DNA, 5244 bp, Sorghum bicolor
gccatctgacacaaacgcaaagtagcaacggaggagatggcagtgtacctctgttagagaaatattagcttcggtagtagctctcataaatggatataaactttttttctaaggctgctagtgttgtagaagccttaccaaaggggtctaagttatgctccgtattaggcattaccaaagaggtttttattggagtcatgctttcttatggcttaccaaagtggtcctatgtgtggtgttagtggaatgatatagtgggctgtaaaagtagaaaaaagatctatctgcgagtgggttggctttttcctgagcaagaacagggccgtcgagtgaggattggttgagcatgttttttgttgctatggtggtggactcttttaactatttgctctattattgcctcacaatgtgattggtattaaatcgcgtgtcaatacctaaaggtgaactcaagggatttattttttcccatttaatgtaaataactatcactttgaaagagggaagttagaaagagaagaaggatttagatattgtatttgataatggttttatctataaaaaattatgatgcgtcttgaaggctcatttgttaaaaactatctatggaaaaactgactaagttgaaaacaattgctctaacatatctttacttttgtttggtgctttttgaaggcaaggattaagagacctaattctgttgtgttgatgggtaaattacttatttccactcataattcaaagggatttattggtcaatccgtaccttgtaccacgagtgtgttattattgactagcatatgattgaggttctttctttgtatttaactagtggtatgtctctaagaaattattgagtgttctctaataaaattcaaaagaatacaaataaccagttaaaaaggtctttgttcaaactatgtacaatatgggtatcttattatttgactagccatttctattcaggtttcattataagggcctttctggatgagttagaaccacttattagttgagctaaaaattagattaaataaaagaacactccgcgtgttgctgtggaaactactgatttagaatgaaatttaattattcatacaattcttaggaaaagatgaactattataaattaatattagtgggatagcgtggcacactgatgtggacaactaagtgtatgttagtggatctcgctgacgtggatatcatgattacttgtgttagcgaactttaattgcaagtgatagtggattgctgaggtggatatcttgcatgttaagaaaatttgctagtagaattttgctttataaaagtatatatagtatatataggattatctatggttggctacctaattggctaataactaataactatagttaaagacctaaaaaaattagctcctgtttggatgcaccgagactaattttagctaactagcaattaatgctggtatctaaacatgctctaatttatagagcatatcactgacttataccaaagaaatgagcctgaaatctctaggaaaatttgttgagaaaatatggtagctagtgacaaaatgaaatggcaaaagccagtggagtccaaagcgggccttgtttagttccaaaaaattttgcaaaatttttcagattccccgtcacatcaaatctttagacgtatgcatggagtattaaatatagatgaaaataaaaactaattgcacagtttggtcgaaattgacgagacaaatcttttgagtctagttagtctatgattggataatttttatcaaaatacaaacgaaagtgctacggtgtcgattttgtaaaaaattttggaaaacaaggcccaaaaccaacaacctgaaacggagttcccaaagcaaagcccccacaaaacctcggtcgctcccctcggcccttgccatcctcgtttctatcgccatctgctctgctcgcctcgcgctcgctcctccccgcgcatcgtgccgtccgccaccgcgccgcgccacgccaatggaggccgccaccgtgcccagatccgccgcgggctgccgcgcggcgcccctgctcccggccgcccgggccgccgcgcgccacctggccctgccccggcgcgcgttctgcgcgtccgtcgcggcggcaccggcgccgcgcagcctcctcgccgctcgccgcgctgcggatggcgacagtgtggagacggcgccggaggcggtccccatcgagaaaagtcggcccctttactctcctcatgcctccacccgtctcgtctcgtctgtgcattcctgctgattggggttctctaagctttcgcgctgcttcttgtttgtgtgctgtgcagggttccctcccttcccgagcgtcatggacatcaaccagatccgcgagatcctcccccacaggtgagtgccggtcgcttgcttccttgctcttggggttgctcaaacatgtttggcattgccatcgcacgacacaactcttaggctgatgcaacaccttgaaataattgaaatatggaccatgcgttgacttaccagaagaggtggtccattcctttgcaaatatgagcatacagtgctttaactctgctgcttcacacctctacatctctgcagttgtagtcttgtagaggactagaggcccatgtgcatagagcatagttgtacacattgttaagaggctatccaaggtttggagttgaagcattgagataatgaggatagcttaacagtttggtctccttgtgaactgacgtaaagtcagtttgtttctaaacaattgaaagaaacaatctgaaaatgtgatgataggcaaggtggatagttgatgtaaacctgtaacatagtgcaatttcagccgagtgcttactgaaaagtccaaagattttggcacaaaacaccaagggctgctgcaacttcactactgtcttagctgtagagggtgctgtagtcaccacaattccatctccatatcgacccctgatacatagtactttagctgcatttctttatggattccagatatttgatctgtgttgtcatactatatgcaaatgtatccttgatctcatgtatatctgtaataaattttacttgctactgaagaggatgttgaaatatttgaatatccaaaatggaaatcgagtaccatggctctagtgatcaataagcattgtcattgaaataatgtttgttgtgtattgtttttataaactatctaatacctatgcatgtgggtatgcatgttaggttcccattccttttggttgatagagtaattgaatacaaggctggatgaaataatgtttgttgtgtattgtttttataaactatctaatacctatgcatgtggatatgcatgttaggttcccattccttttggttgatagagtaattgaatacaaggctggagaatatgcggtggggatcaagaatgttaccataaatgataacttcttcccaggacattttcctgaacgccccataatgcctggtgtcctcatggtcgaggtatgcaccaattctctgtgttgctcatcatgtttagggtctggatcttactgataattttgatataataattctccttacaacatcaccagagggggtgatcaattttgggtacacttatggatggttgtaatatttcatcctgagattacgttcaccatgacttcatatgatgttgggatggccatgatcataatttgcccattttcttttttccagtcttttagaagttgcataaataaacaataatttgaagttatgcaattttttcatatgagtatgttttgcgagtccaatggaagtttttctttgtcttcagttattatatgcacataatacgctgccatatggcacacatctccattaacagtatgtctcttttttattttagccttttcttatttgccattctgctgatagtaattgattgcctcacaagttttctggtataaactgactattgtgaaatgtgaaccatagctacctatatggacatgtagcaattgctaggttcagcagtgtaaactttcataaaggctacgccattagatttatgatcgttgtccactgtgtaatttagtctgaatcagaatattctattagattactcaaaccagcagatatacttatagttgcctgcattgtatttgtacctttatccacaggctatggcccaggttgggggtctggtgatgctgcaacctgaagttggtggatctcgagacaacttcttttttgccgggattgacaaagttaggttcaggaagccagtgattgctggggatacattgatcatgaggatgacactgacaaagtatcagaagaggtttggactcgcaaagatggaaggaaaagcttatgttggtggtgacctagtttgtgaaggggagttcctgctggtcagcgcaactgagtagtgcaaagatacttcatggttctctgggaagaatcattggttagagtcagatctggttggctctttgaaagaatcgagttttgagctaattatacaaccggcagttgaggcaatcctttacctgttgttaagcatgtcgttgagtccatgtggtgactttcatcgcctgccagggctgtgaatccagccctgttactgttgtaatagagaattacattacaatatcttcggggtagttgtttgatggaataaatgatattgactttgtagttgcattttcttcccagaaccttatgatataccagttgattgaaattgttttcgtggttccttgcattttctttgttcgttcatagtacatcattactactgaagacatgacgagtttgtatgacttggtacagccgtgtaaaaagatatgactgcatctgcatgaaataatcatggttttagccatcctttgtgctgctttgagaaataatcaccggtgaagactgacaaatgaagtatcacaggttcacaacaggcaaaaaaaaaaagtcaactacaaactggtcaacatcacgaaatcgttaattaaattacctccgaggttgcaatgcaccaacaataatccagatccaagtcgtctgggtttgctggtcaactcttgcccggtcactattaagacgtcgtttaaacgcctcattatgtacccaaatcaaggttacgagaatggcagcttgaacttgtcctaaaaagttgaaaccaaggggaattggatagtggcgttttgagttgttagtgtttggacttcttggtgagatatggctaatcttgtggctgtgaacat

SEQ ID NO: 4776 - DNA, 2677 bp, Sorghum bicolor
ggatctgctgcagttgttgcagtgcacttacgtctttggggccatccactgtcgatatgtacgtttgcaatcaacgatctctaggatcctgaggtcgccaaacgaaaccggaagtgcacgcagaaacaaaacaacgtttgctgaacaaaattctgctctgatgtttccatgcaaaatcatgtactacaatctacacaataactttagaaggtcctgattcagctaaaactattcaaaccatcatatgcttactacatcagtatacctcgacagagaagctacatgtctgaagaaagcaacagcaccaattgcaggaagctacacattatagcaacggcacattcattccaacatgtacacactagcaggtgacaaacaaagggtgaatggaaacagtggcatgacacttcaggagctctagccatcagaagaaacctgcaatttgagatagcataacatcagtttccataatctttcacctgacaaaccgtttccaatttttcacactgaaagggcagagcagagctcatatcatatctatacagtcaactacttggatgtcaaaaatggctttactaacctgaccaaaagtgaggatgctggcctggctgcggctgccgctgtggctgggattgccagctatcctcctcgatgtccatggccatgggcgccgcctgttcggcggccaatgctggttctgaagatctgctccctggttcagtgctcacggtgctgtcatggaggacagaagcctcttcttggccctgagttggctgcagtggtgacggtgagggcagcatcaacatggttgtctgaacctgcacaacaactggtgctgcgccggcgtctggatctgcatgtggttcctcttcttccatcacctccgggatctctgcctcatcctgatgaacaaacatgaaagtgtaagcaagtgatctgagtgtttaaggtgcacaatgttgatggcatcatgatcctccgtttgacagcagaacaatgaggattcttaactgaatttcggtatcttgccatgtggatgacattccgtaaggatcctgaaaccacatgcgaacgtgctaaagcgttgtgcttgtacataggagcaggaacttggaatccaaaaaagaagctaatgagtttgtttagattattatgcctcttatataccctacttatatatataaaagcgtgtctctgtagtcagactgtgaacgtcttgcatatatatatagtgcagaagaatatcaacgtcattctatgcagatccgtttcatatgaatttttcgaaaaaaatcgcaagaaacagttcaattcaccaatgaaaagaaaatcacatccccaaactgttccatatgtcatacctggagtttgatcctcttaggatcaaggaacatggagaatccatggctggccacatcagcatccttcctctttatgttcacagccacaagattagccatatctcaccaagaagtccaaacactaacaactcaaaacgccactatccaattccccttggtttcaactttttaggacaagttcaagctgccattctcgtaaccttgatttgggtacataatgaggcgtttaaacgacgtcttaatagtgaccgggcaagagttgaccagcaaacccagacgacttggatctggattattgttggtgcattgcaacctcggaggtaatttaattaacgatttcgtgatgttgaccagtttgtagttgactttttttttttgcctgttgtgaacctgtgatacttcatttgtcagtcttcaccggtgattatttctcaaagcagcacaaaggatggctaaaaccatgattatttcatgcagatgcagtcatatctttttacacggctgtaccaagtcatacaaactcgtcatgtcttcagtagtaatgatgtactatgaacgaacaaagaaaatgcaaggaaccacgaaaacaatttcaatcaactggtatatcataaggttctgggaagaaaatgcaactacaaagtcaatatcatttattccatcaaacaactaccccgaagatattgtaatgtaattctctattacaacagtaacagggctggattcacagccctggcaggcgatgaaagtcaccacatggactcaacgacatgcttaacaacaggtaaaggattgcctcaactgccggttgtataattagctcaaaactcgattctttcaaagagccaaccagatctgactctaaccaatgattcttcccagagaaccatgaagtatctttgcactactcagttgcgctgaccagcaggaactccccttcacaaactaggtcaccaccaacataagcttttccttccatctttgcgagtccaaacctcttctgatactttgtcagtgtcatcctcatgatcaatgtatccccagcaatcactggcttcctgaacctaactttgtcaatcccggcaaaaaagaagttgtctcgagatccaccaacttcaggttgcagcatcaccagacccccaacctgggccatagcctgtggataaaggtacaaatacaatgcaggcaactataagtatatctgctggtttgagtaatctaatagaatattctgattcagactaaattacacagtggacaacgatcataaatctaatggcgtagcctttatgaaagtttacactgctgaacctagc

SEQ ID NO: 4777 - DNA, 6682 bp, Sorghum bicolor
aaaataaatgtaattggataaaaaactattccataaaaactattcattgggaccatgatttctatatatagtgtctataaaaattaatagatatagaagttccatataatctctatcattatgcatgttctcattcattttctctttctctatttttttatgctagccactgtttttatctttaggccctgtttagattggagatgaaaattttttggatgtcacatctgatgtgtcggaaggatgttggaagggggttttacaaactaataaaaaacaaattacatagcttatcaggaaactacaagacaaatctattaagcataattaatctatcattagcacatgtgagttactgtagcacttaaggctaatcatggagtaactaggcttaaaagattcgtctcatgtttttcattcaaactgtgtaattagtttattttttatatatatttaatattctatgcatgtgtgcaaagatttgatgggatggacgaaaaaattttaggtggggaacggccttaggtggcatccagcctattgtctgagtagaccatcatcagccgagactcgcgcattgcgtacgccctaaaacagtgtataaagaaaacatggcgtaagacaaagaaaagttgtgttggcacaatccagccccgagtcaactgacgtgacgtggcggcatccatggcggttgttgtcagttctctttcctgacgtctcaggacgagaagcgcgctcctgggggcactcgtcgctgtcgagtcagggagacggagcggccagaggcagcggcggccggcgtggtttcggtttcttggctggcccgagttcgatttctcacctggtttccagggatcacaactctgattcgattgttctcgacctttttttttttctttcctattattggattggattaggaaaggtggttctactacaggtacagactctgcaggcgccgtcgctgtcccctcgctcactctccgtctcctccctctctgttggagtgcctgcccgccggcggacgccgccttctaaattctaattgccgcgttgggtggccgcggtgtggcgccggggcgtctcctgctgtgccgcagcgaatcgtcgcggcatccctcttcggaaggcttgcgcggcgccgtcaggtgtcgggcggggccagggcagctggccgttcgtgcgccagagttctccgctcaggtagtcaggtgagatgaggcggctggtcttctttagttccagcttacgtagatcactccttcaggattgctctgtgattccgcaaaatctggagctcggatttccccatttggtacatttcttgttacctgctgccgttagcgggcgccgatacagtttcgtcttcctcgatccgtacctagtttccatctttttgagaaaccgtcgcaacagtgctcccataatcttggagctggcgttaccttttagcccaccgtgcaagaatttacacatctcggcctcttggtttcctgcttcgaagggattaaatagtagtatttcatctgcccatggagcttgtgccgatcgatggagccatggagctgtagtgatactccgtactggttaattggatacgagttcctagttcttctctggaaactttaagtgcttctttattggtctttatattgaactaattattaattgcagggtagtagtatgtagtgcctgcatttctttactattgaacaccttttccatgtcattttcttgattactactcgcaccttttatgatggtagattccatgtgtcttgctcccaccccatttatttaacttgcttaattacttttgagattccttgtttgtgcacatgattgatgcttctttggtcacacggccagtaatatgctactcttaggaggtgtaccctgtatctttctttaatggaaccttggtctgctgcatttgtaagctcatagcttccttgtggtgcctgcctagaaagtggaaaaaataagatacgaggtggaagatgagatcagtcgttcggtcgcttcgacagcgtcatcgtttcacccagcatcatgcagagaggcagtcaccagccaccagattgatcaggcagcagaatgctttaatcatgtgcagttcgacaactcgttcactgagcatgttatgccgtaatagtgaaactagcagatttgcaagccctgccgtggagttgatgaagtccatgttctccactatagcggctgattcgatcaaaggttcacttctcatttctctttatgtgtggtgcctttctatcttttatttttggggccttgggggccatttgaatcaacttatttgctttcttcaatttttctgtagatattagaggaggtggtccgatggtggaatatgataggagaatagcatcaggagagctagtagatggtgatagctttcaggtgtcgttctggtccttgaccaaaggtttcatttcttggatagcttccatcaattctgtggtaaaaagtttccccacctctttactgactcatacaggttgatacaattcaacaattacaaaggctctataaggagttgattgagaatgaagaagattgcaagctggacagatataagtcatctgagaaatcaggacggtaagagcagttttagtgcactgaggtgaaatattttgtatttactgcattatcttaaccttagtctttgatattgaaggagtcgatggctatggtcccgcctcattactcagccttctacctatgctccagttaaggggctttacctctatggtggtgtcggtacagggaaaacgatgcttatggacctgttctatgaacagctgtaagtccatcagttctagccttctaggataagagcaaccagtttttatcttggcacattgacaatttttatctatgaagaactttaggaatttagctgtatggtaattgtagttttacctgtaatgtaattccatgccactggtgtactacatacacaaaattagagcaagtaccctatatttgaggattctcagtgctaaactttgatttttatctgcttaggagaaacatgttagataattggtctatagccaaaaagtcgttcgtacagatatgtatcaaatatgtttgttcacatataaactataccttgatttatttcattataggttgcgcaagccatattgaagaaaaggcttgaaatcagaaatagttcaccatgagttgcattcttaggcactctatatagtgatgactaggaataacctattgcagtttgttggttaaaagcttttttagaacctaagtgcaaaagtagttaagaaattggcatgtattcaatgtgattatacgtcttagtcactatgataatgactgaatcattaatagaatatttttaggctttctgatgttgggattgatcgtgaagttcatagatcttccctgattatatcccagcacatgctgtagaacatatcatgaaatttacgcgatgctggggctattccaatttatggactcccaggataaatgacttagatgaaagataagcaaatagacaaaatttgtgcatgatgcctttgcagttctctaatttttagatggaatctgtagtgcctgtggccaagagatatcctgtcatatttctcttgttgatggataaactagacggaaagaatgaaatactggcatatctttcttgtcattttatacattcagcaagatagttttgttccaaataatctggaaacgacagagtttacatacaaatctcatggctttttacaataatatttagacaagtacttgcacacattcttcactttagataactgatattattgtgtcttggcaggccatctaactggagaaaaaaacgtattcactttcatgatttcatgttgaacgtacatagtcatcttcaggtaatttgtttatatgtgcaaactgcctcataagtgccatgctccaagcttcaggaagatatgataatcattgtcatgacacttgtctatatgcagatgcataaaggtgtttcagatccccttgatgttgtagcagctgagatttcagatgaggccatcatattatgtcttgatgagtttatggtacacttctctgaggttatatattccaacaatgtccagtatatatgtttataacaagcccaactatactgcacaggtaactgatgttgctgatgctatgattctgaaccggctgtttagacaattgttcagcaaaggcgttgtatgtggctactattttcttccattttcttatggggactaattactgaggttatctatacaatacaccaacttttgacatggatttatttgcatgtcttgtgctcagattcttgtttcgacttctaaccgcgctccagataagctttatgaaggtggcttacagcgggaccttttcttgccattcattgataccttgaaagtatgagtggtttcacatttatcaatttctctgcattgtcaatcgaagtttaatatgctagtacctagtgtggtggtgtttacttttgtggaccattgcaggaaaggtgcatcgcgcaccccattggatctgcagtggactatcgccaaatgggttctgtatgttaccaacttctgcaagctactagtagtcctttggtttcttcccccttcccttctctagctatctaatatctttgaactgatatctgagcaggctgagcaaggtttctatttcgtcggaaaacattacaatacacttctgaaacagaggctccagtctttaattggagatgacgaacccagcccacaaactgttgaagtaattatgggaaggaaattaccggtatggacgcattgtagaagcattcgaaagcagcccactaaaacgcattattttttatatattacttaaacatgactttgcaggttccccttggagcaaatggttgtgcgtattttccttttgaagacctttgtgataaacctttaggcgcagcagattattttggactttttagtaagcatattgctgcaatgtaatttctagtatttggattacaaaatttactcttgacataacctaactgataacccaaacattgctgtgcagaaaaatttcacaccctggcacttgatggtgttccaaagtttgggtctagtaacagaacatcagcttatcggttcgtcacactgattgatgtatgatccttgttatgtctcattttattatgtttaagtttgtctcagcctcaatatgagcaggcaatgttttgtttttctatatttcaattttcaactgatgacacctcaaaactaacccattcagttttggtatataaggaggtttctgattacaggcagtagtccataatacttcaaaattatacttgaatataaacaacaaagatgcatttcccctctccaccaatagattttgcatattgcagcctacatgttcttatcttcaaataatgaatgattttttaggttatgtacgagaacaaagcaaggttgttatgtacagctgaggctggaccaatagatctgtttgagaatatcgtgactgttgctgaagcacagaaggtttcaccaagatcttcgcgctcacagaaaagtgacaatcctgacctgtgtgtggacaatgagctaggatttgccaaggatcgtacgattagcaggtactggaaatgtgtgtttgctaatgtatatagatttcagatcagtgctccgcctgccatgtcgaatcacagttcacaaatcacaatcaaccctttaagctcgtatttaactgatgccttctgttctgctttgtgcttttacaggttgacagagatcaacagtagagaatatttggaggacttcgaaatgagattgcggcaacagcagcagctgtccttgcaaggtctggataatggtggccatgttgttctagcataataagctgaaggcttctgcgcctcatatttgaaattcttgtagtcgccccacctggcttacataggcaactgagaagcgaagcttttccaacagtgatgcatgtaaatatgaaataaagctatgtgagggcatttttgcttacaggtggaggtggctgatccataaaatggctcaaaatatatcgtatgacatgtttctaaactttcagataggcctaagctcgaaaatagtgggaatttaccatattaaccaaataatgcgctaaatgctttcactgaattttctgaatgaaaaaggcaacaattcctcatgttagctttactgacatgcttgacgtagcagggaagctctggtcattattgtcgtgtcaggtctggagctgccttgttcgtttgacttaggccctgtttagtttcccacccaaaaatttttcatccatcccatcgaatctttggacatatacatgaaacattaaatatagataaaaaataaactaattacatagtttagttgagaatcgcgagacgaatcttttaagcctagttactctatgattagccttaagtgctacagtaacccacatatgctaatgatagattaattatacttaataaatttgtcttgcagtttcctgacgagctatgtaatttgtttttttattagtttctaaaaatccctcccgacatccttccgacacatccgatgtgacacgcaaaaaattttcgttcctaatctaaacaggcccttattaaccgacgaacctgcca

SEQ ID NO: 4778 - DNA, 3607 bp, Sorghum bicolor
ggatcgcttctccaaatacgcccacttcatcgcgctgagtcatccctacaccgccacgaccgtcgctcacgccttcttcgacggcatcgtccgccttcacgggtttcccctctccattgtcagcgaccgggatcccgtgtttacaggtcgggtgtggcgtgatctcttccagatggccggcgtcaagttacgcatgagtaccgcctttcacccgcagacggacggccagtcggaggtggtcaacaaggtgattgccatgtacttacgttgtgtaacaggtgatcatccccgggcatgggtggattggctctcatgggcggagtattgctacaacacgtccttccacaccgcccttcgcgccacgccattcgaggttgtctacggccgctccccgccgcctctcctgccctatacaccgggcacggctcgtacagaggccgcggatgctcttcttcgctcccgggacgaggtcctggcggaggtacgccagcgtctgctccaggcgcagcagctgtccaagaaatactacgatgcaggccaccgcgacgtcgagttccaggtgggggactgggtttggttgcggctgctcaaccgcacaacccagtctctggtgcccggcgccaaagggaagctcggcccccggtatgctgggccattctgcatcttggagcgcgtgggcaacgtcgcctatcgtcttcaacttccggagggcgcgcgtcttcacgatgtctttcatgtgggcttgctcaagcgccaccgtggagaccccccatctgccccaggagctcttgggccgactttagacggccggttggctccagctccagccaaggcgctccgtgcccaacaacgccgcggctcgtggcaggtgcttattcagtggcgaggctttcctgaagaggatgcgacatgggagctggtcgacgagttcaagaccttctaccccgacttccagctcgaggacgagctgtttgcgcaggcggggagagatgttatgaccggcatccaataccagcgccgcaggcccaatggtggctaaggggtgctggcggctgctggggtcaaggcccatatttattatatttattagagataaattagattaattttcatattatattccagagacctatatatatattgtaagaactattcagaggggattaagcagaaacatattattgtttccggcttcgagccgggagaaaccctagccgcctttgccctaactgctccagccagcagaacggcgcccacgcgccgttgccgaggtctcaggcctcgccctccaatcttccacccctacaacctacgcagcaactccggtagggctcctagtcctatcagatgccttctgaaatagggtccaacccaaagaataaaattatgttctttatatgttttattacagtttatggaacactgaacctgaagccatacactttattgaatcagttataattatatatgtggagcgacagtgccatatgaatgtttttaaggaaaagtgtcatattgtgctgcacggcctcccttgaacgttgccatatactataaaaacaccttattcatggtaatcgtgtgcctcttgtttttatttgttgaaaatagttcctctagagctatggatagacccaggtcccattttgatgcaaaaatgcaatcctccatatactttttaccatcactaatactgcatatggtagttttagataattagataatggtgactaatatctggcctctgcaccaactagagatctacatagccctttattctttttacaattgtgcacatcaggaatttgaacaccaaaaattgctttcacctgtatatggtagtgataagttgtatgttaaaaacatgacttgatgcctcttctgttaatagtgatacatttgtgtatctctttcacagatatatgaaggctcaaagtaaaggtgttggattaaataagttagcctgcaagaggagaaaactacctcaaacagccctggatatgtggaaattcagcaggaccagcagaaatggcgccaacttattgcttgaacccttactgcacggtaagctagtatgctcttggatttcaaaggtttactctgtcttcacttcaaaaattataccctgaatttactcctattcagggatgtgtactgacctacatgtaacatacgagagaaactttccctgtgttagtgaccctgatgctgagtctgcctcttgtgaacccatgatgattggttatggtggtagtcaggatgctcctgctaaaatacagctcaccccaacgtctcagggaaataaagatacactgcctgaagatgatttgaccctaaaatctccaagaaattcagatgcacagcgtgaacctcaacacacccccaagtcaccaggagttcctgagttccctctgttctccacagtagatatgccatgtccaataagggaagatgattctcctttcaaaacagtccgtcaaactccacagtctgggtttggaggaactggtgtccctgaagtaccttctgtcggaatacctggacaaagtactcctgactctgatcgtatggtgtccttgtttccagtcagtgatgattatgatgatcagccagagattccagggctcataagtactcccggtgggatatctagtgcaggtactggaaccaacggattaggaagcatgtctgctaggacaaggtaatggtatctgtttgagctgatcctatcgttcttattcatgttcaagttgtgacttttttatatggcactctagggctgttgcactgttcttcagagaccgtgtgccatcaaccccgcctgaagagcaacctggcaaattcagtttgagtagaatcttggaaaggaaaataagaaagcaagcttcatggatgttctttgagacaatggtaatagttgcttctggtgttctttcttggcatacaattgctgtatttaccctttcaggatcaggtacttgtcttgattttggtgcgcgtgttttctacaggttctgacgagttgtggctacatcgatgtccaacaaggagaaccgtatggtgatattgaaatctcaattagacccttgctcgcagcagctaaataacattaactaagtcaattcagaatcacagcagacggacctctcatttcatctgctcgtagaaagactggtaagatgtgctgtggcctgtgggtacccgaccaatggatgtatgatgagtagccgatgaacctactaattttgttgtcatctgtgttcgtacgaggccgcagatggcatttcgtgatgtttagcatccatccggaatgacaagctccgtcactgtttcagttcagatttgagatgctttttctcaacctgtgctattgtcaacactcaacaagccatgtgatgaatggatcaaatagacataagaaactcattctagggagtacctgtgcaaatagcgcggtacagtggcggacctaggatgactagggccaaatttcggtagggaaacacggatagttacagcatagacattcttaaggaaagtttgtaaatatagtatggtacagtaacagacaatataatacatgattctcataaaaataacatgaaac

SEQ ID NO: 4779 - DNA, 7233 bp, Sorghum bicolor
tcttggagagtcaaaatatctcaaatttgatcaatttatgagaccaactaagtattattatattcttcattagttatattttcatagtaatatatatttgatattataaatctttttattttttctataatgttagtcaaattttagatgctttgactctctaatattcttagaatggcttataaattgtgatgaagtattatatatttgcacatggaaccttgtcctactccttattctttctcatatccttccagctctaaattggcatacacgttgtgccatttgatcggttttcagtatttgtttgtttttttttcgaattacaaagtagaacacacgcacactctatgcacataagcctcactcttagcgcatcctcaacaaagacattcctagcttttttttacaattacacaatacaacacatatgtccaaacatgcacgcacacttatctctataaacatagatatgctaaccttacctccatgaatacctctgaatgacaccttctgacttggcagaacttgagattcataaagtcatcactgacaccttattgccgatgggaacgtcgcctgccactgaaagcatagctccaataaattatagaatgaatctacaaaaatacgagcattcgtaccaaacagtcgtgaacctagagcgaattataggagggggtacacttagcttgtgggtgcatagacatcttctatgggggtgcgtatatgatgaaattttagacctaatcattgtttttataaattttagggggtgcatttgcaccccctaatcagcacgtagcttcaccccttgtaccaaatcgagaacttccaccacaaagaaccaaactaactcatctatgatctagctattttgtttatatccaatagagagcacataaaaaaatttagtcgctggcgatgagttcgtggcctagcgcgcacacttcctagtaatttttctttctctaaggccttgtttagttccgaaaaaaattcagatttcgctactatagcaattttgtttttatttgacaaatattgtccaatcatgaactaactaggatcaaaagattcgtctcgcgatttacagacaaactgtgtaattagttttattttcatatatatttaatgcttcatgcatgtgccgcaagattcgatgtgacgaggaatcttgaaaactttttatattttggggtgaattaaacaaggcgtgactcactcttcggtcttcgcgtgtgttgttatgctggtaacttttgtatttgtttattgtcacctacccaggcatttgattatgcttgttgaggatgtccctagctataagcattttgaagaatgaaactgataaaattcttaagatttgcatggtgccgttaaaatctagaatagaaccttactactaaggctcttgattgagtgcctatttagtttctcttactaaattttagtcactacctattgtaggtattcttgaatgactagtgaggctaaactattttacttttttttagtcagtgtttttgaaaaatttagttactaaaatgattaaagtttagctagctgaaatttagcaagaaaccaaacaggccttgagttgagataggaagttattactgaattgattggaagtgaaatttgaaaaatcttagaaatactcttaaataaaataatatcggccagcaattcacatctcgtaacggtgtggcccgcctcaggcaaggcccaagtccaagggataccaagttccacgtccatcccgccacgatgcccgaaaaccgcgcgccaaaagccgccttcccgcctcctcatcctttggaatttggaaactgcccttcccggcttcgcctcaaaaccttttcccccacaaaacaaattcgcaatcccattcccatcccgtatcctcccgtcgtcgcctcgccctccaccgcgccaccgccgccgccgccacttgaaccccagcgcctatcggtgagccgcacaggggattgccaaggatgttctactcgcacacgatcctcgcgcggaagagcccgctgggcaccgtgtggatcgccgcgcacctcgagcgcaagatcaagaagccgcagattgacggcatcgacatccccacctacgcaggtccgtcggctccgcccctcgctcgcccaaaaacgcgtccccccccccccccccccctcccttccctctgtcgtccgccggtagaaaaaaagcaggatctttttctcctcccatttgtttctttggcgagggattcttggaagcatctgcggaggcttaaaggttcggtgctccctgtggcctttggcgcaaatgcagtggaatcatgagacgcaaggtcatttgtgcgaggatttggtccccaaccggcattccgcaagttaaacggagaaggggcttctttggcttttgtgtccccatccggcattctgcaagttaaacggagaaggggcttctttgggttttggctaagaattcttgtgtgtagatgatattcccaattacggttcgctgccggtattttagttagtgattacgaatttcacgtaaagaacggttcttgtcacagtttatgcagaaacgcaaaagaaaaaagaagtactttagtcatgtcctcaggaagttggggcatagcctgttgcaattgtttagcataggctgtttgcgcagaagatatggcttatttatggccgaagatatgatcttttgagccaggcatgtacttgtgagattatttggcaaactaatgtgtcttttgcctcatttttttttcatttagttggaccgaagacaattagcaaaatccttgtgatttggtgagccctaggttgggtgtggggaagagtggaagttactgagtgatttgtctgttgtgcttgctgcaagttagcagccctcatttcactctgttcttttggatttattctataataatgaccatctcctgttataatttccttagaaaagatgtttcttagtatgttctgtatcgatatgtaccttcttgattctaccctacattcagaaattttgctatcatttccctgtgatttattctgtaaatccttccctagtcttctaatgaataccgtttgccttttcagaaagtataatgttccctgaagttccaattgctctaagattatcagggcatcttcttctaggtctagttcgcatttattcatggaaggtgcaatacctgtttcaagattgcaatcgaatgctaacttcaataagaactgcattcgcttctgtccaagtcgatcttccaattgatgcagaccgtgctccatttgagtccattacactaccaccaacactaaatcttgacgacttaaacttggacgatgcaatttctctgatggagtaagaactgatgttcttcatcattgttttatgtaatgtaatgcaaatgctacctatgtaatagttattttttgttaaactctctgcagtacaccagataatcatcagaagactcgtgatcagattaccttggctggtaaggaaagctcactatagtgaatacttgtttattcttttttgaagcaatcagctgtgtcgaacccctaacttagtttttattttgattgataaacaatgttcaaccatgacttttacgtttaactatctgattggttttgcagaaggagaatatgtgatgatagaacttgatgaggtattcatactatcctactgttttttttcctttccttttttcttattcattaatattttacttcactgcgcaggatgccagagtagagcaatcaggtcctgatccatcattgcacatggggcctacagcaattttggatgagtatgtctcttaatttgttttctctcttttttacttgtggattgtggattcatgtctcctttgcaatcatgttcaggacgtcccctccatttcatgatggttttggagctaatatcaatcctaatgaaggagctcccgtagatcctcccataggcaattcaccagtaaattccaacatagcaaatcagacagatggagcactagatccacccgaaaaaatgcgtgaagctccacatgagtctcctcacctgaagttaacagagtcaatccttcgaaatgatgaccccatggatttggaccctgattcttcaccttttgtgcaaaacaaggctatcacccctccagttatggacgaaacaacttctgctggtcgacaagtacatgggagatccatttccaatttacagacaccaagcacatttgatgcttttgtagatgatgggcctctaaattttggttagtatttgtcctgacacattatgtacctaaaggatttgtttgtttgtccaactcctcttgatacagatttcgttttacttctctgtttgtagacattccactacctgaatttgggcttcagccatctccacctccagtacaagaaaatgaggataatagaaggccaaaagcacaagttaacactagaaagaggaagagagggatgaaatttgattacaaaattgtgctctccaatgagtaagttttaattgagcctcaattttggcatggaagattcttacatgatttgagcaatatttcagtgtaataacttggaacaatgattaatgtgatttctattttgagagaaaacaattgcttgcagtttgaattgtttgttggtcaaaagatgtacctttgttctttgaaagtctgcatgctaatatccaatgctggccttcttaaggcaggggcctgagtccccatagtcattgatgttcaatgcattgcatacatgatacttcaaacttcatgatacacagtgctacctttgagatgcagtcaagtcaaagaacaaacagtgatcaggcttctatttttatacatttacatctttatgatatgatttatgaaacaaagttctatttttcatgttgttttgtggtctacggaacacgtagttgttggcactattctacacctgcatgtagggtagctattttggggtgcacaaaataatgttcaaggtttattatagagaagtgtattcgtacatgtagtcacacacttattgcattggctctgcttggttcgttagcatatatggaactgtatcactgtatggatgctgttttttttttttggggggggggggggggattctgtataggttctacactgtctccatcagcaatattttaaacagcttattcactacaactcaataccatcatttccatttggtttcacatgttcatttagaaattgggttactcttactggtcaacattttaggacccgttccattacaaaaatataccatccatatacttttaccatctaaaatgatgcatttggtatgataaattcagtatgctgttatttttaattgagctactctttggtacctgtggtaattccatcttctcttgcgcagctgtatgagcaagcaaattcatggtgctgaactagatgagttgatctgcaagaggagaaaactaccccaaacaagccttgatacgtggagattcagcaggactaacaggaagggcagcttcttgcttgaacctctgctgcacggtaagcttatatgctctttgattttcttggaggtgtagtttgttcaatctcaagaaaccatttcataccctgaattgttcctttttcagggatgtgcagtaatcttcaagaaacctatgagagaaacttcccgtgtatcaatggccttgatgctgagcgtaccaatgtggctggtgtagcaaatgattgtcaggatgcaccacctgaacggcagctaagcccaaatgttcctcgaactgcggaactgccttaccatgagcccgccccagtgtctccgggcaatgcagcggcacagcctgaacctttgccaactctgaagtcatcaggagctgcaggtgcagcaccagatgatgatatgttgcctgagttgccccgattctcaccaatagatgtgccatctccaataagagaaaatgacactccttacaaaactcccggtggaactccaccatcttggcttggtggaactgctgtttctgaaataccatcaacggatgagaggcttggaggaactgcagtttctgaaataccatcaactgatgggaagtattcattacctggacaaagtacccgtgactctgaaaatctgtccttcctctttccaatcaatgaagatgatgatcaaccagagatccctggtctcatgagtacacctggaggggtatctagtgcaggtaccagaaccaccggattagcaagcatgtctactaggacaaggtaaagagatgtttgaactgatcgtaccattcttatttgagtagaagttgtaacattttgattatggtattgtagggctgttgcactgttcttcaaggatcatgtgccttcaccctcatcagatgagcagcctggaaaattcagtttgaacaaaattttggaagggaaaacaagaaaacaagctgcaaggatgttctttgagacaacggtaacataactgacatgcagtttctatatttatgggtgaatggcctgattgcaatttttttttctatatttacgttgcagctgcaggtagtctcttttgttatttggaactttatttactttgaaaacctatttgttttcctataggttctgaagagttacgactacattgatgtccaacaagcggaagagccatttggagatattgaaatttcagttaaaccctcactctccgctgccaaactttgacaaagttatttagagtcgtcatctacaagacctcttgttcatctgcgaagaagatagaattcacaagggctgcatgaatattgttttagggtgatgctggagaaggggtcaaatggacataaacttctgttaggatatgttggttagggactaagttagcttagtgaatatcagtgcaagtactaaatagtgtgacatcttatacatatttctctttcattctatgtctgtagctgtttccttcggtgtattaagaagattttcatgatattctgcggtatattatgccctattctaattggagccacctgattgtgtggatttgtaagtcttattaaaaactatgaaatttcatcaaactacactcagtagttaggtggacatagcttatacaacagataactaggcatcatccgatatttcactcatcccctctccacatcctcctccagtcctccctctctatacatagttgcagtcctcgtcggcgaagcctagcc

SEQ ID NO: 4780 - DNA, 21376 bp, Sorghum bicolor
tgatgtatcatttctcctccctagcagtctgtatcacttcattgattgatgagaaatgtataaagtagttctgtaaatagattgttatatcatatatggtgctccagactggagtattgattatggagatcttgataggattctcgatgagatactaggaagcaatctctattgcattccatgtcactcactcccttgatattgggcatgctcttagtagcatagcaaccttctgaatgacactgaaagcactgaagcttcaactcctttctgatgcttggtgttgaataaataaaatggtagaacttgtacaccattgttgcaaagttgcctttctttgaaatcattttctttttcttgcctatgattactggagtactcattcacacttattagatagtaattgatagatttttccccaatattattgccttttttctgctgtttcctgtccttctttaaccattagaggtctagtgtaggttatgatttgatctgttctcacttctattttctattctcaccttttgttatcagtggagcaagtggagccaacagttgtggagattgtggagagatctttggaattttgtctattacatctagaaaaatcatcgtatgtgggtgacgactttggcttactggtaagttctattggcttggttttaaatagttggggctatcattctgagtttgagtatgcatttggcaccctggtggctggtgccctgcttatccacaccgttggattgaattctgaaaagctgctcaaacagacactaacaacagcagacagctgggcatccaagaaaaaaattgaaatatgtactcgtataacttctgtgaatcaaaatgatgtgcttatgtttttatatggggttcattcttctatgttgaactactcatggtatagttccataattttcagttgcacaccatggtacctgcgttccatatacatatagcatgatggctataaggcacatatgattttgtaaggcccaataatatggaaaccataacgtggagctttgtaatacattaattaaagcacaatgtgatctggaatacaaagttatattacaaaaaaaccaggtatacaccaatctgcaacacaacatcatctgcttctacacagaaatccaattacaaccagttctatctgctgtaaatattctttttttactatgccacaattaaccagtttttcgttaaagttgactgggcaattgcatgcaacggctgagatagagagggcgccagcccccttgggcaccacaccatttttgtctgagtttccaaccttcaaaatgtacaagatgtttatcttaagaataatttgatgggctgctaccattttgtttccatctttgttgagccgcttagaagtctgttgcattatttatttcttaacaattatgtcacatgtttgtagaatgaggttgcctgttttgtggaatccgtactgcttaatggtactctcaacaaggcatcctcattggaacccagcattataaatgacatcattgcacagtggacacctgtgcaagctgaaactgagcgcatgagcccacaagagaaatatttctgctatctaaaaggtaaactcctggggtctttcccatgcgaagggaatcaatgttttgtacagcttttcatttgatgagttctcacttatctttaattcttcgttaccaggcttcaactgctcgaaaagtgaagatgaccttaagcggttttgtttggccttattaccagaatacttgcagcgagattatgttactttagagaatacccaatcatgcagtgcagtgtctccaaatgccatggtgccattagcgcagcattttgctgttgctcacttacgttgtatgccgcgccttcttacactggtgcataagctttgccagtttcctgctttggaaatggttgaagatataaacattgacttgaggttgtctttcacccaaagaattttgaagttagtctgtggtctcactatggagttcccccctgatgcctctgatgccatgttgttatcctcggtagcaagatgtgctgatagtcttccagccttgttcagactgaagttcaagttctctaatcatgacaaagtcttttctgtagatggtgttggcactatcttgctgcagatactggaagaatttctacaggtaatgcaaaacattagtgtttgcaacagtaatatctgttgtacagttaaagtatgcattctttcatccatgctggaaatcttcaatcctaatatatggagatatgaaaaatgtggtacttgcttggtgcctcctttagcttactctcctcatgttgttcaatttgtgctgaaactttttaaagacgccaaacgatggacaagtcgtgttgacaaggacaaaccagacaaagatgtcatggattattcatgcaacaaagatacaagtgacctgtcttgtcatatccgttcggaggaggtaccattgcttaagaaatatacatgtgaggagtatctatggcttattttcccttcaggacatcaatggttgagtggtttagtacatctcacttttttcctccatgaagaaggactgaaatcattcacaagtgagaagcaacatctgagttgcccaaaacaagctgttgtgtcagaattggagtctgtggcaagtcatgaggaagatgcactttttgggaatctatttgctgaagtacgtcctgcaggattaaatgaaagtcttgaacagtcaacatctcttgggagcagtccatcaaacagccagcaggggtttattcagttagctgctgatctgatgtgctttatggaaacatccatcttgtctccagagtggtccagtgctatatatatggatgcttgcagaaaattcagtacctgtcatctagatcaacttctttcaatacttaagtgccaagcttgcttccctgatgaaagcagcactggaaatatgatgtcttcttctgaaaataaattaccacacattaatgcagcttgttttgaacttctacaaacgtttcttgtttgtgatgaatgtcctgcttctttaagggaatatcttgtggaaaaagtgtttaatgttgaaagtgggaagtatacctataaccactatacacttgctctcgttgtgcatgctatgagttacacatcaaactcaggttttagtctgggaagaaagatttttgttcagtatgttacttatcttttggagaaggcaaatgatacatcatccagctcattaaatattagtgatttctgtgcaagtctcccgtgtccttttcatctggaaattgttttggcagcattccatttaaccacagagtcagaaaaggctgatttggtcaaaattgtactctcttccctagaaaaaatgaaacagcctgtgtctggtgtaactgtggctgggctgacaagatgggcattgctcctatcaaggcttctgcttgtcctgcgtcatatgttgctgtaccccttcacacacccatcatggttatttacaaggttaagatccagattgtgggatatccagttgaaggaaggccagtcacgttccacgaataactgcttaccatcccttgccactgttattgttgaggaattgtttggtggttcagtcaaaaagagttctgtagctagtaacttgctccctcagttaattgatgttactccagttcatgccgagttctattttgataaagctgctgttgaaactttgggcttgaacttggcttatttgggtgcaactatgtcacaaatccttggttcttggagtggtaggagccctgaagttgctgatgatctcattgtggaaagatatatatttttgatttgctggagtactctctctggtatatgctgtcaaggcaacgattctgttccgaataattattacctggagcctgaccttgccgatgtcaatgccttcctaacatttgctcttagtatcagcagtggtgcttcatctcatgttggtgttgatctacctgcgttaatatttcaactcctaaagttattgcactctgatattcttggttcaagtacactggagaattgggatttccccaggaaaggagcatggatttcctttattctctctcacattaattctgttcttcggatgcagcagacaggtggagaatctgaggtggattcacacagaatacatgaggttcatggtgaggacctatttacttgtgggaagaatttgtcaatctacataactgagaacagtggacactgtttggatatcctatcttctcttctggagatctatcttcgtacttttaagaaagcttatctgtcatttcttgaaaggtcttccttggatacttgttatccttccctgctgctcaagcattctgtctttgacaaatccaagcaccatcttctttttgagaaatctggttcatatttggaaatgctggaatccatatgtaaggtttcatcaaggatagatagagtcaccacaaagctaggtgaagggcagagaaaatattatttccagaagtgcttgttacatggatttccattggattacatttctagcaacagtgctctcctttcttgcattttggtgataaatgagatcatgcaaacctttactggatgtataaaggttgcacaaccaggggacagagaccaagttgatgagggtgctatttccaaattgcttggtatggtgatggaagttagatcagatcatatatttggacctgttcatggagactgtgataatatatttatgagtctaattaacaacaggaatgatcttgcgagatacagtgaattgtttgtcctgaagcagctagaaggtttcctggctgacataaacttgaatggtagcatggatagcggggtgaaagagattttggtttctacagttgttgatgtagtggaggaccttcaatctaaatcagaggtgtttaaatttttccttggtgatgcagaaggagctcctgaaggagcaagccgtatttttgcatctgggcgtgctgatatgtcagtctttattgatgttttggattgcaaatctgagcaggttaatttgaagattatccacttattgactgatatattaagcaatggtttttgtcctggtcttaaagagaagttgcaaaacaaatttattggaatggatgtgccctgcttttcatcgtggttagaatgtataatattggggccctctgtaaaagctgaaagcacaattgttacagttaatcctgcaattagagaactgacagtggatttctttaagcatctcattggtcctccatatgaaacattgaacaaagaatttcagcatcaccttttcaactctttgctaccattacttgatcaagcatttttgtcacatgacctccagattgctagagcatatttccattttcttgttcaactatcaagtgaggaatcacacttcaagcacttgtttgaaaacactctgatgctgatggagacaatggttgaggatgagggtaaactgcaaactttgaagtttctgttttcttttgtggaggcagtgttcggtgatactggactaagtagaagtgagcttaagagactttcatcaaaaactcctggaagcagttttgggtcaggatctctcatcctaaaagagttgaaaaattcagaaaatcttgtcattcgcacgaatcaagtaagtaatactgctgttgattgtgatgctagctctggtgaggaagacgaagatgatggtacatctgatggggaattaggcagcattgatagagatgacgaagacgatggaaacagtgataaagctctagcgtcaaaagtgtgcacatttacatccagtggcagtaatttcatggaacagcattggtacttctgctatacatgtgacttaacagtttccaaaggctgctgttcagtctgtgccaaggtgtgtcatcgagggcatcgtgttgtttactccagatcaagccgtttcttctgcgactgtggggctggaggtgtgagaggtagcagctgtcagtgtctgaaacctcggaaattcactggcacctctactgtaccaccgcctgctgctagcagcttccaccccatattgccatatcacgaggatgtggagcaggttctggatagtggttctgattttgaagatgacatttctactgatgctgataataccatgaagctatctgtgccaaatgaattcagcaatgggcttcctttatttcttaaaaatcaggatattgaggtaagggtgcttgaaatctgcaaaaaattgctgcctactatactcagccaaagggaattgaatcttttgaaagacaggaaagttttgttaggaggtgatgtgctggtgtcacattcctttgatttcttccaactaaagaaagtatttaaaagtggatcactggacctgaagataaaagctgattatccaaattctagggagctaaagtcacatcttgctaatggttctcttgctaaattattgctcagtatcagcactcgaggtaagcttgctgttggagaaggcgataaagttgctatatttgacgtgggacaaatcattggacagcctactgcagtacctattactgcagacaaaaccaatgtgaagcccctttccaggaatattgttcgctttgaaattgtccatttagtttacaatccattggtggaccattaccttgctgttgctggatatgaggactgccaagtactaacattaaatagtcgtggtgaagtaactgatcgccttgccatagaacttgctctggaaggagcatatattcgtcgtttggaatgggttcaaggttctcaggtacagctcatggtagtaacaaacctgtttgtgaagatatatgatctctcacaggataatattagccccatgcattattttactgtagctgatgatgtgatagttgatgcaagcctcgtcccctcctcaatggggaaattggtgctacttgttctatctgaagggggtcttttatataggctgaatattacattggtgggcgatgttggtgccaagatattgactgaaacagtcttggttgaagatgtcatatccatgcataaagggttgtcattgtacttctcatcaacctacaggcttctttttgtatctcatcaagatggcacaaccttcatggggcgcttgaatgctgattcttcatcaataacggaattatcatatataagtgaggatcatgatggtaaatccaagccagccgggctttactgctggagagagctagtatctggcagtggtatccttacctgcctatcgaaatttaaatcaaatgctcctcttgtggtgtcgttgggtcctcatgagttggttgcacaaaacatgaggcacagtactggtgcaaattcctcagtggttggtgttgctgcctataagcctttatccaaagataaaacacattgtcttcttttgtatgatgatggaagccttcatatttactctcatacacctagtggaggtgatggttcgacgaaccttacaacagagcaaacaaagaaactgggcagcagtatactcagcagtagagcttacactggcacaaaaccagaatttccacttgatttctttgagaagacaacttgccttacatgtgatgttaagtttaatagtgaaacaaccaagagtggtgattctgaaagcattaaacaacgattgacatcagatgatgggtatttagagagtctgacacctgctggcttcaaggtaggatgttctggtttgtttatactgtgattttgttttatgtactggcctaaaccaattgatgtagaataacatttggcactccattttttgtttgtaggtggttatttcgaatcctaaccctgatatagtcatggttggttgccggatccatgtgggcaacacatctgctagcagcattccttctgagatcacaatttttcatagagtcattaagcttgatgaaggcatgagatcatggtatgatataccatttactactgctgaatcacttctggcggacgaagagttcacaattactgttggtcaaacgttcgatggttcatctatacctaggatagattgtattgaaatttatggtcgagccaaagatgaatttggatggaaagaaaaaatggacgctgcgcttgatatggaagcactgggtggtaatgctactggtggtagatcaggaaagagaccccaaaacgtgaaggctgctcctatccaggagcaagttctggcagatgcccttaggattctctcacgcatatacctgctatgccaaccaagctgctttactgacatggttgatgtaggcatggaacttgataatatgaagtgccgatctttattggaaaccatttttcaaagtgacagggaacctctgctacattctgctgcatgtcgtgtccttcaggctgtgttcccaaagaaggacatgtactatcaagtaaatgccagtttgtctattatcttattgcccatgggcgggtccatttctccctctgttccaccatttttggtttacttatggattatgtttgtgcaggttaaggacaccatgcgtctccttggggtaataaaatcactcccagcaataacttcaagaattggagttggaggcgctgcatctagctgggtgataaaagaatttatagcccagatccatacagtttccaaagttgcattgcataggaaatcaaacctggcctcttttcttgaaactcacggtattaattgtacttctgtttgtttaaccaaatttgtattgcttgactattgcatgttgacttttagaagggatatctaactactgctgtctgcatgttgatttcaggattagatatttatattaatttttaccaatcagcataatggtataggctgcatttatgtggcccctatgtgcacataaaaatgtagtggtatttctcaatgtgtcaattatttgtcttcttttgctgtatttgtatttgcctcctttatttctgttttggagataacctgcttgcttagttaagtcttgtaagaaggttggctaaatgattctgaaggctatccttcttgtctgctggttagcatgtgtaaacatgagtacttttacagtttaaattatatgaaactgcaaagatgtcacagcaattattctgctgctgcttttgttgtttttgatgtgcaactttgtcaacttgcgttgtggactcctttattgggcaacttgactctccgacgtacatttgtatctactagtttgagcatagaaaatgtgaagcatttctaatttcaaatattttctaacataaaaatatctattataatgactatatattgtgcaggtacagaactagttgatggtcttatgcaagttttctggggtatcttagatttagacaggccagacacacagacgataaatagtcttgttgtgccctgtgtggaatttatttatagctacgctgaatgcctggctcttcattccaatgaaaatcctagagtttcagtgggacctgcagttgctctgctgaagaagctgctctttgcaccatatgaagcagtacagacttctagcaggtggttttgtcttcttttgtttataaattaattagagtaccactattaacatttgctagatttcctttggtttttgttataccattttctcagctgtgttttattgctggttttcagtttggctatctcatcccgatttctccaagtccctttccccaagcagacaatgatagctaatgatgatgctcctgaaaaccaagctaaagcaagtgcttctgttatgaattccaccagtgcaaactctcaggtcatggttgaagaagatcctgccacatcatcagtgcaatactgttgtgatggctgttccaccgttccaatacttcggcaaaggtggcactgtagcgtatgtccagattttgacctatgtgaaacttgctatgagatacttgatgcagatcgcctaccagcaccacattcaaaagatcatcgcatgtcagcaataccaattgaagttgatacatttggaggcgaaggcagtgaaatccatttctctgtcgatgagctagcggattctggtgttcttcatgctgataggagtgttcagacctccccatcatcaattcatgtatatgagtctgcagacttacctgagactattacagaccagacaactgtttcgatttctgcatcaaaacgtgccattaactccctggtacttaaccatctaattgaagagcttagaggctggatggggaccactgctggtacccgagccatacctttaatgcagttgttctacaggctttcttctgcagttggtggtcctttcatggatagttcaaagccagaaaatttggatttggagaagtttgtgaagtggcttatggatgaagtcaatgtaaataaaccgttccctgccagaacgcgatgcacttttggagaagtatcgatccttgttttcatgttcttcacacttatgttccgcaactggcatcagcctgggagtgataattctcattcaaagtcaagtgggagctctgatttggcagagaaaggtcctgctcaggttctggcatcaacaacaataactctcccgtcatccagtgctgaccaggataaaaatgagtttgcttcccagttagtccgtgcctgttctgccctcaggcagcagacatttttgaattatcttatggatattctgcagcaacttgttcatgttttcaagtcatcatccttaaatggagaagctggttcttctggttcaggctgtggatccctattgacaataagaagagagctgccagctggaaatttctctccctttttttcagattcatacgctaaatctcatccaactgatctgttcatggactactacaaattattgttggagaatactttccggcttgtatatagtatggttcgaccagagaaggagaagtctgctgagaaggatagatgctacaaggttcccaacaccaaggatctaaagttggatggatatcaagatgtgctttgcagctatattagcaatcctcatactacatttgttcggaggtatgcaaggaggctcttccttcatttatgtggcagcaagactcactactatagtgtgagggattcgtggcaatactcccatgaagttaagaaacttaataagatcataaacaagtctggaggtttccgaaatcctgtgccttatgagagaagtgttaagctcataaaatgtttgtcgactctttgtgatgtggctgcggcaaggccaaagaattggcaaaagttctgcttgaagcacatggatcttcttccatttctcatggacaatttttaccatttcagtgaagagtgtgttattcagactctcaagcttctaaatttggctttctattctggaaaagatgccaatcataatgcacaaaaaacagagaatgctgatctcgggggttctacgagaactacctcgcagtcttcagatttgaaaaagaagcggaaggctgatgattgttctgaaggttcctcagaaaaatcttgcgtggacatggaacaggctgtagagatgttcagtgacaagaaaggtgacatgttgaagcactttattgacatattcttgctagaatggaactcaacaggtgtccgtcatgaggctaaatgtgttctctttggagtgtggtaccatgcaaaaaacccacttagggaggcaatgctatcgattcttctacagaaggtgatacatcttcccatatatggacaaaacattgttgagtacactgacctcatgacctgtttacttgggaaagtgaatgacttgagtgcaaagcagaatgactctgaacttgtgaataaatgtttgacatctgaggtcataagctgcatctttgacacgctccattctcagaatgagctattggcaaatcatccaaattctcgtatatacaacacgctgagttgcttagtggagtttgatggctattacttagagagtgagccttgtgttacctgcagctgtccagatgttccgtattcaaggacgaagctcgaaaccctcaagtccgagaccaaatttactgacaacagaattataataaaatgcactggaagctttactatacagtcagttacaatgaatgtttatgatgctcgtaagtctaaatcggtgaaagtactcaacctgtattacaacaacaggcctgtgactgacttgtcagaattgaagaataattggactctctggaagcgtgctaagagctgccatcttacatttaatcagacagaattgaaggttgaatttcccattccgattacagcatgcaatttcatgattgagcttgattcattttatgagaatcttcaagcttcgtcccttgaatcactgcagtgcccacggtgtagcaggtctgtcactgataagcacggcatatgtagtaattgccatgaaaatgcatatcagtgccggcagtgtagaaatattaactatgaaaatcttgattctttcctctgcaatgagtgtggatacagcaaatatggccgttttgaattccacttcatggcaaaacccagtttttcatttgacgacatggaaaatgatgacgacatgagaaaaggattggcagcaatagagtcagaatcggaaaatgctcataggcggtaccagcaactgatgggatttaaaaagcctctcatcaaacttgtgtcaagcataggtgaacacgagatagactcgcagcagaaggatgctgttcagcagatgatggtgtccttgcctgggcccacatgcaaggtaaatcgcaagattgcacttcttggtgttctatatggtgaaaaatgcaaagcagcttttgattctgtgagcaaaagtgttcagacattgcaagggcagcgccgtgttttaatgacatatctgcaccagaaaagttctagtgataccaatgcattaccagccttttcaataccaaggtctccaaatagttgttatgggtgtagtactacatttgttacacaatgcttagagttattacaagtgctttcaaaacatgaatactgcaggaagcagcttgttagtgctggaattttatcagagttatttgaaaacaacattcatcagggccctaggacagcacgcactcttgctagggctgtgctatcttcattctctgaaagtgatgaagatgcggttcaggaattaaacaacttgattcagaagaaggtgatgtattgtcttgagcaccatcgttccatggacattgcacaatcaacacgagaagagttactgctgctatcagagacttgtgctcttgtggatgagttttgggaggcaagattacgtgtcacctttcaactgttgttctcttctattaaggttggagcaaaacatcctgcaatttcggaacatattattcttccttgtttgaggataatttctcaggcttgcacgcctccaaaatctgatggtggggacaaagagtcgggtttgggagtatctagcttgacattgcactctaagaacgatgatacaactggtaacacatctaataatcccagtgctaagattcagtcagatatatctggaaaaattcatggtggaagtcgaagaggccaggatattccacttctgagctattctgaatgggagaatggtgcatcatatttagatttcgtccggaggcagtacaaagtatcccaagcagtgaaaggatctgttcagaaggcacgtcatgattcgtataagtccgattatctggttctcaaatatggactcagatggaagcgtcgtgcatgtctggagtcaagtaagagtgacttctcaaaatttgccttgggttactgggtgtcagacttgatcttaagttcgtgttcccagtcaataagatctgagatatgcactctcataagcttgctatgcccatcaaacactcctagacaatttcagttattgaacttgctcatgtcactacttcctcgaacactctcagctggtgacagtgcagcagagtactttgagttacttgggaccatgattgattcagagtcttctcgtcttttcctaactgttcgtggttgtttgacaacgttatgttctttgataacaaaagaagtgtccaatgttgaatcacaggagagaagcctaagcattgatatatcacagggattcattctccataagcttgttgagctcctgaacaagttccttgaaattcccaatatcagaggaaggtaaaattcttgtttgtgctcctaattaagctaccaatatgcctggttacttttcgatgtccttacccttttttccctcatactacaggtttatgagtgataggttactatctgaagtgctggaagcttttctggtgatccgtgggcttgttgtgcaaaagacaaagctaataaatgactgcaatcgtcttttgaaagaccttcttgatagtttgcttgttgagagtactgaaaacaaacgtcaatttattcgtgcttgcatctctggattgcagaagcatgtgaaggaaaaaaagagacggacgtctttggtacgagcacattctattttttattattataaattatttggatattgtgcttatagtttgatgatagcaactctaaacatattatgcatactacccatttcagaatgtatggtgtattaggattcataaaagttaaatattgtaaacttgaatgtagggtgaattagaattcgtaaattgtaaaagttaaacattgtaaactttggtcatcaattagtcaaactatatgtaactttactgcacatctcgatttgtatttaacatcttttagtaagatgttggtttgtagtagatgataatgataatataattgtacaaggtattaatggttaaagtacttcttgaaaatgttagaaatgcagcagctataggatgagcagaggtgaatagagtagctggagtttaggaggcaggttctgtttgaagcaaactagctcgctttcattgcatatagtcagggacagctttactactcttactgcctaaataaaagaaccgacctacatatgttggcagctagtaatgtcggcaaggtaacacatacaagtgggtcaaagtactttaggttcattgtataggaaaagtaaacttggtacataagaaagcatcccaactactacagcatattctaactgcataaagtagataccaggcatattctagatgctaagatagaagctgggtacagctttaacagagataactaggttacttagatagaagcactaaggcttaactctcaagtaaaagaccatatactactagtactatctagataatcagtagacgaaaggattatatgtgacaaaaaactctcaaatcgtaatgcaccttataacaagaaatggagggaataatttatttattatcttgttgttttgtcttatcaaaaactctcttttgcagtttattgtggagcaactctgcaatctgatttgccctgtgaaaccagagcctgtttatctcttgatactgaacaaggcacatactcaagaggagttcatcaggggttctatgacaaagaacccatactccagtgtggatgttggccctctaatgcgggatgtgaaaaacaaaatatgtaaccagcttgatttaattggacttttggaggatgattatggtatggaattattagttggtggtagtataatctcactcgatctgagcatttcccaagtctatgagcaagtatggaggaagaaccatggtcaaactcaacattctttgtccaatgtcagcgcaataactgctgcttcatctatcagagattgcccgccaatgacagtgacctacagactgcaggttagctatggggatcaaggtttctgttttctttattttaatattttgttttattatcacctatttggtccaaaggaaccttgatgcttgtgtataagaactgtttgttagcggcgaataacctaaactagttcaatgtccactagtacttggaacttctgtgtgtcacttatttgctatattgatgtgcatccacatatactcaataagacgctgatttcttgcgggcctgcatacagatttgtcaaatcctgtcacaccttatgtttttaaaataaaattgttgtactataataaactaatctggaggagagtgtttttctttctgttacttagtatttattgtgcctgttgtgattctttgcatctttgggttaagcactttcagacaattcatgatggattcatagatgttctgactttactaacattggttcagtgtaatgttcataagacatttgtattttatgatcagggtttagatggtgaagctactgagcctatgattaaagagctggatgaggaaagggaggaatcacaagatcctgaaattgagtttgctatagcaggtgctgttagggaatgtggaggccttgagattattttgagcatgattcaggtatgcacttttaagtttatgcattgagttggttaccttaccttccttgagattattttgagcatgattcaggtatgcacttttaagtttacacattgagttggttaccttaccttcatgccttgctctccaatctgttgagcagctatccatatgaactttaaaacaaagtgaattttgtgttccagttttgttaacaaggcttgagattgaccacttttgtattaatgttcttatgtttttttggcagagcctacgtgatgatgagttcagatctaatcaagaagagttggcttctgttcttaaccttctcaagtattgttgcaaaatccgtgaaaatagatgtgccctattacgtctgggtgctttaggtttgctgcttgagacagctagacgtgcattttctgcggatgcaatggaaccagctgaaggtattctactaattgtagaaagtcttactatggaagctaatgagagtgacataagcatcgcccaaagtgtttttacaactagtattgaggccactggtgctggtgaggaggccaggaaaattgttctcatgtttttggatagaatatgtcatccttcaggtgccaaaaaatcaaacaagcagcaaaggaatgaggagatggtggcaagaatcctgccgtatttgacctatggggagccagcagctatggaagctcttattcaacattttgagccctaccttagggactggactgaatttgatcgattgcagaagcaacatgaagataatccaaaagatgataatataagccaaaaggcgtcaacacagcgatctgctgtcgaaaactttgttcgtgtatcagagtcactcaagactagttcgtgtggtgagaggctgaaggatattattctggagaagggcattacgaaagctgctgttgagcatgtgaaggaaagctttgcttctgcaggacagactggctttagaacaagtgaagaatggacagctggcttaaaactgccatctattccacccattttgtcaatgttgaaggggctggccaagggccatctgtctacacagaaatgcattgatgaagaaggcatattaccgctgctccatgctttggaaggggtgcctggtgaaaatgaaattggtgcaagagcagaaaatcttttggatacgctagccaataatgaaaataatggcgatggtttcctaggagagaagattcaagagctgcgacatgctacaagggatgagatgcgtcgccgtgctcttgagagaagagcgatgctactaaaggtaagtcttatagtttcatcagctgccatgtttctgatgttatccatcctgtttcagaagttctattctgcagatgtttctaattataataactgttaggtccatggttctacatatgcatattttaatgggcactgaccttttttcccctatatcagggaatgggaatgcgtcaagaatttgcttctgatggagttagacgtattgttgtatctcagcctacgattgaaggtttggatgatgtggaagaagaggaggatggtgtagcgtgtatggtttgtagagaagggtacaccttaagaccaacagacatgttgggagtctatgcattcagtaaacgagtgaacttaggtgcaacaagttctggtagtggccgtggggactgtgtttacaccactgttagccacttcaacatcatacactaccaatgccatcaggaagctaaacgtgctgatgctgcactgaagaatccaaaaaaggaatgggatggtgctaccttgcggaacaatgagacattgtgtaattgtatctttccattgagggggcgatctgttcctcttgggcagtacactaggtgtgttgatcagtactgggaccaattgaattcacttggacgagctgatgggagtcgtctccgtttgttgacatatgacattgtgctggtacgtaatgctaaatttttgttttaagataatgcaaaaattctaataatacatttcattgtaattcaattgctatggactgcacttcgtattatttcctagattttgctttacttcatgccctttttaaaattctcttgctgagaagaaatatagcatgccaggttctaagataatgcaggccttttttttgtccatgagaaatcaattattgcattgacaaagctttttttttttttatgaatattttgaaagttggatagcatattgcttattcttgtttcttttattatcagttccagaaatcgttgaccactcatggtattcaaatttcagcgatttctcgtcaataatcattcatcataagtgcctctatatcattagatcgtgttactaatacacagatcaaaagtagtttcaaattaaaagatgttttggtttttctagatacattcgattttactttgcatccaaacatagggtgtatttagtttgagaggctagatggggtatggtcatatggccatccatgggtttcgggatatggttatcaatgctgcatgtttggttggattgattggccgaggcatttttctgttcgattatatggatgaaagtggatggtataaattcacttgactaattgtatttatattttttgaaaatgacagctatactaataaatatgcactaacactaattttgtcatgataatagctaattaaaaacaaaatatgttaattagcaccactattatcctaattggcatataaaacatgcacatcaaaattaatattgccatcataattactaagcaataatataacatactaataacccttaattatttactaatggcaaagattagaaaacatggataagctctcttgccaattttttgttagggagtatctatattcaactcgcccatgaaccaaacacaggcttgtctatggaccgccatctcccatccagggatatccatcaaattaagcgcacccatagtaaccctggatggacattcttttgcacaaacctaggtgacattcttttggggacggagggagtacatcttaacccctactctgtccatttcaaattataagacattttaactttcttaagtttgagtatgtttgtagaaaatattaacaacatttatatctccaaataaatttgttatgaaaatatattcaatgattaatctaatgatacttattatgtatcataaacattaataatctcttgtatatgcttggttaaagttgaaaaatgtttgactcctttgggagtgagaatgacactctttgtgggaagtctgtgtgggatggatggagtatttgaatccatcttgatatctaaagcagaacagatagtactttggtctataaaataaatttcaaagtatcacccgcagattactttgctcagcacgattttttggattatttattcatattacacataattgttctcatataagatggtgcttttggctcctccagatgctagcgaggtttgcaacaggcgcttcctttagcacagactgcaaaggtgggggaagggaaagcaactcccggtttcttccattcatggtccagatggcttcttatcttgcagatggaagtgctaaccagcagcgtcatgtaatggccaaggctgtcacgacatacttgtccggctctgcatcaacactggattctcctattcgagtttcagcatctgtctctgggtcccgtggtggttcagggtcctccgaggagactgtacagttcatgatggtttattcccttctgtcagagtcatacgagagttggctccaacaccgccctgtgttcctacagaggggcatctaccacgcctacatgcaacataagcacgggcggtcaaccctcaagctgtcatcagattcgtcatcattggctgttcggtcagacgaaggttcatcctctgatacaagtgacgagaagcttttcgctatcgttcagccgatgcttgtgtacactggcttgattgagcagctacagcagttcttcaagaagggaaaatcatccagcatgagcaagatgggtgaggaagatgaatctgctggcagccttgagaaatgggagatccagatgaaagagaagctggacaacatgaaggagatggtggggctgtccaagaacctgctctcctggcttgaagacatgacctcatcagatgatatgcaggaggcctttgatgtcatgggggcattgacggatgtattttcgagtggttatgcgacatgcgaagattttgtccgggctgccatgcatgccggcaggagctgagcgtgagaatggaatggaggttccagggtgtgttgatatgtatacgccttgttagatcaacaggctctattcagcccagatgtttgtagcattttgccataatgtgtcccgacgtaaggagaatatgtccctatgttgtgaattatacaaattctccattcaccagtagaaaagttacaattccatgaatgcggtcagatttgtttttttttcctgttatctcacatgatgcagctgttaattaaaggtggaaaaagatggttcagcttcagccctcggactcgctcatccttttgcgcgagctgctgccactacgcgagtgggtggctcccctggacagccacgccgtcgcagggtgaggctacgacgagcaacgagagtaggctcccgcatgcgtcgccattgtcgtctcgcttcagtccatgccatgcgccggcgccctactccaagctgcagctgcgctgtgcgcccgtcatcctaccccaagccgcttgccgcgaccgcgagcagtagagtcgtaaacattcctacatgttcgtgtggcttattttctttccacgggagagtagtaaacaattctgtactacatacatgaagaggtaggaatcttaccgtgtgtttggttgcgggatgggtacgggatgggtaggttgggttggatccaactcttatttttgtgaggtg

SEQ ID NO: 4781 - DNA, 3696 bp, Sorghum bicolor
tataatgaaggtcacccccctggttagggtgtgtagtgtttctctataggtctgatgccttgtagagttgcttccttcatgatttcttgcatcttgctttgttccatccttcttggcttggacttgctcgatcttctaggtcttctaatcagcttctaaggtctttcttgatgtgtttatcatcagatcactacattgcaccccattagactagaaaacaagcacttgcaaacacgttagtctaacttggttgtgttgatcatcaaacaccaaaatcaaaatttaatgggtcgaggtccattttccttacaatgacaaccatgtccatcaccatcgatatttgctactgcggcccataactgatggtgatgggggcttttggcccaacaatgatgacctttctatagtactgttctatttgtagagtggaggggagtgggagtgtgcacccataaatccttgcgaggaccaccaccccaccgttagatcaaaccacccttccatggacatgtaggattgaagcaaattgtgttaggttgcatggggtcgaaggaccttatgaagactaccaccccaccattaggtgaactccttgattctttggctgacttccttgaggggtggactcaccccttcggtgtggttgttcctcaagtggtacacgttacatgtatgaagttccatcaaagttggagcaccattgttttggatgtgggtcctaagatctttgtatgcatccatttgaaccatagttatgaattgacctacaatcaacgatggatatcatcaagggttgttcttctttggagtggaccaggtaggaggcctaggggcccatggcccactttggcctaagttttgttcattgcatcctacaaaggttagttttctaaatattgaaatatgaactttatttgaatatgtattgtcatgagcatgttttatcattcaaatatttttgagacattgagggttgaaattagggtttagtgaccatcaacaccaagtcatgctatgatcaatgttttcctcaacgctaaacgataaaaagtcgggcacctgccgttgagcaattattcgggctaaatagtccattaaattagctaaacggccaaataaatggactaagcagatgattaaacggaaacagtgtaccactgtgtagcgtttacacggcgtttaaacggtctaaatggctgtttaagtgaacagtggctacgatgggtaccaacacgtgtattcttagatgccttcccacatctggatactagtcgttgaattcttggatgacttgctagctggagttttaatggaaaatagttggtgaactctgcatgtctcaccaactcctttttaaataaacattggtaggtgaattcctacatgcctttcaaactcatgttttcattgatttgtaaattttgcatgaatttccaactcattctctaatggacattacctagtgaatttttgcttgtctcatcaattcattttttattggacaataattggtgaattctcatacacaacgtagaatcatgttttaatagatatcagtcaattgattttgtatgccttgccaactcatgctctggtggattgtagttggtgaattcatttatgccttgccaactcatcctttgatggacaattgttaacatattctttaataccttgtcaattcatgttgcagggtcatagttagtctcaccaacccatgctaatggacactagctatgaaataaatttattccatatcctaaccaactcatcctccaactactacaattgttatgcattaaggcacaacttggcattagctcattgcatgcataagcttgataggtgacaaatggcacatgttgcatgagtacgctatggaacaaatacaccatggtatgagggtatccaaggctccaagcctataaataaaacccctgaccacaacttcacaaggaagaatccaggtaccaggtaagagggagaaaaaatttgtgctcatggaggccttctcaagattggagcttgaacaagcacatgctgagctttggaacctcacctttagctaccttaagtccatggcacttgagtgtgcagttcaactcaacatccccactgttattcacaactttggtggcagtgcctctctacccaatattctctctgccatcccagttcctgaacataggaggccctatcttccacgcctcatgaggtttcttgttgtatcaggtattctttcctttgattttcccaacttaggggagggtatgtacaaactcaccccattgtcatgccttcttgtggatgacgaccacatcaatgggtgtcggagccttgggccatttgttctctcccaaaccacaaagtaccatgtctcatcagccacatacttatctgagtggttcaagggtgaggataggatagggcctatggctgcggagatgccattcaagatagctcatggcacaggcccatggggtgccctagagcgtgacccacaattcaacaaagtatttaatgctgggttaggatctaatagtcggcttgtgctagactttgttgtggcccaatatggcgatgtgtttgacagcataagctcattgctcgatgttggaggaggggatggtagcacagcgaggaccattgcaaaggctttctcacatgtcaagtgctcagtgttggaccttccaattgttattgctgacatacagccgggtgatggcatggttgactatattgcaggtgacatgtttagttcaatcccaccaactgatgctattattcttaaggtatgtacctttagcgatttgtcacaattagaatctggttaagatctatttttcttatgttataacctgagtacctaattggttggttcttactcttaccacagtatgtgctgcatgactggaatgatgatgactgtgtgaagatcctagatcaatgcaaaaaggctatacgttcttgcaaaccagctggaggaaaagtgataatcattgatacagtcgttggatctccttcgaaagagatgtttgaagcacaagtcacatctgatttgttgatgatggtggtagctgggggtaaggagcgtgataagcaagagtggcacaagatattcatggagtcaggattcaaggactacaagataaggcccgttctgggatatctgtcaatcgtcgagctctacctgtagaaaaataataagtgttattagctagggacaaacatgtctcgaacaagggccctgtgatccatttacttacaaatggccacctattcagtgtgtttcacaaaataagttatatgtatgcctcagtggtttattgccaaataataagggcccagttgcatggccaaggatttgagaaaccaaatatggtgtcgaaattactccactttcttaagtttttttctaagagctagttgtagttacctttaaatttcattaccaacattgatcgatcacacataaccatagctcgaggtcattgacattgggcctgccggcctggcattacccaagcccatattgagcctgacccattcctggtccatcgatccaggcagcaccaactccctaatccattttggtgcgcctgattttgtggctatgcctaaccaagctgaggaacgatgcgggctccatgcctccatgtgcatcccacaacaagcaggcggagccatgggtgaacc

SEQ ID NO: 4782 - DNA, 18221 bp, Sorghum bicolor
cgcggcaggggaagaggaagagagcggccggaacgacggccagaccaagcgagcgcggacgtcctccagccgcgggaagcacagagagaggaagcaaagcggaggcaacgaggcagcggagggtaaacgagaaaaacgaggacaaaggaggcagaatcttttaggacgcatagctgtagaagaggatagaatggcaacaaaacggcgccaggtttcctccttccgtatagcaagcgcctccggtttacctgttgccgtgggtgaattcctcgcgcgttgctgcggaatttttcttaaaaataaatcattatatgcatagcattacggtattgagtctattatgtatgtatacatatgaatttattgtattatatctagtaaaaaattgctaagctaatagaataaaaactaatatttggtaacattatagaagaattaattggtctattatgtatgtatatatataaatttgacttgcatgtattttattgtattagatctagtaaaaaatttactaagttaaaagaacaaaaactaatatttggttacattatagagaaattaattggtgatgaaacatatagtgtatgtacataacttgtatgataatagattaaagattttaagtatttcacatgatatagatgacaaggtcattttttgtaattaatatgggatgatatggacttagtggagaatgatgtagacaccttgcatagagagatggaatatttagtggatcacttaatggaaaatgatgtggacaccttgcatgaagaaagaattcatctagtgggatttagttttataagagttataccctccttataagcaggcacgttgaacagttaatccagctggcgtgtccagcctaaaacgccggagaatgccatcgaattgaagtaggtatataataataataataataataataataataataataataataataataataataataataataataataataataataacgtgcgatgttttctaattttctgtttgacctcaaattattttttttatgtttatcgctcctttcatttttttctctatgctatttgatactcccttcatctcaaattatattttattcttaaaatcttaaagagttaaaacatcttaagtttgactaaatttatataataacataataacacttataatatttttagattcttgattagttatattttcattttaatatatatttgatgtcataaatctttttaattttttctataatattggtcaaacttaaggggtatttggaccgctctactctagtttttgcagctctgcttcacgaactctaacatggagcagctctaccgcagagtttgtgaaacagctgtttggcacgtagttctgctacagcttcaggaatgagttgttgccatgcaaatggtctattatgtcatgatcgaaattgctcttgacatttttttatcaaaatagaaatcaaatgatggagcattaataaagatcataattaaaatataaataattaataggggcggcgcgcaggtgaagagacaaagggcgacgcgcacaagaagaaatgaggtcgcggcgtcgggagaggaagcatttatgagaattaacccgtgattaatgagtgccaatgaggataattaccttacaactccatgtaagaataccaaaatctaaaaatgaagtatcctttgaggtactctacgaaaaacatagagttgacctctagctctagcttttttttttagcaaagttcgtcaagctagacgtggttggcaacatatagctggaaaaatgaagcagagcaattccaaacaccttctaagatgttttaattcttcaagataatgggacagagacaatacttcagttattttagagtggtaacggtgttaagttctagaaaaaaccgttttatctctgtttttttcccagtcgtgacgttctctcttgctggcgattttgtcccctccccacaggaaaaccgccggcttatccctccccacagcaccccacagcgctaccgccgcgcacagccatggcatcctcctctacctacctcatgctcgccagcgcccgtgctcccctcgctcctctcctaaggccaacgctgatggccctcgtcgcgagaaccgccgcagcctccatcactagtggcgccagagctagtgtccctctgttcgtcaaccccgccgccttccggccgggagtgcggcgctgtggctgggcccacatctgcagagactcgtccctccagggccctcccggcaccgattctcctgcccagaagcaagaggatatgaagaagagcgaggcggtgtcagaggctgctattcggattgccggaggcagcggccggaggttcagcgactggagcacgtcggtgctcatcttcgggatttgggggggactcctgtactacgtcttcctgctcgcgcctaaccagacaccggtacgggacaattgcctgcctgctgaatgtgatttcgaattcccttctaatttgtaatttgtgcctctcctctggctgcagtaccaagacacatacctcttgcagaaacttttaaatctgaagggtaacgatggctttcgaatgaatgatgttcttgtttctctatggtacattatgggcctctggccactagtctacactatgttgctccttcctactggtagaaggtaagaatcaagttgtttttaatccagtatattgtaccacctttttagtgtggttgttatgtagtcagctgagggtttagaaaactggtatgaaaacaaaaaatgcagcccctagccattgttagcagtaagccgtgagctgtacttcctgttttttaccttcctattctactgctagtgctaacggcatggcccagggagttgggatggcaacccccaatcaggagcatgccttataggctcctgccttacatactgttgcctagtttagtgattggcttattgcctatatatagctagtgaactatattcagaggaatagctgcctcattgcagcccacaatacctgtgtcttcctctgtgtgtttgatcggtgctctagcatttggtaccagagcctgatctcctagttaaccatgtcttctaagtctccggctaagaccgagaagcccgaagacagcaacaacgagaacaaggtccgtccgtcgctctcgccgcgacgtcgccgtgggcgctccgacagtcgtcgtcgctccggctctagagttgtcgagcgaatcgtcgagcgctcgtctgcacatgttgcatggccgatgctaacccggacgaactacccggagtgggcactggtcatggaagtaaacttccagacggtgcgagtatgggacatcgtccaggacggcctctccgacgacgccgacgatgatgagtaccatgacgaccgccaggcgatggccggtcttctacgctcggtgccgtccgagctctggaacacgctggccaggaaggacacggtgaagcaggcttgggatgcggtcaagcatctgcggatcggcgatgagcgcgcgcgacgccagcgcgcagcagctccgccgggagttcggcgctctctccttcaaggagggggaaaccgtcagcgacttcggcgtccgcatctccacactcgcagccaacctgcgctccctcagcgacaacatccaggatgcagaggtagtcaaaaagctcctgcaggttgttccagacaagctcacgcaggccgccgtctccctcgagatgttcctcgacctcaacagggtctccatcgaggaggtgatcgggcggctgagggtgttcgaggagcgactcaagccgaaggaagtgacagactcgctaggccggctgatgctctgtgaagaggactgggagcagcgtcgcaagtcacgtcgtgagcaggagaactccggcggaccgggatctggcgcccgcggcaagcagcgtgggcgcagacgcggtcgcggcggcgcaggcacttcgtcgcgtgatggccgtgatggccagaacgcgcaggcggccaaacctggcggcaagaagccgtcccccggctaccactgccagtcctgcggcaaaactggtcactggaccaatgagtgccacagcaagaagggcgcgacacacgtcgcacaagccgaggaagaggagcacgcgctgatgtacaacacggcggatccggaggtaattgcgtcgcccgtgccgtgttgtcctcgcaggccaccattgacgccagccgcccccggagtcggagacatgggttcacatcactgaacccaaggtcctccttcaccttagtgaggagcaggaggaggccgtgcaaccccatcggtgggtgctcgacaccggctcaacgaaccacatgacaggcgcccggaatgtcttcgcggagctcgacaccagcatcttcggaacagttaagttcggagatggctcggtggtgaacatccacggcaaggggacggtactgttcgtctgcaggaccggtgaacattgtcagctggacggtgtctactacatccctcgcctcaccaccaacatcatcagtctcggtcagatggacgagactgggttcaaggtcgacatcgagtcgggcatactccgtctcttcgacccggaccggcagctgctggcgaaggtgcatcgatcgccaagtcgactgtacttcctcgacatgaaggtgactgcccctatgtgcttcaccacatgggttggtgacatggcgtggcgatggcatgaacgctacggtcacctcaacttcaaggcgctgcgcaagctgggacgcgccgacatggtgcgtggactgcccaccatagaccatgtcaagcaggtctgtgaggactgcgtcctggcgaagcagaagcggacgccgttccccaaggtcgcaaagttcagggctcaggaggagctcgaactggtccatggagatctctgcggccccatcatgccagcaacaccggctgggaacgtctacttcctcctactcatcgacgacatgagccgcttcatgtggctcaccctccttcattccaaggcggatgccccagccgccatccagacgtttcaggcgcgtgttgagcgcgagacgggcaagaaactgaaggtactccggactgacaatggcggtgagttcacctcagtcgaatttggggagtaatgtgcaggagaggggattccgcgccaccattcggctccctatacgccgcagcagaatgacgttgtagagcgccgaaactagaccgtggtggcaatggcgaagagcatccttcgagctcgcggtgtaccagggtgtttctggggggaggcagtgcacactgctgtcttcctgctcaacagggcacccaccgctgcgctcgatgggaagaccccgtaccaggcgtggtacgggaagaaacctcctgtacacttcctcaaagtgtttgggtgtgtcgtctacatcaagcaagtgcgcccacacctcgccaaactcgacgacagaggcatcaaagtcgtcttcatcggctaccaggacaggaccaaggcgtacaggttctttgatcatgaggccgcgcgcgtctacgtctcccgcgacgctgtctttgatgaagatgcgcggtggaactgggaagaaaatctaggcgctgatgaccgtctgcccttctccatcgaagaagaccacgaggtgcagatgcgacacgccccagagccgactccagcaccagtgacgcggtcatagactgcgtctactgcgcccgcggcttcttccccagccttgagcgtgaccttggcgtcatcccctcctccaagtgcgacgcgggcttcgccatctccttcgaccccgtcagcatcaacgcaggacatccgaactcagattgagttcgcgacgccgctcgccaacgactccaacctcgacgcatatgatgagggggagccacatcggtaccgcatgctggacaatgtcctcggtacagatgcagtgccggggctggcacatcgagacaccgctgaggccgagctccacgcagttagccacgctgtgagcgtggaggagccccgctcgttgaaggaggccgacgacgatcctaactaggttgccgcaatggaggaggagatgaagtcgatctgcgacaaccacacctggtcgctggtcgagcttccacacggacatcgggccatcggcttgaagtgggtctacaaagtcaagcgcgacgagaacggcgccattgtcaagtacaaggcgcgtcttgtcaccaaaggctatgtgcagcagcccggagtcgacttcgaggaggtttatgccccggtcgcacggctagagtcagtgcggctggtccttgcagtcgcaacgcacttcggctggggcgtccatcacatggacgtcaaatcggcgttcttgaacggcgaactccaggaggaggtatacgttcagcaacctccaggcatcatcgacaacgaccacaagcatagagtgctccgcctccacaaagcactctatggactgcaccatgctccgcgcgcctggaaccagaagctggacaccgaactgctgcggcttgggttctagcgctgcgtcgacgagcatggaatgtacactcgcggtcaaggcacaggccgcttgatcgtcggtgtatacgtcgacgacctcatcataactggaggagatgccaacgccgtgacaaagttcaagcatcaaatgctgagcacattcaagatgagtgaccttggcctgctctcttactaccttgggctcgaggtgacacagggagcagctggcatctcactccggcagacaacgtacgcctcaaagatactcgagaaggcgggtttgagtggttgcaatgcaagtgcaacccccatggagccaaggctgaagctgctcaaggaaggaacttcactggctgttgatgcaacggagtaccggagcctaattgggagtctcaggtacctgtgcaattctcggccagatctggcttaccctgtggggtacttgagcaaattcatggaggcgccacgacaagagcacctcactgctgtgaaacgtgtgctctggtacgtggcaggcacactgcactggggactacactactaccccgggaagaagaactgtggtgtgccggagttgctgggatactcagacagcgacttggctggcgttgtgaatgacagaaagagcactggcgggctcatcttcttccttgcagggggactggttgcttggcaatcggcgaagcagaaagttgttgctctgtcttcatgcgaagcggagtacattgctgctgcgtgcgaggcagtttggctggcacggttgctagctgagctcatcggaggagctgttctcgcaccaagactgctggtagacaacaagtctgccatcgctttgatgaaaaatcctgtacaccttgaccggagcaagcatattgatgtgaagttccacttcatccgggaatgttgtgacaggaagctgattcatgttgagttcgtcagaacagacttgcacctaggtgacatcctaacaaaagcactgggttgcatttggttccaagaacttcgaagcatgataggcatgaagaagatagagtaggtactcacggcttaggaggagattgttagcagtaagccgtgagctgtactttcctgtttttgtaccttcctattctactgctagtgctaacggcatggcccagggagttgggatggcaacccccaatcacgagcatgccttataggctcctgccttacatactgttgcctagtttagtgattggctttgttaagtatatgatgaagatctagtcaataggcctatctataggctctatctatatatagccgctctatctatatatagccggctctatctatatatagccagggggctctctatatatatgtatgactccatctctggagggctttgtacttcgttattccaaaggttagtatcatggtaccaaagcatggtttaggggtcgaattagggctaatttgatccctaatcaccccccaagatccatttttttttccggtcgtcgcaagcccatcgcgtgtgccgccgtctgccgcccatcgcgtttcctctgttttcacgggggtcggcacatcaccaccgtgtcttcaccttcgcgccttcgcatctcgtctccaccttcgcgccttcgcgactcgtcgtcgcggagctgtccgctctcgtggggacgcatcgcgcgcggggtcgtcgtccgcccgcgggtgtcgtcttcccgcgtgccctgcgcgtgccctgcccgtggagatttggagcgcccgcgggagtcgtcttcctgcgtgccctgtcctcttccgcccgtggctcttcatccctgcacgctgcacgtgatcatcttctctacccgtggagatttggagttttcttcctctgtttctgcagagaccatcttaggctatttccagtcacggtggtaacaatttttcttccccttgtttgtttgctacaactcttcagtcatgtcatcgcagctcaacactattgttatcaacattacccttgatggttagaattacccagagtgggctttttgtgtggaaactgctttaaggggtcatgagctccttgatcatctagctgatgatcctcctgagcttcagcaggatcggagtaatgctgctgatgtcaaaactttgcaaaagaatgatggcaaggtgatggctgccatgatcaacagtactaagcaatctatgattatgagtctatccaagtgtaaaacagccaaggctatctggtcctccttgaaggcacgctatgtccaggacagtggtgctcttgcacactcttatgcagcaaactcatagtattgagcagcaagacatgtctgttgatgagtactactcagcttttgggcgtctgatgggatccttgacctctatggtgcctgactgtacagctgaggattgtccagcccacaagtttattgaaaagtttcttacttatcgttttgttatgggtgtaagagcagaatttgattccatccgtactcggttgcttcatgattcttccgctctaacaatggcaaaggcactgtcggaattgcttgctgaagagacacgtctccggtctctgacttcttccacacatgtgtctcataatgtgctggctgcttctcagaagttcagtacaccaaagggtgcctcgcaggagccttgtccgcattgtggtagaactggtcatactccagataattgttttgtgcaccatccagagaaattggctgaatttcgtgctcgtcgcgctgctcgaaccactaggggtcgtggtacaggatctactcctaaaggatctgtgtcagttgctgctgctagtggttcaggatctgtgtcagttgctgttgctgctggttcttcatcttcgtcttgggtgcttgattctggggcttcatttcatgtgacgtcggatcagtctcagcttgtggcctgcaaaccagttgttgatggtgtttctgttcatacagcagatggtacaagttgtcctatcactcatcatggttctctttcaaattcatatttctctgttcctgatgtctcctttgtacctaagttgtctatgaacctcctctctgttggtcaacttgctgaccataattgttttgttggttttgatgactcaacttgctttatacaggatcatcgaaccgggactgtacttgggactggccatcgccgtagcggttcacctagcctctacgttcttgacaccttgcgtctccctcacatttccgctcatgtgtcatcagccgcctcatcaccatcaccatctccctcgtccttcgccaagtggcatcatcgtcttggtcatttatgtgggtctcgtttgtctagtttaataaataaaggttgtttaggtcccacttctatcgagtctagttatcattgtaaaggttgtaagcttggaaaacagatacaactcccctattcaattagtgattcccatgcttccaaaccttttgatcttgttcatcccgatgtatggggtcctgcaccttttgctacaaagggtggtcataaatattatgttattttcattgatgatcattctcgttatacttggatttacttcgtgaaacatcggtcccaattatgcaatatttaccaaacctttgctcgcatggtacacactcaattttctaccccaattcgagtttttcgttctgattctggtggggagtatttatccgctgcctttcgccagtttctagactctgagggtactcttgctcagctctcatgtcctggtgctcatgctcagaacggggttgttgaacgcaaacatcaccatttgatagaaacagctcgcacacttttaattgcttcttttgttccttcacacttttggggagaggctgtttctacatctgtgtatcttattaatagacaaccatcgtccaaattgtctggcaagagtcttggtgaagttcttttcgggactcctcctcgctatgatcatcttcgagtctttggatgtctatgctatgttttacttgcccctcgtgaacgaacaaagttgactgctcaatcggttgagtgtgttttccttggatatagtcctgagcacaagggttatcgttgctatgatccttcttctcgccgcatacgtatctcccgtgatgtcacctttgttgaggaccgtcctttcttttataacacctgtacaaagtcatcatatgctcccactgagtccacctcttttttgtatcttcctcctatttcagtgagtgatgatgccaccccacaatgtgagtcaccttccagccctcttatccatattcattcatcttttgagacccttgacaatcagccacctcctcaaaataatcaaccacctccaccacctattgataatcagccacccaatcctcttgcatctccaccacgttgtccaccaattacaaagacctacactcgtcgtcctaaacagcctattcctataactacttcctcggccagtcctgatactcccagccacgatgattttactaacaatgatgagtcctgtgctatttctgatgagacacaggttgcaccaccatataatctacggaatcgtgctactattcatcctcctgataagttgggctttcaacgtgcgagtgctgttgttcaggaaccatccacttttcaggaagcttctagtattccagagtggcagcttgctatgtctgaggagcttgctgctcttgatcttcaaggtacttgggaacttgtgccattgccttcacatgctgtaccaatcaccagtaagtgggttttcaagattaaaaccaagtcggacggttctgttgaaagatataaagcacgtcttgtagcatgggggtttcagcaaactgcgggtcttgattatgaagagacatttgcccctgttgctcacaggaccacagttcgtactttacttgcagtggctgcatcatcttcttgggtcatttctcaaatggatgttaagaatgcttttcttcatggtgatttgaatgaggaagtttatatgcaaccacctccaggtgttaatgcccctccaggttatgtttgccgacttcgtcgtgctttatatggtcttaaacaagcccctcgtgcttggtttgaacgttttgtatcagtgttaaaggctgctggtttcacacctagtgatcatgaccctgctctgtttattcatctctcatcacgtggtcgtaccttgtttcttttatatgttgatgatatattgcttacgggtgatgatgtggaatatatttctcttgtcaaacagaagcttggtgaacactttcaaatgtctgatttaggtcctcttagctattttttaggcattgaggttaagcaatgtgccagtggatactatatttctcagagcaagtacatccaagatcttattgctcgttctggtctcactgacaatcgaacgactgccacacccatggatcttcacctacagcttcgtcctactgatggtatacctcttccggacccctctagatatagacatcttgtgggtagtcttgtttatctcactgttaccagaccagatatcgctcatgcagttcatattttgagccagtttgtgagtgctcctacttctgttcattttggacatttactgcgtgtactacggtacttaagggggacaacatctcgatgtttattctatgctcgtaatagtccgcttcagctctatgcttactcggactccacttgggcgagtgatccaacagatcgttgttccatcaccggttattgtattcttcttggttcctcacctattgcatggaagtccaagaagcagactgctgtatctcgctctagtgcagaggcagaacttcgagcccttgccactactactgcagagattgtctggcttcgatggttgttggctgattttggggtttcttgtgatgctgccacacctcttctttgtgacagtactgcagctatacaaattgccaatgatcctgtgaagcatgaactaactaaacatattggtgttgatgccttctttactcggtctcattgtcatcagaagaccattgctcttcgatatgtgccttctgagctgcagctggctgatttcttcactaaagcacaaactcaagagcaacatcggcttcacttgatcaaactcaatgcttcagatcctccaattccaccttgagtttgaaggggggtgttaagtatatgatgaagatctagtcaataggcctatctataggctctatctatatatagccggctctatctatatatagccagggggctctctatatatatatgtatgactccatctctggagggctttgtacttcgttattccaaaggttagtatcaattgccttagatagctatgtaatcagctatatatagtgaactatattcagaggaatagctgcctcattgcagcccacaatacctgtgtcttcctctatgtgtttgatcggtgctctaactgccacaaacacgaaatttcaggaattgaggatcaaattcagacaatttcaattttcaaactgttttttttaaagattcagcatcatttaactagaaatactctccaaccaattatgcatcacaaatttatataacatcgacgaaataacacaaacatatcacagaagtagagcagcgctaatatgacggactgacagtggatgagctgcctacactagtgacgtcgggcgcagtggcggagccaaggggggctggcaggggccatgccccccccctaacatgtgtcaacaaacatttttattagtataaatttatgatttttatttatattaagagaaaaatataacaatttttgttatatatactgatcagtatcctatagatagtaaaatcgtactccctccattctaaattataagtcattctatgaattttagagagtacaaacatcctaaatttgaccaaatttatataataaggtagtaatatttatgatatcaactaagtaccactaggttcttaattaattatattttcgcagtattcctatttgatgacataaatctttgtgattctttctactttgattcttcaaaattcttagaatgatttataatttgtgatggagggaatacaaaacataactagataatactaagcaatttcagaccccagcgaaaaaggagaaatttcgccgaaattttgactcctatggactactcagctcatgcttcatgaatgttctgtaggaagctggttatgatgactctggcatacttgcagttttcttgttttatttggctgatcttgaagcttgtcttaatcctatggatagttcctaaacacaaagatagtccttacgtctgtatctgacaaacccaagcaagttgggataggtgatatttaaccatggaacgattatgtagtttctttggatgctgtagtaataacaccttgtgcagtaagatgatttaaatattatctttgtatgcagacagagtgatattgttagaagagtcaaggacctattgggccttagcccattagggttaattagtcgcttgcttagaggtcaagtaagtcttgcttgtaagtcaagtaaacctctctatataaagagaggagatgtatcaatttaatcaagcaagaaattagaaggaaatcccttctctcttgccggccgtgggcagagccccgcggctggcgttcctagcgcctaaaaccctagcctcctctctcgctctcacagccgcctccctgtgaacagtatccgcgggtactgttcacgccatcagcgtcgctccttcgatctcaatccatctccctcgatccccagcagccacataacatctggtatcggagatgtcaggttcccaaggatcctttgctgccgtggtgtcttcttcggcatccgctgcgatgacgccggaacagttgaccgcggcgatcctcaagctccagtcttctgttgccgagatccaatcatatctcgccacgctgcagtcgcagcagcagcagccggtgtcacaggttttcctgcacgggatgcctggttacgggacgacgacgttttcgttccagggcgtgcatccatctgccctggttcccatccagcagccatggatgtcgccccctccatcgatttcgtcttatgctctagcatcgacgatggggctggtgcacacgatggcaagcaccccggcggccacgacgacagttgctccaccaccctccaccaatgctgttgtcctccccggtgtaccaaccatccagcacccattcaccgatgggatcttctataggggtaccagcttccagcaggtccgagatgagggcaagatgctgcagcagaccgagcagccgatggcgacggagctggcggagaagacgcttcgctgccaggcgtcggcggtagtgcggctgcaagctgctgcgcgtggcctccttgcacgtcggcgggtgcgaaagatgcgtgatctgccgctgattcagccctgcacctatttgcagctccaccacgtggaggactgcgatctcatccgctgcgtcggggattttcagattgcggttccgcccacgggcagcgtgcatgctgtttttcctgcgggtggactcaaagtcttcggcgtcggcagttggaagcccagccgtccagcggggagaaggtatggtgtcatcggtgggagcgcactgcctagtgtcgccagattccgccaccgaccaccgcgagggcgccttcgctggtccctattgcgaccacttcctggaggccacacacaagcacatctttcatccagatggtctccatgggatccaggtggatggtgtccgccttatgtgcaggggttaaaattaaagagtcccaatctatttctagttgagaataataaaacaagccgagatgtaaaagacttgtttttaggtgttacgtttgtgtcttgcggagtcattgttagtgtcgttgttaagttgcagctcgaggacgagctgcatgtccaggtggggtgtagtgttagaagagtcaaggacctattgggccttagcccattagggttaattagttgcttgcttagaggtcaagtaagtcttgcttgtaagtcaagtaaacctctctatatagaggagatgtatcaatttaatcaagcaagaaattagaaggaaatcccttctctcttgccggccgtgggcagagccccgcggctggcgttcctagcgcccaaaaccctagcctcctctctcgctctcacagccgcctccctgtgaacagtatccgcgggtactgttcacgccatcagcgccgctccttcgatcccaatccatctccctcgatccccagcagccacataacagatatgtaacttgttctttattttgcgtaaataagccaaccacaaccaaagtttttgtccagcatgttgttgtctagtttcttttgtatgctgtagtaggagaattgagattgccatgattttagaattggctgcaaatggatgatcatttgcaaacatgaaactgaacatacctatatccaaaatattgagaaactaatcgatttgtgattttgcactagcatttttctccctcactagtttggtatacacatatataacaaaatatgtgattgtaacagtagttattttctatgattactgttttctatattattttgtaacagtaaaattgtattgcagttccaaaagcaagattcctgtgtggccattcctggttctttcatgcatcggaggagcgtatgcgttgattccttactttgtcttatggaagccgcctccacctccaattgacgaagatgaaattggacagtggccattaaaatttcttgagtcaaagttaactgcaggagtaagttttagttttattatattacatttcaaacactatttggtaattattgactacattcctttctccaatctccatgtcgcaggtagtgtttgccttgggcattggactgatcatatatgctggcaaagctggtggcgatgattggaaagaatttattcgatacttcaggtcgagcaagtttgtaagttctgcaacatgattcagtggatcttgagtaaaagaacaataacaaatgttttgttgtatctggagtaaatggttgcacatatgactatcatgcatttagtattcacatcttacatatgttcttttatttgatttgttgtttttacaaccctaaacaattttagtattcagtgtggtcacaaagacaaacatgttcagagtttaaaatgttaaaatagtcactcatctagtttcctctgtcttataaggttcaaagattataagtgatttatttattgatcatgtcataatttgattacatgtcattgccatgaatttgattactatggatctaatcaatacagtgtgggttctatttcttttatgtcatgtatcagatccatgccacctgccttgattttactttgctatcagccttctcaccattttgggtctataacgacatgacagcaaggcgatggtaagcactaatgcttaatgttgtgtagagaagttgtgtgatggactttgcaatgtctgagttaaaaatggcaattgaaatacgcatcacatgagattaattagcatttgcttaacaggaaaaatggctcatggcttctaccacttgcactgataccttttgtggggccctcactatatcttctactgcgcccatcactttcttccttgctggaagcatctgcttcaccatctgatgaatttaaaaaataattcagaactgatggagaatttagttgtgggcacatgacatgggtagagaaatggtgatctgacaactgcatttgtcagcccaaatgctatgacaattgctgatttggagcaaatgcacaattttgcatgccaccttcctgttcaaattgcatggcgatccggacaatgaagatattgccaatattatcgtcatctgggtgcctcacaaattttgtcagtgctatatttatcggttaatctgcaacgtttcaatctctgatggaagctgtgtatgtatgcaacaaactgctaggatatcatacctgtatgcataggtcattcagggtatagaaagttttgctcctattacagtgacagtaagggggtgtttggttgaggtgctaaattttatatgacaattagtgtccaatcatagactcaaaatattcgtcttgcaaatattttctagctgtgtttttagttttgtaaatagtatacactagtaaaacatgctcgtgcgttgcaacggaagaaaaaactatcacacgttttcataagaatgggcattgcaatggaaaaaaaagaataattaaaagtctgacctattcgcttcagtttgttgtgctttagcggccgcgacattttaaattgttgtgatacttctaatgttgtgagtgattgtagcaattacaaacgatgactctgttaatggatacagaacagaaatttagatatttatttacttattttattatccattctatagaatctaaaagcgatattttattttatcataatcattgtatccttaatataagttaatatttaatatcttgttaaagttggcaaggaattgattgtcatcgtgtctcgatttccacacactagtacgggaaaacttttgcacgacattttattctgtggctctgaggacctatttaggtgtaatcaaaacctaaaagtttacaagattatctatcacatcgaatcttgtggtatatgcatggagtattaaatataaataaaaagaataactaattgcatagtttacc

SEQ ID NO: 4783 - DNA, 5686 bp, Sorghum bicolor
tttcatcaattatccaaaaccaaactagggctttcaataggtcatgtacatggaggtttgggggttgaccctatggtctacatgcatagatgtgctagagtctaggagggtcttacaatggtactctatggactgtggtgatgtcttggtaccgaagaagctctaggcgtcattcagctcacatgttctaacactctgcgtgttaggctatgtcggcttcaactagcctcccctaggtgcgccttctagactcatcttggtggcgaaggaggctggctcaaggggctgacacatggtcctgaaaggccttgtgcccttagaggtcgaggaggagtttgtcttcttatgtcacaccttgtgcgtgaccctattagggagaggttgatggagccatgcccaaggggcagcactggggagccctcaagccttgatggtattcaaggatgggaaagggccaaggatcgggtctaagctcttgatgattaggagcctagggctcgggcgagcccctgagctttgagttaccagttgtgctcaggctcatcctctaagggtgcacatgagcatacttgatggtatagcccctgagcccttgggcaatcctagagggatcagtcgagggtctctcgattgaaaaccattgaccccgaggcttaacatacctatatgttaggatctcatcacttacctttgttaaaaaaactacaaaatgaaataactttaacgacaactatgtcctcctagattccatgggaagagcccaacaaatagcttcaaagcaacaccaaaattgatgacatccaactcatcaagcttagagaattttggtgaacatctgccgcatgttgagacaatgggaaacttatgatctagtggggcgttgacatagtaatgatgcggtggatgggatcattgaaggcgtagagttgatcgctgctcgcatcttccttgtggtgtgccttccaaggaaccctcatgctaccgcctgtagccataccgttgcttggacttcctgctctgacttttccatgttagcatggtggcagttgaacatcacaacaaaccaatccatctcctttgtgagacagtgagtctcctcagtgagggtagtgattggctcatcacatgatggtgatggatgaccgacagtagaagccatagaaaaggatccctgactcatgatactagatggtagtccatacggaacatagggatgataaccattgccaaaaggaaggacaggcaaagtcatggagagagactacaatatttgggggtaagtttgttgttcatgcttcattcaatttctcctaggtgtcgagtctctgtctccttgtttctctccccaacattaaatctcattaactctaatctcttcgtcgaaattctaattgacattatatctagtaccctaggatagcgtcctggctgccccacatgacagatttagccaacctatatacagaagtaagaacagagttacatgttacctataatgaaagatgtttgaccacgtgggcatagaaatatgtttcctaatagactttggttttgcctaaaaactttcctcagacatattggtcatatcgaggaaagactaaagcatatcttagttgttctgcctgggcatttctcatacttcatcatctgcaatatagtgcattctagcatcaaaagttatatcaatataagagattctaagaggacatcaagcattcaaaaattttaccaaagataagagattctaaaagggacaaaacaaattgcattaaataggtgcataaatttggtggatattttattgttactaccattatacgtatcaatcaacactattaatcatgttgatgatagcactataatttgtcctaagatcactagaatatgcattatattataggacagatagagtatgcagcaattaatgttagttacttttttgtgttagtactaaattgatgaatacagccaaagtgccatgaaacacctatcgttgttaaatgcagaacttccacgcggttactgtcaaagaggctgtgcaatgcataactccttatttagaggatacaagccaaccaagtcagcacatctacttcgatggatggagagggcttggtgcatctgcagtccttacatctatagccgaagagcccccgccatctgtgagacacaaattcgataaaatcatccatattgatagctctaggtggaaaaatcggagagaactccagaggaaaattgcacagaaactagggcttcctcagcatgtaatgaacattctagataaacaagatgaagaggacgatttcagcggggcagatgaaggctcaaggattgagatagtagcagtcgggagagagattcatcaagccctgcaaggacagagttgtctagtagttttccataatgggagcactaacatggttgacttgaatgattttggcattcctcaacctgcagatcgatgggcaaactttgttcggaaggtattgtggactttccgtggaaggcttcatgccatcccaggaatgaagctagcagctgatccaacacgtgctccttcaacttcaaatgcagaatcagccaagcctagtaatggtaatcaaacacggacagatcagaaacagctctcaagggaaaatgttccagcgacagagggagtaaatgtagacaactcacaagtttatctttattcatttcttgaggatagtgaaagtgaacagtggaatggactagcacatgatgaagctgcagaaatagctaaatacagtcgtaagcttggtgtcaccttagaaacagctgcattgtgttgcaagtacatgttgttactgaattccaggggtgtcgacacactagacttcaactgggccacccatgcctccaactattgggtttgcgatggaattatacaagaataccagcaggacaaagcatgggaggtagccactgctttgctccaagaaatgaaactagaggaattctcatcttataaattgcccgaatttggtgataagacacgctgggttgtagccaccgatccttatagagttgaagaaattaagccagagacaacatcatttttctttgccaacaataggggacggggggtagcatcattacccactaaaatattccagagatctgctgagcagcttcatgtactgaaactttgcctctgtactttcagcttttcttcaccgcctttccttcattgtcagaagataagatttcttggactggataagtgcaaggatcagccaaagaaactagaaggaaaggaggaagatgacagacgaaaaaataatttcttccagagtctatgggtgcttgacatatgtgacacagattgggaactggacttatccccgaatataattgagagtatgcttcaaaacattagggagatacatataaagagggcaagaatctggagcaatagtaatgcatggacatggagacatgtacacaatattcacaagcttcgagtgattgaacctacattgcattggaaagacgaaggtaaggaagaagagatgaaggatgaattcatgaatatgtccaagctagagctccttgatttgtcagggaatagcacaataaaagttttgccaagattatcaggtgcaactagcctcagcactctggttctagatggctgtattgggttgacaacagttgcccctgaagagctgccaccatccctggaaacatttagctttgatgcaggggaaggaaagcaatacaacaagaaagctaagatctctcgcatctccatggctggttgtgcaaggctggagaacttcagattgcgtggatctcttccgaatcttgaggagctggacctttccaacacatcggtcaaaacacttgacctgaaagatgaggtggtgcaggtcccattcctgcaacgactcattttgttgggatgtgagcaaatccgtgctatactttggccaaaggctggaatgcccaaactagtggtgctgcgcattgacactcgaggaggcacagaagaagctagatcagaaacacctcatgatgctgattactctttggtcatcagcaaggaacatgaagagatgtgccttgcacatgttgctgttacggacatgaggttgcttcagtcgttgctgcttgcaggtagcaacaagttttgctggaacacaactacatttaatctgattctgtacttgtcttcttctagcaaaaatgatgatgggcaaaacaacaggaaggagaaaattggcctcccatcggttgcatcacatctgcacaagtccccagttctcaagagtcaccagatctatagtgatatcaacactaatgaggcaactggcaatcatagtgcgccgcagtttcaactactagactttcatgtagagattgttgaggaaataagcagtgataatgtggtcaccgaacaagcaatcagggctgtgaggtttgttcttagtaaggtcaactcattgcatgtgcacgacaacttttccatcaacactgttattcccgaaagcatggtcacccgtgaaagttggtccaatctcaagttctgctccatcgaaagatgccctgatttgaacattgtgttcaccactgacgatgtgttctgcttccctgaactagagacatttttgggggctcatcttttgactgcacgctgtatctggagcaaaggatggctagcccttccatattctggaaaacttcgggctataaatctgcacttgtgccctaggctcacatttgtcctcccgttatcatggtcccaaaccttgtcatcactagagacccttcgcatcatctactgtggtgacctcaatcaggtcttccccgtggaagcagagtttctgaaggaatcatctactggccatccaagacatgaactggaacttccaaacctgaagcacatacacctgcatgagctccccaagcttcatcagatatgcgaggtcaagatgttcactcccaagctccagaccatctgggtgaggggatgctggagcctcaagcgcatcccagccaccacagaccgcccggacagccaccctgttgtggactgcgagaaggactggtggaacaagctggagtgggatggaaagaaggctcgccatcatccctccctcttcgagctgcgccactccaagtactataagaagaccctgctgagatgctcggttctccggtgagcctcgccgacctgatgacgtactagctactccaatcaatgcacctccaggtacacacgaataagctagttccttctctcgcatgcttgttttttctactgcccatgaggaatgtatatatatatatatatatatatatatatatatatatcatatatgcaatatcttatatttctgcagcaacctctgcatcctaattgaaattcaatataggagtataacaatttagagaactgagccatagctttatcattgtgagcaaaactacttctgttcattatattcgttattatagtttcccctaatcacctgttttattaatggtaattccctaggtttcctggtggatacatcacggtgatgtctcagttgctacctacgtcgtgctttatctcccttgttttgccacgcatgtcttctgtgtgttttctcaagaataaattggtggttgatgctggttgcatcgtatccaccaagttgcattgggtgttgatgctatg

SEQ ID NO: 4784 - DNA, 5361 bp, Sorghum bicolor
gagaaggacaatcatggctgatcctaggcgtctacgtcgacgacctgataatcacaggaggtgatgcagccgccgtgacaaaattcaaggaacagatgaagaacacgttccgcatgagtgacctcgggctcctgtcttactatctcgggctggaggtaacgcagagagctcgaggcatcacactccaccagaccgcctacgccacaaaaattcttgagaaggccgggctagcggggtgcaacccaagtgcgacgcccatggagacaaagctgaagctactgaaagaagggtcgacgccaagcgtggacgccaccgagtatcacagcttgatcggcagcctgaggtatttgtgcaactctaggccggacttggcatactcggtgggttacctcagcaggttcatagagtcacctcgtcaagagcatctcgctgcaatcaagcaggtgctccgctacgtcgcggggactgtccactgggcattgcactatcatcccggaggaaagaagaagacgccaccgcacttactgggctactccgacagtgacttggcaggtgatgtcaacgatcggaagagcaccagtggcctcatcttctttctcgccggcggaccgattgcatggcagtcggccaagcaaagagtggtcgcgttgtcgtcctgtgaagctgaatacatcgcagctgcaggagcagcatgtgaaggtgtgtggctggcacggttgctggccgagctcactggaggagcgatcgtggtgcccaaacttagagtggacaacaagaccgccattgcactcatgaagaatcctgtgcaccatgaccggagtaagcacatagacgtgaaatttcatttcatccgggagtgctgcgacaggaagctgatcgacgtggagtttgttggcactgaactgcaactgagtgacattctgacgaaggcacttgatcgcagtaggtttcaggatcttcgcgatgggatcggcatgaagagtttagtgtagatgctctaggactcaggaggagattgttagatgagccctgagcatgctaaagatagtaagtagaggcgtctagcgccattttttgctttctctttcaagagattgcggcatgtcccaggatggttgtgatggcaatcattcaatcacgaacatgccggatttggtcctcagtgaccttgtaaaactttccatgtaattctctttatatagcaatagcaatcaaccaagaaaagctgccgctttgcagccccaaataactgtgtccagttttgtgttcacgtgtgttcatcatcctcatcggagttctgacacattatatattctggtggttgtgcaaagtgagctgatcttgtactgattatttttactaacgttgactacagtatgggagacatatgttcttttgttcctcattcctaacattgaatttgtatcggataacacataccgcatataaatgtttgtattattacgtgaactcctcttgacaattaatttggttgcatgtctacagacaaaatttgatattttgtgtttcttgcaggcacggggaaaccacttggaaggtttgctctactattgtcataatgaggtcttaatttcattttttcaagcacatgcgatctttctttgtttatagagtctgcattaatgaatatcatcagcaagcataaagttgctaatagtcggtatcaactcttttagtactatggtcatcaaacaagtttagtctgttcataaagattatattttcagagtgaaagtgatctatgttttaaataacaaatttcagcgtgaaagtgatctatgttttaaacaacaaatttctacttggatcaggtcttattttctcaaataagttgtttctaagagtttctttgccaatcagactaccacaagcaggagtatcagttcaaagcttagctacagggtcctggtgcatgcagatttgatcaataccacaacacaacactatacagagtgagcttcttcagtatcaaaaaaacgatggcttcgtctcccgccccctcccctcccgacgtctcgcctcccccgaaacccacgccgacgttcactccgaacccggcggccacctcctccagctcccttgagacgtcgggtccccccctaccccccccctcgtccttccctgcggagcagtctgctcgtggtcggtctaagcacgagcgctggagcgaagactcggattctggcggctccccatcttaccgtgacgtcgtcatctctccttcggctccggcatcgctttctgccccgacgaaagcctctgcggctgggtcggctgctggagctggaggcgacgtggtggcggccaaccctgtggcccgggccgcccccaaaattatcctctgcggccagcggcgtcctgctgtcccgcgtggtcgcgcggacgggtggcaggtgttcgagtcgcgtagtgctcggcgccggcgccagtgtgccgcttgtcctccccgacgccctgtccccgccgaccttttgggcaggtgcttcaactgcttctcctccgcgcacgccgctgcccagtgccgccaaagaacccggtgcttccgctgcaagtccctggggcatcgatcctacgagtgtcctcggtcggctcgcgctgcacgtccgccgaggtgtgtcgctgtctggcggcgcatctctgtgaacccaacgccgactgacgactccttcccgcaacggtcttctcgggcgggacagatgagtggcgtgccgatgccggatgtcaattcctccccgcaacggttttctccggcgagaaggacgagtggcgtagctgaggatgctgcgaaggcgcaggtccctgcccctccaccaaggcgtttctctgtgtggcggcgtgtttctcctatcccggtggcggtcgacgctccccgcccgcaacggtccttgccggcgggcagaggttggggcgcagctggcacggccgtggtgccataggggcgccctgtagatggatcagattcttgggggcggcgtcggcgccgacgtccgcaccgccatcaacgtactacccaagggcactccgtttccccccctgcggctgatgttttgcctgaagcatcctttgttgcggctcccatgaatcctgcagcttctgagcaacactttccttgcatcatcaactggacggatgccattgcaagggctgaggatgatctcgcacatgctgtgattgtgacagtcattggtgatcaacccctcactgaggcaaacatgctagaggcggcgatcgctgcccgattggacgtcgctgcaggctccttagtccttcgtcgagcctctgcatcaagctatctacttgtcctacccaaccttagtttggtggagcgtctggttggtctccgtcagccgctttgtgcctccaatttcagcttgttgtgcaagaagtggagcagactaatcggtgcatctggaaaggttctgccatggttgattgatgtcgagcttcataacattcctagccatgtgtgggagacctgaacggtggaacatttgctgagccctcatgcctggattcagcaggtgcaccaggacactatcagcttggtggatttgtcagtctttcggtgctctgcatggtgctcagaccccaacctattgcctcgttccagaaagttgtgggtcactgagccgccggtcgctgcaatggaggatcctccggtgaagcgtgtgctcgagtatgacattgacattcgtttctctgttcgtattcagcctggtggttctactgctagcccacctcctccgcccggggatagcgaagatcaggatgcctctgcacgtcgacggcgccggatgcattccccttctcccccacatccatccggcctgggtccggctgctgatggccctagcgcgtccggcgctggcatgtccaacattggtggagctgggcgtgggcctggccacaggcgaagggacacggccacaacctttctggagccggtctgcgattcccaagcagcctgcgtggttcctctcgagctcccaagcgatgagctccgctgcattaactcctctgttgccgatggtgtaaagctgactgatgtttccaccccgaagacgctggttggcggaggcccgtcaattgccgttgccgccgccttctcttcggacgaggcagagcgctttctaatggaaaaggacctggtcctccctcgggccggtggtgggccgaggtcggaggactatcctgatgctgacccggacctgaagtcttcctgtggtgatgttgaggtgggctttggtggggctacggtgcttccggcctcaccacgctctcctctcgtcttccatccggtcgaggcaacggtggaaccggcctcacctcaatctcccttctcccccatatcggagtccaacctgctggtcgcctctccgctgctgcccgagacaccagcacgcgcgcccaaggctgcagtgaagccactgcaagtatactccaggcgacgccgttgccttcacgcgtatgggccagatggacctgtggtggcctcaccggtcgctgtggaaggagtgcccgctcgggtagcctcatcgccggtccagggggccaactcttctactcccatggtgggggtgggaggcccctcttcgttgcatgacggggtggctgattcgcaatcccgtctgcagccgagagcccgcctccccttcctgatgctaggatgaccttcatcgacaagcttactcgacgtacatcaggcctccttgctgtcccggtcaacaagcgcagaagcaagacactcccaccaggtgccaccccacggcgtagccggcgccttgctggtgcgacggtggaatttgacattaacgacttggaaagaagaacaaagaagaaggtaatgagaaatctagagctcatagaagagaatgaaggtattgaccagcaggcccttagtgagtatgcgaagctattccagcatccactctctgatttccatatccgggctctgtctgctctcttcaactggtccctccctgaggattttggtgagggtgaggaagatgaggtgcttgcctaagctgacagatgtactctttgtggtcgtcttattaatttttttcattaatggatccttctaaaattctgatttggaatgtaaggggcctgaactcttcctctagacaaaattccctgcgctctcttgttgactcttctcggtcagatatcgtctgtgttcagaaaactaaaattactggcatgactagaagggttattctttcagctctaggatctgatttctctgatttcgctgctatcccctctgctggtgctagtgggggctcgctgattgcgtggagacgtcgcatcggtgtttcaggagttcagaggattgat

SEQ ID NO: 4785 - DNA, 6466 bp, Sorghum bicolor
aactttagtcactttagtagctaaagttccaaacacattaactaaaaggggctaaaataatttagttccattagtcacccaagagtagctaaaataattttagctagctaaaatttagttggtggaaccaaacagggccttagaaaaaagaaaatatgattggcgggaggagtgaatagtcgcacgaccacgcgcggaggcgacggatttcgcgcgagggacgtgatgccaagcgtggaggagctcggcatatatgtgagtcattcccctctatttgtcaagttaacaaaattgtaaagctcaattgctgaaccgttggatatgtgtttttttagacttcttttacaacgcctatttgccaaacggttggtgtggataaaattttgttgtttaggtcatgattttcagtctaataaataaatatatgcataggcgaattttgggtccgtcattggccgtctcttatctccggtaccaacacgtgtgtgggaggagagtaaaacacgtgcagattagcattatgggagatgccgctggcgcgggtgcagttggcttcatccggttccgcgtgggcccacgcttctcccccgtcgctgtccttgggcaaccttccaacgaccaaccatgagccatctgaccatggacggcaataatgacgtggcctcccccctcccattcgcgggccaacttggaccatcctagtggttctcactgtttatccaaatttttttaagattttccatcccatcgaatttttaaacgtatgcatagagtattaaatatagataaaagaaatatctaattgcacagtttgtaatttgcgagataaatccttgaagcctagttagtatataattagacaataattaacacatacaaacaaaagtactacagtagccaaagctaaaatttttctccaactaaacaagacctcgatacgaactaagtaacaaatcataattcaattccaattcatgtaaaaaaaaattctaacagtgactccattttctgttaccagcgccacaatgtctggtgcgtgttggtccaccaaaggcagcttgtcagcagcaatgacacatttgaggacggaattacaggacttcttctgtctcagtttggtcacctgccaaacaacaaaatgctcatatgaacatgaatttctattgctctattctatttttttcgaaaagaacggtaaaaactttgccgttcactttattagacaaagaaaatggaaaaaaaagcaaaagaaagctacaaaatatttacaaaaccagatcccctggatcaacccgtatctagaccagcaccaactaacctcctactagagaaaaggctactgagaacaactacataaaaaggacatcagcaaccatgaggaaaacgaccctccaaacacaagtctagttttagaaccagcgagaccgacatcaccactaaattactaaacacttgaggactatttgatctcaattcatattgttgaatgtcctttttgcatagcaaggccacttattttagttgtagagttttttttaaatgttcttctattttttttctttccaaagatttcaccaaaaataaatcatgccttcaaagtttctcctatgagatttctcaaacttcatcctgctttgcgccaaaatttgtgaaggaacctagaggtgcctattgtgtttaaaatcgatattccaaaccaatgctttaataaattctcaacttttttttgtgaatgaacagtctttacacaaatgtgctgggatttcgagctcagtgccacataatttgccctatttgatttgaagtttgttcgttggtctgaaaagccatggaatactgtttgctgatttattacaagaaaaaaatattattggcctaattctaaattccaagccatttcctttttttttttttttgaggcggaccctttaatatccctgacaccgggaagcagaatcacattgaccgacgggacgggccaaaagcccggaacggcagccatgcttctccagccgatccccaccgccaccctcgccgctggacggagctccggcgaagctcccttcccctttcgccgccgctgccgccgccacatgctcctccctatccgcgccgactcgaccccgatctccctctcggcctccgccccctcgcggccggccaagccggccgcttgcaccgccgacgagctccactacgcccccgtcgacggcgccggctggcgactcgcgctctggcggtacaggccgccgcgcaatgtatgcgtgcttcgcttcggttcggttcggtttcgtttcttcgtcgcagcgaaaatggtgtttgatttgatttggcgttgcctgcgtgcaggctcccgtcaggaatcatccgctgatgctgctgtcgggagtcgggaccaacgccgtcggattcgacctgtcacccggggtaagcttggtgttcctcttgttattagcttcgaatcaaattaaataaacatgtcaaaaaaataggaagatgacggttacggacctgaactgtgatctgcatgtgttgattagctaaatatttggaatatagttgctactggttgttttgttggtgtttaatctagtgttcgtttagttttagtttggatttctgaggggctagggacttcaggacctatttgtttgtcaactggattgttcggggactacttgtttctttaactcaataagttttatctgtaggggcctcggcccctccagtttcatcaaaaaagaaaagaaaaagaaagccatgattcaaatttcatttctttgtggttccttaagtttttctgtatcctaaattgagtcagtaaatgcattgttataactgtctggtgagtctggtgtcttctaatttttcatcaattcatcataaaaaccatcaaactgcaactggaaaatttaccccagggcctatcatcactcttcttttgttccgcctgtcccatcaattgccaaattaattatttacttactactttaccctttacattcaacgcatgaaagaaatgctgtgtttttatttgcctgtatcactgttgcagtctcttgtcctgcccttttttggtttgagttattatcattgatactcgtaaataagagtttgaggaaataatgtagggataggattaaagaagctaaaaaatgttcttttccccattatttaattttgacaagtgtgcacacagtggcaccgtattcttctaacaagttatttagactagtcttgtctagcttaccttttatctttttaattttaccttcaggcttcgtttgcccgtcacatgtctagccaaggatttgatacgtggatagttgaagtaagaggtgctggtctgagcacgcgtgaatatgatgattctgctccatctggctcagtcacttttgaggatgtctctggtggtattcaacctcttaataaacagattacattcgaggctacttcccttcagagttctggtggctatgctagtgattgtgatgaccttggaatagttgctttggatgaaccacctttacttgctgaactttctaatttttttgatcggatcgcaaagctcatggaagaggctgtagttaatggaaattttcatgagatcacagaaaaagtttctgttctctcagaaatggtagagagctctaccattattggtccagtgagagaagaaagtctacgtcttttgaagaattttcaggaccagttggattcgtgggagcgttttgtagcaacacagatgaatctgacttctgaatataattgggactttgaccattacctagaggaggatatacctgctgcggtgagtggaagtgctcttttctaaattgttacttaccaaattgcaggcagatttcattgctattagtgtaatcatgattctttttaatgaatattgtcaagtttaccatttatttgtacaggtagagtatattagacagcacagtaaagcaaaagatgggaagttgcttgccattggacactcgatggggggaattttgttatatgcaatgctgtcaagatctggtgaggcactgatactgctctttatctgagctttcatgcagcctcctgtctccttcacattttatcccttttgttctgaagcacacatcaaatgtgtatttttatttaattaactgagccagcaagcatattttgtgtatatcagttaagctttccatttgttgagaaatatcataattctctagagtttatgcctttctatgtatcaccatatcttatttaattttctccaatcttcaaggttttgaaggagtttcatcaaatttagcagccattgtcactttggcttcttctattgactacacaacatccaattcatcactgaagctgttactgcctcttgtgagtaaacaaaccggctgcttgagatgatctgtatgagcattgctatttaattgattcagttttcataattcaaactatgctaatgtgtttgttatcaggctcatcctgcacaagctcttaatgtccctgctgttccattgggtatgttgttggcagcagcatatccgtgggcatcttgtccaccatatcttttttcctggcttaatcctcaaatatcagctcaggacatgatgcatccggagttgctgtctaagcttgtttccaacaacttttgtaagtagcctttctaagcttgtttccaacaacttttgtaagtagcctttcgtaatgcactttcttgtcttcatgtaataggatttctcttctgcatttgtgcatttgtacaacctctggatccatataattagtctagtcatgtgctacttctgatagttgtgatccatatatgtttatggaagctgatataatcgtacggtttgcaggtacagtgcctgcaaaggttgtcctgcaacttacaaccgcattcagggaaggtgggctgtgcaaccgaaatggaaccttctcgtataaggatcatttgcaagagtgtcagactcctgtccttgcattggctggagataaagacctaatatgccctcccgaggctgtttatggtaggtagtgcatggcttttgtcttgtgctagcttaattacttcgctgtgcagattgctaatttcagtttggtctgaattcccattgttagaaactgtgaaactcattccaaagcacaaggtgaactatagggtgttcggaaagccacaaggcccacattatgcacattatgacttgattggaggtcgactggtatttactctgtctgatgactcctagcatgagttcaaattgaattttgacatgttttatgggatctatctttgcacatcactgatgcgatttctgttttgcacagcactgatatgatttctgttttacgtaggcgaccgatgatgtgtatccatgtatcatagagttcctctctcgccatgatggttgttgatttgattatatgatgctaacaccgggtaacttaacatgttcatctcaaaggttttaaagttgagctgaacaatcttttccacggtcttctcaatcaatggctagaaaataggtgaacgcacgagctctcgtgtgtgttggagaaaacaaatacacgagctcatctgatgtatccttgtaacaagcgtcggttagtgcttctctctttccccttttgaggaaatgttagtggtaattttgttatggaaaaaaggttgaaaaaattacagtagttacatgtactcccaggaacaagaagccgaggttgtaccatggatctcatactacgatgtaaccttttgtttgttgttttttgaactcaggcggatactatgttgacatgcaagatgtataaaactgtagatttctgtggcatcattctggcagtaaatattataagttaagagaggaacatcgaaacattgcatgtgcctttgattacagcagtctgtcagaggctcaatagactttatggatgttcaacaaagcattgtgcttagtgtctgtgcacatggtgactgactccacataggcttttgtttctagcagtatcctttttctgaagaatgaatgatgatgcccagcaaggcaacaagacagcaagaggtttggaaagtcaggacatgatgaatttgatccttgtttttttttttcgctttgatattccgttgtgacctgagatccacattattttgccagttggcctatatagtagacaaaaagaaaggtggcaactggcaacaggaaacgtgatggtgccttgtcatgtgcgctgctgccatgaccattgccgacgggtgctatgcacatctagccagctgaggcccttttgcaacgcaggaattgcagaggaagtttattttcacagaaaaacgcagaaaacatgaaacttttctacaatccaaattccaaagggggcctaagatggtatggttggtgtttacgcctatactacttaggaattaacggtacacttggattctttgccccaccactgttttgcctagctg

SEQ ID NO: 4786 - DNA, 7173 bp, Sorghum bicolor
ttttagacaagtgaacaagaggatatataaactttaactttttcttgagccatgaactttggtcaaattcagttcttttgttttcaacatggctgggatggttatgaggttactgctaattatctgggtggctcttgttataaaatctgcaaacaactacataatccattggcacacaaaaggacacccgaattgatttgtcagctgaactaagaaattccgacacctaaattgatttgtcaactaaagtaagaagttcgcatgttccatagattcgaaccaagttaatcattcttaaactttgactaagtttatagaaaataatatcaatatttatatctcttaattaacatgttttataaaaacatattctatgaatataatcaataataattatatagtgtctcatccggtgtctaccttcgctttccatgtctaacgttggaaaaagtctacatcaccccctcaactatagggtggtgtctactttacctcctgaactatgaaacagtctaatttaccccctgaactatccaaaaccgttcaaatcaccccctaggtggtttttaacgtcggttttgctagtaaccatggttttgctaatctttgaaaaatcatagtaaatcacagaaaaatcataaaatagaaaatctaattttgttggacttcgcatgagtagatctatgcaatgaatatataatatggtatactttagtacattttttctgtagctttaaattagttagaaaaaaatcaaattttatctataattaattggaataattcatagttgcagcttctatggtccaattgtggtgaaatttttatggtcgactaattattctatgcttgaactatagtaaatatttcatactcgtcggatcatgtataacttagttatatatttatttatatttaacaagcataaacctgaacaaatctataactaagttatatatgatcaaatgagtacgaaatttatactaaagtataccatattatatattcattgcgtagatctactcaagttgagtccaacaaaattagattttctatgttatgatttatctgtgatttactatgatttttcaaagattatatgaaaacaaatagaaaaaaagaaaaaggcaaaaccgcagtcactgtagcaaaaccatggttactctagcaaaaccgccataaaaaatcgcctaggggtgatttgaacggttttggatagttcagggggtaaattagaccgtttcataattcggggataaagtagacaccactccatagttcagggggtgatgtagactttttcctgtaacatttgtatctcttaattatattctatgaaacatattcaacgaacagataaaactacgtcttctttggccaataaatctgcccccaaggaggatcgacctctcggtggtagggtgcaaagcacataaccagaccaattgggtctagtgttcgcttgcctcgacggtgggagtaactgtcacattcgacgatgtatactcaacttgggtaaatatactagtgccgtcttatatgtgctctcatatagtgccacatatttttaaaacaagtctcaagttctaaattttagctcttgagatgaatgttttcacgaaacaacgatattttctattctctcttttctacatgtcataaaaaaccttacgtgacacctgactatgtgctcgctaacatgtggtaatgtgcttgtagtaccaacaaaggtcgttatagcttaattggctggcgaaagtacctatggcacgaaacggagcacgctgcatctttttcggcctatgcaatcactgaacgtcaacactgccagcgctgcagtgtaaaacctaatcaacccaaaatgtcggtaacggcgatgaatgaacgcggaagagtttttccggctatcgtttgtgcttatctcttcacaaacacaggcccaccgcccaatccatcctacttgctccgtatccatctcctgatcccgcgagttcccgtcctacttgctgcagccgtctccactctaaccctaactgtttctgagagaaaagaaaaagaactctccatccctagtggcctagtgtgagccagccaagccagccgagcacagctccggcgactgatgtttcaggaccccgttccgttctgctgcaggtccaccccctaattccttctccttttcttttactttttaataaaaaaaggggtttcttcttttcaagattcttgtaccgataacccgatcgagttctttttattctaatttttgaaacgaagtacaggttccctgatatcggcggccactgccagcagccgacttggttcttggtcccttcacttccggcggaatccgttgcggaccacctcgcccagctgctcgcgacggcggctgataccctgagttgagtggtaagtgtctcatgtctgagactgagagggctccgagcgttcccccactttcgttggttgcggcgaaattcggcgcggttccgtttccttgcgctgattaaatgtcttcgttccgagtgcttcttgtagagcggcggtggcgtccgagaatcgatctgaaccaacacagtttatcagggagggaggagtgagttgggtaagccctctaggctcagagaaaccctacctttttctaattttctttgtattcattcaggagtacaggctgaagtgtcaatcagtaacaaatctttgtcaagtttaatgggaatcggcacctattgtcaactagtgttttgtgtctagttttgatttttttgttgctggacttgtctgcaatttgtatgaaaattactcccatcttttgtagagtcattagtcgctagtatcaattttttttatgagtacagtggtagaattagcagtgcccagcttctgcataatgggacctgtgcattttccaactcaaaccttttctgttcattcagtctttttttgggattttttttgtttaaagcaacacgagagagttactcctgcaatgcttcagttgagctgcagttatatgtagtcttatgtggattatattattttgaatcactttatatttgaagcacctttacatttgtcctctcctgaatccattcatgttgttttttttggttaaacagttaaatggattacctttttttttggactatgctgcatattctgttgaaggggcatgttatcattgtttgagccatggaaatgttgctgtcccaggtgccactacctggagccagacatagtccttcatttgtactaaactgaaaatggacattaccagttgattcttttttttttcctttttgaatagcttggtctttttttcgccttgccctccttaggactgttttggacttcatattgatttacatgattttttttttgaaatctaattgtggttatttacacaagtggttcttcttttcaattcattgtaaatgtttaaagagtttctgttttctgcacaatacaagctttatgggataatgttttttctttcttaacacttaagtaacaaattttggaccacatgagaatacattctgcttgaaatgtttcatgacccctgttctttctttttttcttataatctcctcacatgtcatcttcagtccatgcatgactctatcttttatttactaactatgaagttctttcttttgcttttcaattccaggggagaatgcctgatatccagctaggatgccacactatacagtcccatggcaccaaagtggcaagattacacatgtatgactggattatacttttatgtcttgctgtatttgatggactgttaaacttaatcgagccctttcaccgctttgttggacgcgacatgatgaccgacttgagttatcccctcaagggcaacacaatcccattttgggctgttcctgtatgtacttactctggtacttcacattttgatttcaaatattgattttaactgtgtgctatgcacaatatgtcctgaggcatgttatttttttcttgattacagctgattgccatagtgctaccttggttcatctttggtgtcatttacttcaaaaagaaaaatgtctatgatttacaccatggcatactaggtacctgacattctaaagatgttatttgtcaatagacagttttagtttatgctgaacttaaaaaaaattatgcagggatcttatactcagtgcttataactgctgtgatcactgatgcaattaaggatggtgttggccgccctcgcccagatttcttttggcgttgttttcctgatggcaaacctgtaaatccttccatcagtgccattttttcttatgcaagcatgcctgttgatatgctctaaattcaaagtttaaagctcccgtagtcactaaatctaatattgttatccagaattatgataatatcaccaccgatgtgatttgccatggagaaaagagtgtcatcaaggaaggtcataagagcttcccaagtgggcattcttcatgtaagaaatgaaattgcttggtatataatgtccattatgcttcttgtggttattttgatatgttgtagtggttgattgatccactaccttgggatgtagttgtggcaactcatgttgtagtggttgattgatccactaccttgggatgtagttgtgagaactttatgaggtttgacaatacttgcttctgtacatgaaacacttgttattttgaatcctttatgatgcactaatccttcatctgagttcagtcactgtttatcttttatattctattgctggttaatggttttgttccagcactctcctacattagaactttgcagagtgagttcctgttaagaggaaaaacttaggaaatttgtgatgcaatctcaaatctttaatctttaatcaaactagtacagtagtttactttgtcagtggttcaactttttttaattgaaaggtaatacactataatattgcaactacactaataagaaaagagaacatcggtaaacaactaaacaatgaataaacaaagatcaatgatttagttgcagtgctgatgcaattgtttctccacatgaataactttaccctgaaaacactgttggactatgattgtaactctcctttcatttgaggatatcctgtattttctgagaaaattgcagatttcctttcatgttatttatgtattcagaattattactttagctactgccctgtgcccttttggaattgctgttttttcttcctaatacagttctccaaaatcttaatgaatagctatgtctgacaatcaaagattatccttctgataattcttgtcacgcagtacacagttcccatgatactcatgaattctctcggcattggttacttgttatatattctttagctatatttccttttgataattcttgtcacacagtacacaatttccatgatattaatggattctcttggcattggtttcctgttatatattcttgagctatatgaattatacatgttagcagcatttggtttcagcatatcattttgaggcatgcatcacctttgcaagcaattcatttggtttcagcatatcattttgaggcatgcatcacctttgcaagcaatttacgctttctcagtctatatatatggctctgagggggtttcctgctgggtgtttgccataatatgctatccccccccccccccccttttcagaaggtgaattgatggatctgtttctgttctttgtcacctactgcagggtcttttgccggtctaggttttcttgcgtggtacttggctggaaaacttaaagcttttgatcgcaaaggtcacattgcaaaactatgcttagtttttctgcctctacttgtcgcgtcacttgtggcggtttctcgagttgatgattactggcatcactggcaagatgtttttgcaggcggcatcttaggtttgctactatttgatgcccttctgtatttaacatttagaacaccctttacaatcagaagtcatacatcgagtgtcattctcttatttcttttcaggtcttacagttgcttcattctgttacctgcagttcttcccgtttccctttgacaatgatggtacctttttcgcccttctctataatatatgctcatgagatattgaactcatacattttactacatgttcctgttcctattcatttgcagctctatggccacacgcatacttccaacagctagctgagacacacagcaatggtaatgcaaactcaatcaacataagacctacagagtctgaagatgaacaagaagaccatggtggcattgcccttagggataccagccctatcttggagtcaatggagtctggccggagactatgaagaagcatgccactgtgagtttgtccaaggtgcaaattcttccattccttcaaattctggaagcacaatgagttgtggtttcaccatgtagctgtccaatgtaaagagtatggaggtatatctaccgccttctgatgatttgatgatccacagtttcttgtaactgcccagcaggccttaataccatggaataacatgtgttgtggttagctgtaaatgacagtgaatgtttatgtttccagtgacaatgtgaatagttggttttgcactgctgtggtatggaaagtttgtttcaaggttccctttggtggtaatgaaattgtccgacaacctgcaaatggattgcaaactgtctttagaattcagtatttatgcaattctgacaaaattttccaccttctcagattcagtcatgtcctcaattttcggattcattaagaccacatttattgtttatgagcagacccacgagtaatacatctgctgtgttggaccatgaataatttgggtagtactgtgactggtgtctggtagttactgggtttggtttggtccgtccgcaaggggcttaggcccttgggctttttattaatcatctaatgaccctgtgtgtagtaatgaagaaagcttgaacctttgatcctgtttactgtaaacattgggtatgagcatgtcactcgtcgaagaaaaaccatgggagtataatgctggttttttttcttcatttcattgtgttctgcttattttctgtgggtgtattttgagtgatataagactgcgatttttggttgctactcatcagcatgtatcgttttcgttttaaaccgaaacatga

SEQ ID NO: 4787 - DNA, 3577 bp, Sorghum bicolor
agacatgtcgcacagatagcttttgccatggtgatgttagtcaccaactcatcctattcatagatcacgttgacaatcgctcatcatataacgaaccacaagggtacttctcgaccttgtgttcgcatcaagtctccatatattgggagatcaagtagcaagagtagtagtagttagtctagagttggagttagagtttagttgagcgaagctcggggtctctagagtcgtcttctggagagtctgtatatttcttgtaccttatcttttttgtaagacttttcccttatcaatatattattcttactttactttacttatgttcacttattccaagtctatattcattatagtcttgttgtgcacttgtcttagcaatacagttgtcctagttagactagtttcctataacacctccttatgtttgcatcattgtcctatctcttcataggagctttagctatctacgcattagctagagttgtgagagtaagtatgagcatggtgctcatacttagtcttacctttgattgtcgctggtctgcatggacaattcgtgggtgctagcaagaggtgatagattgtacctagcttcataggtttccgaccatgttcgggctagttcttaaaaggcaaggcatccataagccaagtagtcactttagtagaggttttgtcttctactgtctcggctatccgtcgcacgcaagtagcaaggcagcaatctagttatgccaggtatttgttaagattaagttcatagaagtaaagttagataaatacaagtcctaaagtcactcattgtcgtcacacctagctaacactatattaattatctttagattagactctttgctatcacatttacctatccttcttgtaatttgtttacccccttcttcactatttgatactatattgtagtagacataaggatctcaccccccttttattaaatattcctagctatcgctttcccttagtataaaacaaacaaggataccttggaatactcatccttagtgaagcgctacaaatgtacattctgtgcgcttgcggaataacttaatagacataagaattaccccacatgccataatatccatagagaagcaaacacaaagcaaagcgtgggagccagtggccaatacaaatcatattgataattatttggtaggtcatgagcctttgtatgactactaaggcaatggttgggaggattataggtcttgtcctatgctcaagattgcctaaggagatggagtctacgctcgctgatgcactttctgatgctatgctagatgttgtgtgatctaagtgattccatcaagtggtaatgtaataataagtaaacccctctgtttgtactctttaagatagttattcgatgtatgacttccttctagttgtccatatctataaatccctatcctattcaagtctaacttcttaagaataccatttggtacttcaaagaaagacattatatgaaatagtgtttgtcaaaattagtgtgccaccctaagacaaaggcttccgatactatacttacatctcctgcttggtattataatgaaacaaggggaaaatggtgtgttcattaaatatgatgtttgtgcttcatcgtgatatagtaacaacacatatacaatgatgtggtaaatttaagaaactgtgaaataatttattaaataaaaatgatggctcctaaattttatatgttatacaatgtctcaaatttttgcaagctatatcttttgtattgcgatatatgatagatggatctcacatctatccatggactacatctttatcttgtcatcaccatcgctacaagtcctgctagagatagagattgaagcctatctagcttcaccgctttagttcatttatttatatgacaagcatatcctatggtatcgagttatgttataaatacatatgcggagtctcatattcctcaatagcatcacatgaacaacttacctcagaggtttgtgatgtcgacctctaataatggaaatgatccaaaggggaaaagtgtgatgactaccatcactaataattctccttgggtgctaatagttgaaaattgccaagttgactactttgttacatcttatctcttaagaggccataatgttcaaggtatatatatatatgttattatggacttctacttttgttgtggaaaaaaatctttaaagggatacctctctcaaacctactgtacatgttgtcacgcaaaaaaaattcaaaagtacttacattctcccatagcgtttcttttatttggtttcattagattcaacttgaaataataattaaaaagaagttagaaccattttttgaaagccatatatatctgtgatttttggggtacttcatatatagttcatgtacaactatgcaattgttctttttagtggcctaagtgatatgatgattgatttgttttagtgattgctgttcaaggtcctctgcaagcgttagagctcctgaatgcggtacatctttagttttacaaagttttgtatctcttggtataatacaatctcttggttcaagtgaatttatttatgtgtatgattttttttcacaggaacacaatgtgaagctaattctatctaattattggatgccaaatatgactggatatgacctactgatggagatgaaggtacaccactcatttccttttagaaaaaagaagactttaagcattcttgccattggatttccttactgctacaatatattttctctgtagtgtctttgagtatctcaaaaataattctctacaatagctaaaacatttatgttttctcccacttagaaatcacctaagttgagccacctcccagtggtgattacctcatttgacaaaagtcctgaagtagttaagaagtaagtaaatgcaaaattatttgtaatttagttgattacacattccgcatgagtgcctaatattgcaaattatatttatgatatacaggtgcttggatggtggagcaaaggactacatcataaagcctatcaagcatgctgatgttcctcgaattctaagcttcatttgacgagaggagcacaaagacagtgaaaaatgaaggaatcgaactgttgtatgggactatctatcatgttatttgttaaccaagaactcaatatataaaggataatgtattgccttattccatcttcccctataaattgttgtatggggatggagatggtaatcatgggatccaacaatctccttttgatatttctggaaattgacaaaacaaaattctcaccaccccctctagaaagggggacatgccaccccattttcattgaccaatagtttcattattattcccatccactcccacccatgtaggtacatcgccgtttaaatgagtaaattatattacttcaagtccaaaatctacttacaaccaagcacctcacatgtaaccagcttgcatactagggaatctctctagctttgtaacacctaaaatttgaatttcaattaataggatttaatttgaattatttaagaattttagtgagcatttaatgtagcaaataa

SEQ ID NO: 4788 - DNA, 10566 bp, Sorghum bicolor
gaagtctcactccacaccacatgtgaccggttgtagtacgtttggccttttttggtttagtgcttccaagttactaacaccctgagaccctcttgaccacttatttatagaagggaaaaggaattataggaaatattcttttgggatatgcccttctttttgtaacgtgtgtacgtgcatgcatgtcaaatgcgaaaatgaggcatggatggatggattgtcaccgctgttctttttctttttttttggtgggggtggggggcgctatagaagaggttcaatcattcatgttttgggtccattgtttgtcccccaccccaccatgtgaatagaagcaacaaattaacgtctatcgtgtctgcaggcagcacgcaggtgacactgattggggaagacgcatgggcagcacagttcatgctcttgttttggttggcatatcagcagtagcacaaaagatgactcgctgggacaccgtggttgaagtaaaaagcttgcacgagggcaggggcatctagggcctttttagttcaccccaaaaaccaaaaagttttcaagattttccatcacatcgaattttacggcacatgcataaagcattaaatatagataaaaacaaaaactaattacacagcttagctgtaaatcgcgagacaaatcttttaatcctagttaatatatgattggataatatttgcacaaataaacacaagtattacagtaccaaaatccgaaatcttttcggaactaaacgaccttgtttagttcaccccgaaattcaaaaagttttcaatattacctgtcacatcgaatcttgcggcacatgcatgaagcattaaatatacacgaaaacaaaaactaatcacacagtttgactgtaaatcacgagatgaatcttttgagcctagttagtccataattagataatatttgtcaaataaaaacgaaagtgctacaataccaaaatccgaaataatttcggaactaaacaaggcctagctatcaaatcttttttcactcacaccgacgttcacgggagacggagactgggccttatttagttctaaaaaattttgcaaaatagaaatagtagcactttcgtttgtatttgacaaatattgtctaatcatgaactaactaggctcaaaagattcgtctcgtcaatttcgaccaaactgtgcaattagtttttattttcgtctatatttaatactccatgcatgcgtttaaagatttgatgtgatggaaaatctgaaaaattttgtaaatttttttgaaaactaaacaaggcctttaccgatcgagatgcgtgaggactcgctgcttctcctttggcctttaggtgaagcagccgcgtcttgcaacaccgttgccggaacgtgctttagcatcttcctaaatatactaatcaaatcaattccatggctgggaagtcgcccctgtacaatactcactagcttccatacagtacgttgcgtttgtcctccagcttggcatccatgccatgccattgtagggcgcacacgccagaatgcggtccggagccccgtcccgaagcaaaacatccatttccagcgacgcggagcgcgacccgcgagatagtggtggccggccaccaaggccttgttttagtttcgaaaagtaaaaaattttcggtactctagcattttcatttgtttgtgacaaatattattcaatcatagactaactagaatcaaaagattcgtctcttgatttacagctaaactgtataattagtttttgttttcgtctataattaatatttcatacatgtgctacaagattcgatgtgacgagaaatcttgaaaatttttttggcccaagcccgcgcggcacgaccgacaacctgtcgtccggcctgcacccgctgcagcgcgggccccgcccgtcaccccggcccccccgcaccggcgccgccccagctgcacgcaactcaagcgcgcagcgcataaacttggtcgctccctccccccacgcgtggtcagtcgtcacccttcttcgcttccactcctccccaccattccgaagcttccacgcctttccgcctgctgctcctccaggctccgtccggtcagatccgcgccccctcgcgctctggtcgaggaggaggccggaggccggtgccgcgtgcgtgggtagcttcggcgggcggggagagaggtagcagcagcagcagcagcagccaggtgccatggcggtggagaagacgctgcccggcgcgaatgccgggaggaccgtgctcgtcacgggcggggcgggctacatcggcagccacgccgtgctgcagctcctcctcgcgggattccgcgccgtcgtcgtcgacaacctcaacaactcctctgagctcgccgtccgacgcgtcgccgcgctcgcgggggaccactcgcgcaacctctccttccacaaggtcacgacgaggccccactcattcctagccttcttcttattcttccccgtggatctctctctctctctctctcccgttggccgttcccgcgcaatgtgacgcccctcctcccctagatctccgcggtgtcgtcgtcggcctaaattggctgcgccgcaggggatgcggtcccgccgtgtttttttttttctttttcgggattatattatttcacccactgccagattattagctataacaatgctgaggtcctgatttggcaggcgtctcttgtgctgcttttggtgccgtgtcggtatacaatctgattccctttggcttttggtgtttcaagtatagctgctcactgctgtggttagttttggggaatcaattgcgacattgtcacatttcgtgtaattaaacaaaatttggttcacatggattactcatgattggactttcatttagtgctgcactacagtattggattactcatgctttggttgttttgttaggagatttcacaatttgattctgcattccgagttattttttttttaaaatgatggtgtgcgtttactgatctatggtaaagttgtttccattttatttactacaagtaggaagcaatgcttctagttaaccttgtcttagagattgccaattgttgatggtggttaatgtgaatttaatggaaactaaaaatgatgattactgatagtaaggattttcataacatggtgttgcctgattgcctgagaccataatggtgagatttctacttaaaggcatttttgctgtaaaatccatcacttgaatgtgagcatccgtggtctgttacttgtaagccataggatgctcagatctgttttcttggcgttctatttaagtagctttagctccatctgtcatagcttgcagttaagtgcagagggtggttgaagactaatgattcagctctgcaaatgtccagttggcagcattgcatgttagtagctttgaattatttggccagctcattcagttgatccttgcctggattgttaggtttgtacaattggcattagtttgggggtgggttgtggttgatccacccacgatgggactgtgggagttgttggctaaattttttttttgacttatgtctgcattaagtgacactatgtgattatgtttcttggcttttcgtgttctgctggttatggacaagggtttgcctacctatttttagaaatctgaataagtaaaatttggaaggaggctgtgtgctgtgttcgtcaacacaacaattcagacctaaacaactataaagagggatgcaaatgagattttagttattcaaatatttcacaattttttggaggatctgttcatgttacaacacattaaattatctcatgcttcctgaggatctggtctaatagaagaacctgtgctttagcaaccaacctaatgtaaagtttgtcaatactagcgcaaaatcagtgattctaatttgtaataactaagtgtcacaagtagagatttgttccttattactttgaggtgcttttactttaagatctagaactacctttttgatgtacggaaacagtttccatatctagaacttccttgtgccattccccatattcacaaagttactattggatgtatgtgtgcatctgttgccctgtaaaactgcatctgttcaccagtttatgcttggagttttctgaattctattttatttggatgttcctagtctttaatacgtttctatcacagcgttttgcaaagtgagtattttatggtgcattgtgtgattttgcagttttgctaaatttttatttgaaatagagcctggattgcttggaggatgaacaacattttattttcatcctgagcaacctacttcagtgttttgtttgttaaatctagggtgtccatgcctgtccatagtaaagtatgcttgcttactttagaaattcacatgagcactcctgttgttaactattaacctagtaatgagtaagggtcagtaatacgttgctttttaacgcattggccacttcatttcagctctgatgcagtgtagttactgctcagtatttagctgctttgattgatttttcatgcaggcagaacgtaccctcctctgatgttgttcacttgttacaagatggcgtatggtgttttgccattttactacataaatattcaaactctaacattacagccttatttgattctgcagattgatctccgtgacaagggaacgctggaaatggtttttgcttctacaaggtagaattaccagctgttcttctgtactggctttgttgaattttcagatcattatgaattcctttttcctttatgcaaatttgcatctagcgtcttttttattattagacaatttgcccttcagatttgatgctgttgtccactttgctggattgaaagctgtgggtgaaagtgtacagaagccattactttattatgacaacaacgtcattggcacgataaatcttctagaagttatgtctgctcatggttgcaagaaggtatccatctttattttcccactaacttccactggagtcagcacttcaagttgctactatatgtctttcctgaatttgtctgcagttgtatgctaggttattactttgatttaactataggattgcttattaggtcattttgttgacttatgtcttattctgttgcaccctgtgcatcaagaattaactacttgagtttgtataagtgatcttcacatgctattattgggctatcattgttttaattgttcgtgatcttcatgttaggtattacatatttccattgtgtggaagcttttcagttgctagtgcatcttagtagctcatgttattactgaggtgtcatctgtgttctagttaactgtagttactctgaatgcatggtggacagatgccagtgtgtgcatttctttggacccattgggcataggactttttttttttcttttattcaaggtgaacatagactggatggttctggttagaagggaatgcacgatggtgtccctaaactttccccatattcccatctcatctgtgtccatgaactctcaaagtgatcatataggtcctccaactttcaagtggttcaaagtataaattcggtttcatgactggacctatagtgagctttgaatgaaccacttgagaagttgaagggcccagatgaacaatttgagagttcatggacctagatgataaatgcagaaaaaaaatttaaggacccagggtgcattttgctcttctggttacttcccgttgtgcaataaaatctctcggcatttctagctgagctagtttgtttgttattctaatctagttggtaaattgatcactggatgcggaatgcgatcaattaatagtcaccctacttgcaccatctaacgtcgtccttcttcctcgcctcaccttccactctgcctccctcttgacgtgtgaccatgacccaccctgagccattacgggtgtgtttggtttgagatttggggtttggggattttggtggccctgtgaagttttgggttgggatttggggtttggggattttggtggccactggttgtagaggtatggttggggaggttgtccacccagcagtggtggtggattgtgggcgggccagcaaggcggcaggggcactgaccagtgaccactgcagtggtgatggatgacggttcgaggtttggggattttggtggctctaattgtagagaggtggttggggagtattgagttgcatgcaccgaccagttcaacccaaaagcttaagctgatagggagaggtgggcaattcacttatattccaacactccccctcacgtggaggctccctcaggcctcagacgtggaataggagcgagcaacaattattttatttaattgtgctaaccaggattcaaactcgagacctctggctttgataccatattgagttgcatgcaccgaccaattcaacccaaaagcttaagctgatagggagaggtgggcaattcacttatattgcaacagggaggaagactggcagctgtgtgggtggtgaagaagacttctccgttttatcagtttccttctgtctgctttgatactagttggatggtgaagatctccaggacgtgggaacccctgggcacagtttttgctttgatcatatttaatggtgtcaatattggtgcatatgcctacacaatatctgcttccccttttaataatattgattaattgcattattaactgtataattatttgcattttttctttaagacatgtttgattagtaatgctatggattggcaaattgatttgtcataccagactgacactgacatattatatctccttttgttttaaaatgttttagttggtgttctcatcatcagctgcagtttatggatctcccagaaactcaccttgcacagaagagtttcctctgactccaaacaatccatatggcaaaacaaaggtctgctgcctctttttcaatgcaaaaaccttctgaagtttgttggctctccaagatgactgaaaattttcaaatggttgcagcttgttgttgaggatatttgccgtgatatctaccgttcagatcctgaatggaagatcattttacttaggtacttcaatccagttggtgctcatcctagtggatatcttggtgaggacccacgaggaattcccaacaatcttatgccctatgttcagcaagttgcggttggtaggaggccagctctgacagttttaggaaatgactatgcgacaagagatggaactggggtaattctgttgcatatgatatgctcaattatgtttttttttgtataccattcaaattgattaatctgatgcatttgaaggtggatattccgaataaaacagtagtcaattttctgtcagaacctaacaatctgtggtcggtatagaagtactaataagagttctaaaaactgagcaaagtcattcctgccttaaaaaacttgactaggtctgtgtttatacaacttgctgcctaatgcattgatccaccttctcgttgaagttgatcttcaactacacagatgaagatttcctataatttactttttttcctgtagattactatgttgcatagttttcacctttttctttctcttctttggcaccttgctgtttatatctctctatattttttcctctgcattttgtatcattgctatctgactctcttttataccacagtaggggaattcttgtactgtatttcccttataagaagattaattcattgctttgacatttctttgtaagccacaagcttaacttgaattctggatataaccatctggctgaaaatttggaagattcttacactagaacttatgatacccatgtgcttcttacttcagtcaatttagttttacattgcatatagttaatgattttggatcagatatttaggcatatcattgtgacatctgcggttcacatgcatgaggaaatcatcccatctttaatcagactatcttctcatctttaatcagactgttgtttttacaggtccgagattacatccatgttgttgaccttgctgatggacatattgctgcattacagaagctttttgagaactctagcataggtgaacactttgacattaaatgatcgttgaatttctttccatcatttactgtatactttaaaaaaactaattagaccaacctaggataaactaaggtggcatttattatattataagaagaaaataggctcccaaattcgcctccatgaggacttgaacctgggtgacttggggtatacatcaacaccctcgacaaccgagctagtttcagcttcctttgtatagttgtatacttatttgaatgcagtaacatttctgttaggccttgtttagttccgaaaaaattttggatttcggcactgtagcattttcgtttttatttgacaaatattatccaatcatggactaactaagcttaaaagattcatctcgtgatttacagacaaactgtgcaattagtttttattttcgtctatatctaatgctgcatgcatgtgcttcaatatttgatgtgacgggaaatcttgaaaagtttttggttttcagggtgaactaaacaaggccttagttgtattttctttagattcacaaattttattttgttttcctaggttttttaacacaaaatgcaggcttgtacaaggcacagaaatacatactgtttggataaatatactttttacagcatgcataacagatatgctcattttatgtaatttgcatttgttcactaaaatcaaacatttgggatacatgggtatctgtccatattttctatttccctcgtgtgaggtgcttgattcagttgtgtttatacttttgaatcttgttttaaaatttgatactatttgcagggtgtgaagcatacaaccttggaaccggaagaggtacatctgtgctggagattgttaaagcgttcgagaaggcttctgggaaggtatacaagataaacaaatttaggccttgcatgattattagcattttgcaatgcagcttacttgggtttactgccttgataagctttcgtttatgctcacatgtgatttataaggacatattttttgctaccctgtagaaaatccctctgatttttggtgaaagacgccctggtgatgcagagattctcttttcagagactactaaagcagagagggagcttaactggaagtaagtcatataacaagacataatatgcttatcatgagaaaatggctttattatatgatcaacgttgtcttcctctagagcaaaatatggtattgaagagatgtgtcgcgaccaatggaactgggccagcaagaacccttatggctatggatcgcttgactctaccaagcagaatggccaccaaacaaatggatctgctgactcctccaagcagaatggccaccacacaaatggttcaactgactcacccaagcggaatgaccactatgcctatgggtccgccgactcacccaagcggaatgggcactatgtttatggatcatcagacttcaagcagaatggtaatggtcacctgcgctgagcagagctgtttgacctgtgagctccctgtacattcggtcgcgatgtgagctccctgtaaggtctatcgtgaacccactatccgagattgatgtggatcattgggttgacaggtcatacagtatagagtcgttggcagcggaattccagtttgctgtgggtaaagcctatcttctgcgttgtttatttttcccttcttgcaattatggtgtaggaatgtggtcatagtgtatcagctgattctattctttccctgctaattgaactgtattacgcttcatcaagtttggctgattactgtttaacggggaaaacttgcacctgtgtatgattatttatttgtacatgtactatgctatgtatgtatgaaagggagaactagcctcgcccgcgatagccctgatgaatttagccgcaattgctcccagatcagactgttgtttcatgtgaatgtacatatgatgccgctgcaaactttgagcagacaaaagtcgcccttttttttagggaacaattattaaatgttcgcttcccaaatgcgttggtcttgctctgaaggattattacgttttggagccatcgtgccttgcatgctaaccttgcattctgtaacggtttgacgtgaaacacattttcgtgcagttcgtgtcgcgcgttgtgcagagatcagataactaaagaaaacggtgaaagcctcatgattctggtgcctgctcttcattttaagataaagaattacaaagatagcatgagattcaaagctagtgccatcagtcaggtatctaacttcagcgggacgacagttcaatctccctttcattagctctaaaccctagcaaagcaccatgcatttattagaccgagatcaacacagtagcttgcccctcttctttttaagataaagaattacaaagagagcttgagagattcaaagctagtgccatcagtcaggtacctaactttgacgggacgacagttcaatctctatcctatcattagctctaaccccaagcaaagcaccatgcacttataga

SEQ ID NO: 4789 - DNA, 3289 bp, Sorghum bicolor
aactatgaaaaagccactgtgagctatgtcctaacatgatctcgagtttttaataacatagatgtggacacacgatggaggggacagttcacacatgtgcagccatattttattttattgtatgtatatatatatataataacacaatgatttataatatatgactcaaaataattttgtaaaatttatttaatttgttggaagatgacgaatgaacgagaaatttaaattcgttttgttttcaacattaaaaaaagtaaagcttacgtgactgtaatgtaacatttttttattataacgtgactcccagttaagaaacataaaatagcatgtcttagaaagttgaattgactccaaaccatctcttgcccgacgatggccttccatgaagttgtaatagttggtggcaactaaaaggaaacaaattgcatgtacatatgcagataaaaggaagcaatatgttatttatttttctttttactacatacattatttctcttaatattcaagggctgagatttatttgaagtcttacctcgtactagataaaagttgtaccgtagcaaagctctgtttacaattatgaaacctacctaatttgcctatctcccttgaagcaacaatgaaacgtctctctgtttttatcaatttgaaaaagctaaagctaaaagtacaaatttgtactacgcaaaaccaattgtttagttctacctattttagttggctttctatttttttggtaatagaggcactgtccaaacatagtctaagaattgtctcacaagcatccaagcacacaaatcctgaaacatccttaagaataggggcaattggtgctaatattttggcacctccatgatggatccatcaatattcatacacacagagagacaacagaactaggaaaggaagagagagatgatatggaagagaatgcataccagtgaagtctgaactacagaggatgaattcttcattccattccggattggtattcttctctatcagtttatcacctgtgtcttcagctttcgaaaaatgatgaaaaataattgtaattagcaggactaaatagtggaaatgtagacaggaaaaactaaattcaaatattccgatgtagtcaatggaatgatgtactaaagtaggttcgagcctcttgagtgcaagcaaacgcaaggtggtacacacaggggcgacgtaacgggttggtggcctcctgaacccggaaccactaggaaacaacattttttattttcacgtttttgtatcattataattattagagcggtgggcattcagaactgcagattgcggtcgcaaggtatgaaatacaacagatccacgcttttatatatacaggactacaggagcccccgaaaccccaacgcctgatactatatatttgatcaagcgccctattcagttagctgataagccatgactgaaagtattgttcgctgacttgttataagagaaaaatattattaaatgactgacagattctgatgttcttccatgtctaggactgggatgatggaatagagattagaaagtggagttgccaccacgtttttaagataaaaatgttttcttattggctttagaactaactgagaacctgtcaagcaattatatctcccgacctttcttggaagcaagcccacgagttttgcttgccgtgctggcagtctttgcccccaagacacaagccacaccaccgtcagtgccacggctacgtacgtacaactcttgagcaaaactcataagcaatatcatggccattgctggctgggccactaatacaactagcactagcgatccaaatgaacgcgcaagccacaagccacgacggcctccctcgcctcctctctacactgatcaactccaagaaatatcatcaattaaaatgctagctagtagggacctgcagagacgagacgagcaatagcaaagcctactagctagggacagagcacaaagcctgaagagaggcgacgacgatgcagctagagaaggggtctctggacctggtgctggtgccatgcggtctggtggtgatgctgagctaccacctcctcctcctctaccgcatcctccggcaccccgccagcacagtgatcggctacgagaaccacaacaagctcacctgggtgcgccgcatggtgcagccgggagcgacccccgacgagacagcgctggcgctgagcgtcatctccagcaacatctcggcgtccaccaacctggcgtcgctgtccatcgcgctgggctccctcatcggcgcctgggtcagcagcaccaccaagatgttcatgacggagctcgtctatggcgaccgcagccaggccacggccaccgtcaagtacatctccctgctggtctgcttcctcgcctccttcacctgcttcatccactccgccaggtactatgtacaggccagcttcctcatcaccacgctcgactccgatgtgccggcgagctacgtgcagcacgccatcatccggggcggcaacttctggtccatgggactccgggcgctctacctcgccaccacgctgctcatgtgggtcttcgggcccatacccatgttcgcctgctccgtgctcatggtggccatcctccacatgctggacaccaactccctgcccctgcaccagcaccagttcacagttaggaaacggcacgagcagagagctctcacctcaaccatgcctacaaggcagcagcagcccagtctgcagaatccaatgctcagcaaccctgtcttgtcacctgttacatttttcagttgaactacaaagttttcagtaatgttgaagaacctgaatgtaggatgcaattaccatctccgttcaaaattttcacactacattacattaatgtggaactacaaaattttcattacagatactgtttcccaactaggacaactgctaaatagatactgatggtcgaatgaacagatcacgacattgccatcgaaatatctctccttttttttcctctatggaaactcatgattcagctgtggtcttggcttagcatactgactcggcagatatatcccatccaatatatgatttcctatattcatgatgttgccatatatataggtaaatcgtctgcactggctcccagtcctctttcgttagtctctatagaagaacagtggggacattggggtcattcccattggactcggtagttttcttcttgcctcgcttcttgagcttctttttgaatctgaattgttccttcatgttcttctcccatgctttcttgtgcttgttgt

SEQ ID NO: 4790 - DNA, 8003 bp, Sorghum bicolor
catctgttggagtttaacttttgctttcaaaatgtaaaaatagcctagacaacatggatagcatatctgttgaagttgctcttattgtactaaacatgacctaaataggataaagatacaccatttactgattaaacatgacctaaataggatcaagtatgttgcgattacgccattacatgaagcttgtgttcttatcaaagtcacctaaagttttccatagtccaagtcattgatatagactaattataatagatatgagagcatctactagcaaataaaaaacaaaatatgtgcatagaagactcatagttttgacttcggcaccataagatacaacatgattttagaaaaactatgaaatatagtttttttggtaaaaataatttttctatggatttttaagatgaaactaggttttttgattgcataaattttccagagaacaaattattcaaagaataattgttcaaaaagaaataatagttgtgtttatgatgtaaaaataaatggttttaaaagttgagagggttaaaaatctagttttataaatgagggtaacaatttggactatcacgaaagtttaagtttcaaaaaaaaatctttttcacttctaaaaaagactctacaaacgagagtgctggttcacaagccaccggcaaaaggcatacttgtcgtctttggcgcttcggctggaagcaggatgaaacggattcgatacgaacggaccgatatcatatttatttttatatttttgatcggattcagatttgtaacacccgccccagagtttaataggattaataggagactcataccaacaagttgcaacttctttttcggaagcccgtctccaaagaactctaaagttaagcgtgcttggcctagagcaatttagggaagggtgaccgaccgggaagtagttcccgggtgcgcacgagtgaggacaaagtgtgcagaaaagactagtgttggtctgtgggggctgactatgtcctagaaaagttgccagatggactatgtcctagaaaagttgccagatgtaagcggacccggcctcgtggaggcgggagccgactctcgcggtttcacaggcgcgtgtgcagaaaagactctgactatgtcctagaaaagctaccagatgtaagtgggcccggcctcgtggaggcgggacgttaccgactctcgcggtttcacgggcgcgtgtgaggacaaagtgtgctgactatgtcctagaaaagctgccagatgtaagcggacccggcctcgtggaggcgggacgttacagaatggtatcatagccgacgacaaagtgtgctgactatgtcctagaaaagctgccagatgtaagcgggcccggcctcgtggaggcgggacgttacagaatggtatcatagccgaaaagtgtgcagaaaagactagtgttggtctgtgggggctgactatgtcctagaaaagctgccagatgtaaacgggcccggcctcgtggaggcgggacgttacagaattgaatacgaaaaatatcaattatgttggataagatataattggacgtcaacattataaatatatgatttaaatattcagatacgaatacggtatcgaatgttgaatattcggattcagatacggacaaatctaaacccttctaaacgaatttggtctcaaatacgatcggggccttgtttagttcgcgataggaaatatttcgtgacactgtagcactttcgtttgtttgtgataataattgtccaatcattaactaactaggtttaaaagattcatcttgttaatttcgaccaaactgtgtaattagtttttatttttatctatatttaatactccatgtatatatgattctatgtaacagagaattttggaagtaaacaaggcccggaaaatttcatacctagctgcaactgcaagtgaaaccggcccatttccacggagtctaccggataggatttgtctcccctccaccgcccctctccatttccgccatggctgcggccgccgcgttcccgtcggcgtgcgccgctggttcccttcctcgtgcaccctccctgacccctgtgcgtcttcttctccccgttccgctctcccccgcgcgctgggaccgctcccgcggctgcagcagccgcctcgttggcgtaggcgccagcagcatccgccgcgcgccaacccttcgacggaacgcctccgcggagacggtggttccctacgtgccgggctccggcaagtacatagcgccggactacctcgtggtacgcagcacggttcactcgatcgcaaatctttgtgcacctcagcactcggcagtcggtgggttcgagtctgagcggtgctttgcattgttcgtggttgcagaggaaggtgtcggccgaggaggtgcaggagctggtgagggggcacaggaaggtgccgctcatcgttgacttctacgcgacctggtgcgggccctgtgttcagatggcgcaggacatcgagatggtgagccacgctccctgccggttttccatcctttggttctgtttgttcctgtgtgaatgatgttttttttttttgataacgtgtgtgactgatgctaccttggagaaattggctattataggactccaaacgttgagtttctctataataggacttctaacgtttgtttctcccaaataggactccaaacaattataatcagctctaatgacattttgtttcatttttaatctgtttggccatctaaaaatacatgtatttttcgtgttgaccctattacccttcaactattgtatggtgtgtgtggccagccaggtacagtattagctcatttgtcacggtcatggtcatcacgtcgcgtcggagtaagcccgtttatatgctttactggcaggtgaaggcgattgccgagaagctgctaattcttttagatttgtgcgtgtttttttctgaagtaaatataacaacgttccaagtaatatataacaagacttgatttatacacaattataagtaatatatgacagcaagaatttagcaacgagttcatctcataaaaccatgttttgtagtacaaacaagtttatcccaaaagaccataatgtggttccaaacagaatcaatgtcgtatgaaataaatcatgaggttacatctcatcacaactaaaatgctccatcatcaaatgtttagctttctcctttttggagtcatcttttttggtggcaccggggtaggcatcctcacggggctagcgttgttggtttgtactgatgtgctctctccaagtaacattgccagcttgctgcacataaatagtatcggcaattagatgtatatataaaacaattattgtatacaggtactagcttaccacaattgaacttgtcatggtcaaaacaaatgacgatcaacaagttcaagtgacgcccagcatgcgtatgcatccatttacgactatacgtacgtgcatgctaactggctagctagccgtgtatatgacacacatatacgttgcatggacatatgttaaagacctgtaggtcatttgtgcatgggaatgcaatatatcatttatatagaatttgaccacatattattcacatttatttaatgtaagaatatcacgcatattataggtgagccaaaaaatgtatcaacagtacagtaaatgtgttaatattctttaccttctagtgatccttcctggactatctcgtaggatttcatccctggttggcctccgtggggtgctaggttccgccagtccttcttttgtaacattcttcctaggttgcctacgcttcctacaagtgatgaaataaattaatattgatattttcattctagttagttgataaagaaaataataaattaccccttttttgctgtcccattgtatgggcacttggaactagcttgcctgtgacctttttctccgcatcgtttgcaagtcattggtcctctgatcatcttctgtccctttgcatttgttggaacaatatcattatctccttcaccctcatcccaccccttctcaccttcaccctcattggtagattttcctttcttcctgtgtccaccctcatcccatcccttgattcttagttttctcattcttccagcagataatttagtcagaggtgcaccaacgccaaatggtaggtcaacatgtggccactgtgttttatctgtcattggctcaatctctctaccataagcagccctgaatctattcacagagtagtagttatgcacaaactgttctagatccactcccctttggcgggttgcataggccaatacatgttgacatggcttaccagtgtgctgccattcaagacaagtacatgttctttggcctagcttgacaatatgcctcacagaaatggctctgctatggtcccacacctctgcactccagttagaacatggtacaatttttaggtgtcccaaacctctagtgtttgcccttagctgaaccataattgctgggagtatcctgccttcaggtagcctgtatgcaataattcttctcttgttccacaataccatgatcatttctctaatcttatcagcaaggtcagcaaccggtaagtccttatggtctctaatccagttattaaatgactctgcaatgttactagttatatagtcacacttaatttctggattgaaaccacacctgtaccataatagcttatgatttgcctttaaccattgcactgatgcagctgattcacttatcatttttgctatattgtcatagaaaatctcctctgtgtaagcccttgcagcaggatatatctgaccacttgcaacttggagttgtaacctgcatcctctcactagacacacattcatgtttatcaactaacacggttacctacaaaaataaaaaaaatattaaattacataacaagatgaacgattgaactaagttatccaaaaaaatattttacctccacagtagcgctgccatctagtttggacccatttatcctccaaggacaagggcccgtcgattcatcaccagacttgcaaaaacccctatatttcttcgtagttgacttctctactcgtaaatggaactccttcttgatggcatatgtccgcactgccagcttgaactcttccattgttgggtactgtgtcccaaccttcactgacgggttgttcttatcatatgaaatgacgatctcacctggtacaacatcattagtaggaatggcagcaccatcaacatcttgaccaagctcattatcattgcattgttcatccattcgacaatcagttgcttgtgtgggtatatttggtgtgccctcatctcccaatcccaaaagctcacacatctgactctcgctcatgagttcaattcgaccttcattatcaactgtctcaactatctgtatggtagaccaatcaattctttctgtattttcgacatcatttacttggggcctacaaaaaagcaaaatctagttattgtactagtaacattgatactaataaatacattgacattttatagtacaaacttactatatatgatatatagtacgataattgatgttttacacagctgtatagatcaagcatatattgaactttcgcgaccagattggctgcatggtcctcgcaaaaaaaaagataggctgcatggtctagtactatactgcttctgcatggtctagtactatattgcttgattccagatagtacgcaggcatgcaacgcttggttgctagcaaaccagagtgtttgattttacaccaatctaattaattttctctcgataaccctaggtcacatattactaaagtatttccatgccttgagcaaactgaatattacaaataaatgaccaggcgctgaaaggaaaaatccttagaggcaatacctctgcacatcaagcaccggaaggttcaactctgttatcggatgatgaactgtgggcagcagaactcttgctagagctgtggcatcgtcgctgcgattctccaatggagactgtggaaggtgatctaccgtggcttgctctccaggaaccacgtcaggatgtgcaccgggcgccgcagcagcctgggcagcaggccccgacgcgcctagggctaaggcagcaggccttgacgtggcgtcgacatccatggcgatcgtccgagcggtgatatcttcggccggaggttctccctccatggagggcagatcgctcgcgtgggggagggaaggagggctgacggtcgatctccacggcgaagcggcggcggcggtgttcacgtgtgtgaggaggagcgacggcgtctcgtgtctaatagatgaatcgatgaaattgagtaccatatgataggtgaagggtaaaagggtcaatacgaaaaatacatgtatttttagatgacaaaagagattaaaaaataaacaaaatatcattagagctgattgtaattgtttggagtcctatttgggagaaacaaatattaggaatcctattatagagaaacccaatgtttggagtcctataatagccaatttctcgctaccttggccaacacaaatacacaatacctgtctgtgaagttgcaaccaatgggaccagtgatagaaacaagttctgtgtgcgcactttcagtgcgcagaaactatgcgatgaaatggaaaggaatgtggtagcagctatgctgagcataggttctgctggattaagctgttatatgcggagtttctgacaatatataaataccttcattggacaatttagtctagatgatatcaggctgtatatcatttgagaggaatttagacagcttggtagctggtgtagtctggtattggacaagttgacaaggcctccgaggggaatttagacagtttagaattttcatctgaaatgaactaaaaaggaaactatatttctgaaaataatagaagacttccctaacaaatattagtattcttagcaattagcgattcttcttttgtttcttttgaaaataatgtgaaaagatgaccaagaagaaaaaatcttgatgaaaaccacttttggatttttagcttctattaaagcataatcagtcacttgggggttctgtttaattattgctggtatcttgaatcttggagctgtttgcatttatgtttatctaattgctctgcctatgttgatacatcatgccgtatctctaaacagtcctttcaatatattgcagcttgcagttgagtatgaggacaatgccctgtttgtgaaggtggacacagatgatgaatatgaatttgcaaaagacatgcaggtacacccaagatggcactcgttgaagccaacaaagtgttgattacatgcttatttaggtttctcctttttttatcctttcaattattgaagtcactaatgctgaaacattcaggtaagaggacttccaacgctttatttcttcagtccagatcaaaacaaagacgccatacgcactgaggggctaattcctacggatatgatcagaaacatcattgacaacgagttatgacagctgatagattattgtattaggcacgtaggcaatgttttctgtttgtagcagatgacaattttgtcatgaggctaagtattaccactaggtactagtttggtgtgcttgatgttttgttttgctccaatggtagggtttcctctgtgcaaattgttaccttgctgtttttgtatcgtgctttttttatcctcatcaaaatctaggttatgttgtgctgttctcagttaggtctgtgtgatcattttcatccctccaaatgttaagatggctttggctcagattggtcctcaaattttaatagaaccaatttggttctggagctggcattctgggcttaaattttgtcgcgaacatgggatggcacagttattgattttctcacaccgaatgtcttttctgcttgcaattgcaaggaatgagaccagccaattcgattattgcatggatggttaaagggaggactaaggtagtctcagtggatgtttcaccagaatgtc

SEQ ID NO: 4791 - DNA, 3880 bp, Sorghum bicolor
taggttgtggggttttttattatttttttgttttttcgtactgattaaccaaggcgggcaaagtgcctgtctccatggtcggtcattaacggtgacctttgattagaggcggttgtaatacccgcctccaataagatttatgtactagtgcaatatcacaaccacatatgctgcacttagatctaaccttggagggcgttgtgttgtgctacgacttgccgctgctgtctccatgctccagttagctatggccacctcccccaatcctcatcttccgccaccgttaggaatgaaagagtgagagcgagagtgggcaaacatgggcagacggacgcacggtaaggctatcctcaatgggggtttcataatgcagtttccaacacatctatattttggaaacagtgcagaagagtttcacggagataaaactctctctgctcccatgaaattcttatcatctctctcttcattaatatagtgatatatcaacatatttaatgtgtatgaaactctaatgaaactccattgagactagccgggaaacaacaggggcttttttgcgtgtgtctatgtgtttgaggtaaggcaagttccacgttggcgaggtgaactggtgtgccacgtcagtgaaaatgacaaaaacttaaagtacctactattgttagtgacaattttgtatttgtccttctaaaatcgaaagaggtagcctccgtatgagtgtcaaatagttaaatatcctcggcaaccatactattaacggaaagatgacatgtggttggtctgcgtggatctgcgttattaatccaaatggataatatttacacacgagagatgtctaggtttctaactaacttccgtgataacatgcacgaaactttaccaaatttttaccatagcatccacatgtgttccaaagacgtgtcgctaagttatgtaatttttcgacttcatttgcattttatataatttaatagcacttcacgcgcaacttggtcgccgtgttccgtgcgcgagatgttcgatatttcatgcgtgctcctggatatggccttaacatacgctatgtaaagcgaatatcaatttttgaaccgtcgaattcggagattcgatacacctgcagttcaaacccgcgtttatcgtagaaattcaattaaaccaaattaactaaagatatataataaaaagattttaaaaactaccaaaaccttaacatatacattaaataatgtgtaatgcaaaacaaaaaagtttggaagcaaaaagtaaaaaaaaaaattctttgccgagcgccaaaagtcagcgctaggcaaagagagcctttgccgagcgcaaaaattcagcgctaggcaaagagatgcctttgccgagcgccaaacgtcagcgctaggcaaagagatgtctttgccaagcgcctaacggagggcgctcggcaaagggtgacggcaggtaccccatgttacatgtgttatctctttgccgagtgcaagccgttgccgagcgcttggcgcttgggaaagatgtcctttgccaagagcgggcctttgccgagcgtctggtgcttggcaaagacgttctttgccgagcgtctccgtttgccgagggcactaccctcggcaaagaaatctttgccgagcgctgtctttgccgagagtcctgcgctaggcaaaggtggcctttgccgagcgcccgatttatagcgctcggcaaataaccatacgctaggcaaaggcgctgtctgccgtagtgaatggatgctaacctatatcttgttgggcaaaaattagagcctaataattagagtgaagcgccagagaattcggtgaccacagagattatctaggactactagccacttattgacgaggcatattgtgcggctacaaacgtatttgcccactttaaggattactccagtatatatatgaaattggtacacaaaccaaccaagcaatcgtgaaattctgagcatcgatcgagagctagtgtccccaatgcaaggcatggcacaccatcgtcgtcttcaccgccagctccaactcgtgtgcctcgtcgccgtcgtgctgacggccgccccagctgcccatgccatcttccatttcgacttccgtttggacagcgacagcccgttcttcggccgctcggcggctgccaggcatgacaattggcgccgcgccgccctcgagagcaacgcccggcaggcgaggaggctcgccaaggccctcgacaagctcagcggggccgcccccggcgcccccgccgccgccgccaccgacatcgcggcggccgacgtgaccatctccccgtacgcccaccagggccacagcctgaccgtgggcgtgggcacgccgccgcagcccagcaaggtgatcctggacctgggcagcgacctcctctggacgcagtgcagcctggttggccccacggcgaagcagctggagcccgtgttcgacgccgccaggtcgtcttccttctccgtcctgccctgcgacagcaagctgtgcgaggccggcacgttcaccaacaagacctgcacggaccgcaagtgcgcgtacgagaatgactacggcatcatgacggccaccggcgtgctcgccactgagacgttcaccttcggggcgcaccacggcgtctccgccaacctcaccttcggctgcggcaagctcgccaatggcaccatagccgaggcgtccggcatcctgggcctgtctccgggccctctgtccatgctgaagcagctggcaatcaccaagttctcctactgcctcacccccttcgccgaccgcaagacgagcccggtgatgttcggcgccatggccgacctgggcaagtacaagacgacggggaaggtgcagacgatcccgctgctgaagaacccggtggaggacatctactactacgtgcccatggtggggatgtcggtcgggagcaagcggctggacgtgccgcaggagaccctggcgataaagcccgacggcaccggcggcacggtgctggactcggcgaccacgctggcgtacctggtggagccggcgttcacggagctgaagaaggcagtgatggaaggcatcaagctgccggtggcgaaccggagcgtcgacgactacccggtgtgcttcgagctgccgcggggcatgtccatggaaggggtgcaggtgccgccgctggtgctgcacttcgacggcgacgcggagatgtcgctgccgcgggacaactacttccaggagccgagccccgggatgatgtgcctggcggtgatgcaggcgccgtttgaaggcgcccccaatgtcatcggcaacgtgcagcagcagaacatgcatgtgctctacgacgtgggcaaccgcaagttctcctatgcgcccaccaaatgtgacagcatctagctcagctgctacttatgctttgcagctagtactatatatacaaagataatttaatttgttttttttgtgtatcttcaaaattcagaggccaagataatttctctctctatatataggcattaatcatctcatcatgaaacctttttgtagggtagacattcgtgcttgcattctgtaatagccaagggataaaaacaaaagagatgaaaagaaaagaaatcatgacctttgatgcttgacgccatgacctttgatgctgtggttgccatagagtccatattgatatagtgaatattactttcgatagttagtatggcattctaagccattggcggattcaagggggggctggggggctgcagcccccctcttggactcaaaaatcttttaatagatttttttttgcaaaagattttatatatttggtattttttctatgtttattctatgaatctttgtctttgaaaactttaaattaatattaaattatcagtcttagc

SEQ ID NO: 4792 - DNA, 5659 bp, Sorghum bicolor
ggcatgaccaggctcgcgaaaggtggaaaagcgcatgggtgcttggactggagcctggagggcactcatctcgtgtgccgatgcccagcgctccactgtcgagactgaggcgcactgcgtgttgtttggagcttccatatggatggtggagctgcccttgttaactgggcgagtagtacatgcttctcttcgtgatttgtttctatgttttttttgatatgatacacgatatgttttttttggttgggtgtttatttcattggttagatataaacagatagtggtttgcgtcatgcaatgttcgtattggaaaatatctgtttgactcgacgatctctgacacggaacaaaagttccacacgccaaaagaaaaaaaaaagcatacgtgactcgtaactggacacgaaaataaagagacgcaaatattatggcggtaactggcaatctcgaacatgcatgcgtgggaaaccaacatgatgacgacgtgcatttccttctagagataaacctgataattctaatatctgatctggatttggaagaggaatgaaacgttgtgtatcattaatatatctttacgggacgttgattcaaaaaaaaatatatctttacggacgcagggttggaaggcgacccaatacattttgaaatccgacttcctattgcactagacaagagctatcggaactcatatgaacacgagttatatcatatattgaagtctagatgaaagaaaccttcttttttttatctagtagttagaggaaaatagacaaaaaaaatagatggaccaaaaaatagctaaaatttttgcctctttattaataggtataatagcttagcattattaccttgctaattgaatgattaactagctaattaaggagggagcattgcagaggcatcggcatgtttggtgagtattctttctccttattttatctttatctgattttaaaattagtatataagaccctagttaaatttaaataaagaagttgtcaattacaaacttttcacaatctacaactttagttttggccatttttccatccaagactgcttgaaaattttaaatttcactatgcaactcctacttttagaggcggttgtgctatctttaaaatcaattattaaagatggatgaaaatataaaatataggtatttgtagaggcagttaaaaacaatagcagtctctaaatgcaattttggaggtagcttggttttgactgatttgtagagacagtgtacctctataaaaaaaattctcattgttgaaaatcatttttgtagtagtgttttcttcatttctttataagaaactggatgatgtttaactattaaaataaactatcagtagtttcgcgtaaagttttaaattcttgctcaccgatatatatagaagccaatgctgtcacagtttgttatcccgatcgtcaatcattagagacgacgacacacaggccgcacccaatacgccattatattggatggccctcccagaaaaccgcaagttcatctcttgctacgtcgagccaatgatacccatgttccgcaataaaggataccatagagcgaagcagattttgcatgagcaaagccaaagatgcttgcttgcttcacatgcatagggatgatcagtgacgatcaagcttgcccagcaacgccagggagtgatgaggggagtgagcagtgacgacgtagtaactaattaataatctgatggcaaccatcttttttatctttttaatttcttacattacacaagcagttaaattaaacctgaatatataaaacttgtagcgtgaatgagtatcaaaaagatccattgcttggcctaccttgcgtaggtagatcggtgcaggtgtatgggcctaaattaataactgtgtgtgtgagggtcagctgttcattgatcgatcagctagctttgtatctcttcttcacactataaatacgctgccctagccatggcaattcgcatcacgatctacacgaagaattcagagagagaacacacacagacacatccatacatacagtttgcggtatagctaggaaggatcatatcgagctagcaacgccaagcatggcggtgaaggtgtgggtgttcgtcgtggcactgatgttcatcggtgtagtagtagtagtagggcttggagctgacgacggcagcagtagggatggcgccggcagccttagccgctgtcgtctgagctcgcccaactaccatggcgctctggcaaaggccatcctgttcttcgaggggcagcggtcggggcggctgccggcgaaccagagggtcaagtggcgcggggactcggcgctcaccgacggccaacccgaaaacgtgcactgcttactactctttcttttaattagcatcgatcgccatatttctgaattaatttgcacaaggtcgcatgcatgcatgatctacgctctgacgatgatgaacctgctagaatttcccaaaagaactgaagctaatataagctcgtcgtcgtcgtcgtcgctgctccataatccatatgcatatatgtatgtacataggtgaacttgacgggcgggtactacgacgccggagacaacgtgaagttcggtttcccgatggcgttcagcgtcaccctcctgagctggagcgccgtcgagtatcgcgacgaggtggcggcggcgggccagctccggtacctccggtccgccatccagtggggcgccgacttcctcctccgtgcacacacctcgccgaccaccctctacactcaggtacaggatttgtcagttgcatgcataagatttgctgctgctgctgatgctgatgctgatgcttttctactaggtcggcgacggcaacgccgaccaccagtgctgggagcggccagaggacatggacacgccgaggacgctgtacaagatcacccagagctcgccggggtccgaggccgccggcgaggcagccgcggcgctcgccgccgcatacctggtgttcagggacgaccgggacaagtccttggccacgcagctcctggccgcctccagatccgtgcgtcgtcacgttattacgcctcatattttcttaattttctttgtcctcctccatgcatgcacgcaccctatccggccgtcagagagagtatcggagcatctggatttccgttgcatgaattgttgttgtttcctctaattctgatagtacatgcatcgagcaccagtcaccaccaaagtgaacaaagctttccacgagcaagcagcatcgtatgtattggtattgcgtgcgtgaattgctcatgtaaatgacccaagaacctctcgctcaccacatgaaaaaaatcctccagaccttcgacgaaccccagttaacctgcaactaataatcctgtaatgtaacttctttttgaatcttgggcatattacactgctaaacttcgtctctttcgttcttgaaaaatctaaaactttgatgtttcaaaaacaatctaaaactttcataccgttttcaagacaaagattcacagattaataacaagaccaactttctttgaattgaataaaaatatgcatgcgctgttttctgaatagtagtaagtgtttaattttttactccatagtgaccaacatatatgatttatatcagctcttcgacttcgccaacaattacagaggatcctaccagttgtcctgcccattctactgctcctactcaggctaccaggtggattatttatatatattaaccgtcgaatgaatcacaattcatcatgcatctttagtagtgtcaacacacttgatatacaagaacatccgatccgtacaaattgtattacttttattactggttatttactagtagtgatttggcctctgctcgacgccctgactgcctgcctgtaccaggacgagctccagtgggcgtcggcatggctgtaccgggcaaccaaggacagcaaatacctcgacttcctgcagaacaaccagggcggcagcggaaccgagttcagctgggacaacaagtatcccggagctcagctgcttgcaacacaggttactctgtcactcatcttgcatgcacatcctcccaactcccaactggtcattattcatcagtaactaacttgatcaaccatctccttcaggagtacttgggtggaaggacagagctggagggctacaagaggggcctggactctttcgtctgcgctgtcatgcccaacagcggcaacacgcagatccacaccacccctggtatgtgtctgatcattattatgaatcaacttcaaatgatctgggcatgcagatgatcactagacgaacgtagtatatggtatgcttgacaagattttttttttttctcatctgcctctctcacacactgcaggagggcttctctttacccgcgattcagtcaatctgcagtacacaaccactgcagccctgctgctgtcaatctactcaaagaccctgacttctgtaggcgaccaagtagtccagtgcagcgccgcaagtttctctccagatcagatcagttcattcgcaacgtcacaggtaataaggaacacacacactacctcctactaatttcttggtttttcaggtggatcacatccttgggtttttttttcaggtggattacatcctgggagacaatccaaagggcatgtcgtacatggtgggcttcagctccaagttcccaaggcggattcaccaccgcggctcctccatcccgtccatcaaggttctccccaggaaggtcacctgcaacgagggcttctcgtcatggttcccgaccagcaacgccaaccctaacaaccatgtcggcgccatcgtcggcggacctgacgggaacgaccagttcagtgacaacagggaggactccacgcactccgagccagcaacgtacatcaacgccgcatttgtgggtgcctgcgctgctgccctcgggcagcagaaccagctcaaggagcctgtggacaacatagccccagtggacatcatctaactagagcagaaaggtacacagcatatgttaaggactaaggacatggtctgtcaaaagttccaatcatgctatcgccttgtaacatcaaggtttacttatatctacccctacccttgatcatcctgtatgacatgataagaagaaataaataaatataaggccaagtttacagtagtagtaaactatatctgccgagtcaaacatcattcagcagaacccaatcagaagactagagaaagcacatcagctttaccaccaatctcatttgaatttgatgggaatacaatgttttatctacaatggttcgctgcagtactccagcaatagctggacgaatcaaaactaaagtggattgttctattttctttatactgccatctgtatagtagtgtgccactaggtttctgtttgtctccccttcatggttgctggtcaaaatgaactgctaacctggtcaatccaggaaccagctagagatgcccaactcactgcagtaccaaagaagagttcccagaaccaaagatccaccgcgagaactgaagagaagatgagcagagcaagcgtctcgtatctattcaaaggccagcctgaagcttcagccaatgtcttcaagaacggaagggatttgttgtctatctcccggcttcttattgaccatgcgg

SEQ ID NO: 4793 - DNA, 8978 bp, Sorghum bicolor
ttctcataacaaatcagcgaatattattttcagtcatgacttttcaactaaacaaacaagctatgacatgcactaggatctgcgctggttctaatgttgagtccgatgaaaaaatagcctcacgttaaagtgttaaagtgtataatgctggagatttgtttatgtcgataagtgtgattcggccgatcgatctgatccgtatttgaaccacgggcaccaatgttgattaattcgattattctacaccgatgcttctcatgcagactaagatatggtgacgtaacggcgtgtgtcatggactcatggaggctaagaagcaccatgccgtgcataaacattttttcccatcgatgagatcatgagaaacgaggagattacaatcgtatgtaccctgtcctttgcaatgacatcacattttttctaaaagtacagttacacaattttatgaagtgcaggaaatccaatttttggttgtacgctctgtttgagaaaaaattattttgcttaccaaaaaaaagaaaaaacaaaccagatccgtggctggccccgaatccgacgccattgcccctggctgcccacatcctctcccgccccaccaccaccaccaccatcttctccacctctgacaagcttgcccgccgccatcttctctagctccgtcaagcctctcttgccccgttcagtcctcaccgttcctaccaccgctagctcccctaaccgcccattcacaatctccattgccttgcctacctgcctcctccggccaaccattctatagtctactagagttgagagataagaaggaagagctcgccagaactctagataccagatctaggaggaggatgaacagacctatctggtggcggatctggcgccatcgccaccgagtccaccatggccacacgtaagggagacggtgaggcgcgggcatggatgcgaggaggcggttgggatgcgagtgcgggtcgcggaagctccaccgggcgtggatccatcgcaccgccaccatgagagagagagagagattgagggctgaggccggcgggatgcgcatttttgttttagcttttccataaatttgtatattctactgcaaatggatcatgtgctagtagaaaaattgcattcattgaagttgaagggtgtgataactcatgtagtcatgtacgagaagaaccgtaacgcagccacgaaagtggttcaggactatcgtcgctacaaagttatgaaaattggatatgtcatactctctccattgaaattatcgtccaatgcgcttgcgactaacacaaggtcagttattttactttcttcaagtgggtctagccttcttgcattgattaagtttaatgctgagggacgacgacagctatacacatatacatactatatatatacagctatacacatatacatacaacggtaagccagatttccatcgttaagctcgctctctccatgtgcatttcgtaaaccactgactgtgccaacaacaaaaacaaggctagctaggctcgtcccgtaacacccggctgaggcgacggcagcagcattgaagcgggggcacagatttcttcaagccaacgtcattcagcatcggcttccatggcgaaacagaaactgaatgcttcaccggtaatccgccgccgccgcgttcccgcctgatacccggacggacaggcgggcaggcggcacggcgcgcgtgatggtcacgccccgcggcgcgcgccacgaggcattcgcctgacctgctgctgactcctgaagtcctgacctgagccagccagctgctggactggattggactggactctgctgtgcttgtgctacttactcctctggcagctctgctatatctaatatatcaggagcagcacgtgagcatgagctcggtgtcggtggtatagtatgactcgtcacttgctgtagtgcctcttcttcttcgatcgcgtcatccgttagtgagttcttgctctctcagctgaactcagacactcatggagtctcgacggagatcgcgtggtcttgcaaggttttccaggcaggtccatgccctcttcctcaagaacctctctttccaggtaacgaaatctccacgccgccacaccacatgcagatgtctgtgtttgttactgtgccatttcaagaaaaacgcaaagcaggccaatcctcgacggtcctatgtctatagctactcaccggaacgcctggttttgctttgatacccacacgacaccggccgcacagaggaggaacgcgaggacgaacgccgcgatcgccgcgttcccggcgctgctctgcgtgctcctcgtcaccatccagcgcgtggtggacagcgagctggagcggcctccgttccggtgcggctgcgtcggcaccgagtgcggcatccagtactccacgcccatccaggcgctcgcctgcgccgtgcccgcgccgccgaggtggccggcgctggtgcaggtgccgcccaccgaggcgcgcgcactgacgcgcctgcacccgcggccgtgcaaggcatccgagaagagctgccccgccaccgtgcttctcaccggacagaaccgccagcttgcccaaggtacgtacagatgtacttttcatggaaatcttgtgcatatttggttgggtgctcagatcattgatagctctttgttcttgctgaattttttggcaggccttggaaacttgctgttcccacctgttcccccacagtacggactcatgcctgctgcttcgaattcttcggactacctggatttgttctcgacagtagttcctgtaagtaccttattatcttgatcaatcattattcatgatcatcaagctgcatttctccaaaagcttgtgcttctttgttctgatgattctgatggaaggacttactgtgacggtgaatttggcccttgcagggttcaagctctctgccggcacatgtgctcttcattgaaccgggtctcgttccaaatgagaccttgtatctgctccaaccgaagtgcttatcagagtcacgcaatatttcaggacattttgatgggataccaatggaatctggtaaaaaaaaaagaatattttttctgtggttcctgaaatacatgtttgcttgtgttgaaatagtagactgcacattgcagagttacatgccacaattttattctgtggttactgaaatagctgttttcgctattgtaaactttctttctcgttgtttgctgtactccttggttctgtttaaataaattactgtaggggcctcgacccctcctgattcgtcaaaaaaaaggtttgcttgtgttgaaatagtggactgcacattgcagagttacatgccacaattttattcttatactctatgcggaatttatgtacaataaataactacactcctatcttcatcttcaccatgaaatggacacagatatgcagtgcgttcaagctttgtcgttgtggtgcgacaattcctcggtgataaataaccatatgttcaagggttataagggtgggaataagaggcgaagatctaacgagttcctcgctggtagcctagtctcaattcagaattttttgtcaaactgtcctaatagattgtaccctacgattttaataagccaagcaattattcctgtaggttatgacttcctcgatacaaacaagaggcgcttccatatatatgtttggtacaattccagcttcagcagagataatggacaccattccatgacagttttgcgtgtttcacggttggttaatatggtacttacacttgcctacagattttttttcagtcaactttttcagtgagaaatagcttacgaagtaacataatcttttcaggtgtttcttatgatagtggagaatgtagtatgacttacttttgtggctactatttccactgtaggcatccactgcatatctgaactttttaaaaggagaaaatgcagagatgcgcctcgagtttttgaaagaaatgcccaaagctgcagttaaaacgaggctggacttcaccactctcctggatgcactgttctttacctggacagttcagctcctccttccagtgagtcaaatttaacttactgaacttcagtgaaatcaaaaataagtgcgctgactatttcattttttttacaggtaatattgacataccttgtttacgagaagcagcagagactaagactcatgatgaagatgcatgggctgaaggatgcaccctactggttggtatcttacgcctatttcttggccctttcagcagcctacatgatgttcttcatcatctttgggtccattataggtaccagttaactccatgttgaatttcttgggttcactttcactgcaaacaaaatgctggcaaatcatgcagagaactcttcttggtttcgcagggctggttatattcagactaaatagctacatcatacagtctctgttctacttcgtatgtatcaacctacagatcatgtctgcttttctgcttgcaactttcttctcatctgtcaagactgctagtggttagtaaaataaaacgtgcattatgtaatcagcaagattgtatggttctctcgatgggcttatctggatggatcatccttttctgtgttacagtgattggttacatgtatgtctttggctctagccttcttggtgaagcgcttttgaagatattcatcgaggatgcaaccttcccaagtaagtgacattttttactccagttttatgaacctataaattcttcaaatcaaagtttgaattggtaccacaaactttttttttaacaaattaggacattggcttgtaataatggagcttgttcctgggttctccatgtaccgaggaatatacgagctctctgagtatgccgcagcaggaaggaacatgggaaaacctgggatgagatgggtggacttgaacgacccgattaacgggatgaaagatgttttggttctaatgtctatcgaatggataattctccttgttgtagcatttttactggaccatagacctgcatggcagcctctgtttctctttggatttctatcgacaaaacattcatcgccatcacagaaaccaatcaaattgaagaggcaatccaggagggtccatgtttatgcgacaaaacctgatgtgtccctagaggttagccaagtatatagctgaattattataaaacgaacatggatagttttatgaatttattcttcaaaaaaattactgtcagcgcaaagtggtgaaacgattattgaaggatatggacatgaggaatatgatcatctgccataatctgaagaaagtgtatcctggaaagaatgggaaccctgacaagcatgctgttaaaggattatcgctagctttgcgcaaagggcagtgttttgggatgttgggtcccaatggggcagggaaaacatccttcatcaacatggtaagtaagaaataattcctatcatgaaatgcatgtacaacaatattcagaatttatttccacgttgcttatggaatgcatgtgcagatgattggccttgtgaaaccgacttatggtactgcttacatacatggaatggatctgaggacagacatgaacgaaatatacacaaatattggtgtatgtccacagcacgagtaagatcacaagagactttgtcagtggcgatgctttattttcttggaaggtggttttgcaagtgctgtgatgctaactaaaataagcatgtacattaattgtgtgtgcagtttgctttgggagcctctgacaggaagagagcatctgatgttctttggtcggatgaagaatctcacaggtgctgctctaacacaggtagtttcaactttgaaaccatggacgaagtagaataaatcttgtaatctaccgtacaatatgagaactatcttatactgcgcatctgaaattatatacagtctgtaatgaccggaactcattttgtttgatcatgaactatatatattgtctgatccaggcagtcgaagactccctgaagagcgtaaatctgttccacagtggtttcggcgacaaatctgtaagcaagtacagcgggggcatgaaaagaaggctcagcgttgccatcgcgctcatcggcaatcctaaggttgtttacatggacgagccgagcactgggctcgactcaaggtcgaggaacgatctgtggaacatcatcaagcgagcaaagaaagactgcaccatcattcttaccagtaaccaccctagctcctcttgtatatgcatgcattgtcttggacatttcagcatatttttttttcgaaagatccgtcaccggctttcattgataagtgaagagaataatagttacaagagttatttacaagttcttgtggcctcgcagtttctcgaggccacaacacccctaataattacaaatgcagaggcgcctactggtcttagaaagaagagtgctaatcatgagagatgaggccctaaaggtacaactgttggcagcagagcttgtaggcctttgttctctgattgtattcatgctttagcttcgtcctggattgtacttagcacttggctcggcgtgctgcagaacttgttgaaaacacggttgtttctatctttccagatttcccagatagtcagaatgactatggagcgtatctcatctctcacttcattgttgttgctgctccccatattcacaaaccactgttccatatcgttcatgcatccccaattagacggtttgaggtccactgccccagtccatgtgctgaccttgtcccatatcattcttgagaagttgcattcctgaaatagatgggaggtggtctctaagtttctaatgcagagctgacaaaagtattcattgggccattctgtgagctgtaaacgtgcagctgtccaaattctgttttggagcatcaaccagacaaagaagcggcattttagcggcactttcgttcgccaagtgttctcgcagctagtgatttagtggtgcctacgaattgcaggtcatatgctgattttgcagtatactgcccatcgcgagtgtgcagccaagtgatcctgtcttcctgcagtgggaggagcgtgatgttttgaaggtgccgccataaggccacgaattctgcaattgtccgctctgtcatattgtggtcgacatcttggatccatttgtcattggttagcgcttcggcaactgacctgtttttccttctgctatggttaaatagtgttaggaatatggttgcaggagcgtcaccttgcagccagcgcgaggtccagaaggcagccttagcaccatttcccagctcaactctggttgcagcattgaagagtgctatgtcatccttgtctactggcatctgcatgtcttttcatggtctttcggtgtcttcccaggagaaccacagccaccttagccgtagggctctgctgaacttctccaattctagaatacctaggcctccatttacagttggtgtgcataccttgaaccagcctactttacactttccaccagtgagttcgtggtcacctgcccataggaatcttcttctcagcttgtctggctccctcaggaagtttttaggaggtttaatgaccgtcatcaaatatacaggtagtgagctaagtactgaccgcaccaattctcttcgtccagctacattgactaagcgtccttgccatccggcaaccttgcctttggctctatctatgatgtactgtaggtgagccattcttagccttccgagcgttagcggtaatcctaagtacttgactgggaagcagactcttggtcctgggaaattttgtagcaccgcgtctaaattggtgtcagcgcatctaattggtgctatggttctcttctgcatgttgattttcaacctagttggttcgccaaatgcggaacatttcagcataatatatctgcctcgtatatcacagcacattccatggaggaggcagaggagctgtgcgatcgcatcggcatcttcatcaacggcaacttccagtgcattggaactcccaaggaggtatgcaatgcacgcctgcacattgatcgaccagagaaacaagatgctggaaaaaaaattaaaccacctgatctggagccaagttttacagaaatcttgttgcaagatgcatgcatgatcattagtagcatcttacatggtggcaaatatatacacgaaatgcagctgaaggtgaggtacggcggcacccggatcctgacgatcacgacctcgccggagcacgaggaggcagtggagctgatcgtgagccggctgtcgcccggctacaccaggatctacagcgtgtccgggacgcagaagttcgcgctgccccggcgggaggtggggctgggctgcgtcttcggcgccgtggaggtggcgcggcgagcgttcccggtgctcgggtggggggtggcggacgccacgctggaggacgtcttcgtcagggtggccaaggaggcccgggcgttccacgttctctcatagttagtgtcagtggtcagaggtggctttcttgtccttttcttatttttagtgttaagatttggaaaatgtagatattttctcggtggaacaaggcatgctctcatactggcatggtgggttcgtgttggtgctaaggatagttctgacttctgagttgtgcaagtcaatatcattttagaatttaagaaggaaaaaaaggtaaattaaattcccttatttacaggtaccatcttgactttgaacaactttgagtgcgtgcttggttcaccctagaatttgaaacctctagttacacactgcgctctcgaatttttaacatgatattacgagtatgatacaagtttgcaccatatcaagaacgatgtagatggaactcatagaaaattctacggaatgattctgaagcaccacgacaagagattaggatttgacgaagccaattacatatatattttataaacataacttcaaaaatacttccaacattactaatttacgaa

SEQ ID NO: 4794 - DNA, 4524 bp, Sorghum bicolor
agtatttttatttttatttgaattacgtttaattatagactaattagactcaaaatattcatttcacagattattctctagttgagtttttaatttttaaataatcaatatttaatactttatacatgtgtttaaacatttgattttatacgagttaaagtttaacaatgtcaaccaaacacgattatccagatcattcccattatccaatgattatggaaagatggattttgataaggccttgaaaagtttttagattttggagacaagtaaagaagtttgggggggggggggggggggcgggggggttgtaaagattggataacgcggatgtatccacaccgtgtgcaacggcaggtatagtagcagccacagcgactgcagtagcactatggaaaagagaaaagaaaaatttatccattaaagttcaaccaaatttataaataatttaatatttctgtcattaaataaatgtactataaaagatacatttaattaaaaaaataaatactatttggtgccataaatatcaatacttttgtatacaaatttgtcaagcacaaatgttttgacttagtattacgctagattgcattcttttctgcataaaggaataatactgacacaccaaatatctaaaagaaaagaaagcactgttctctgctatacaaacaaatacaatttcattgtagttgcaaggcatgtaataatgttcttttttttacgaacaaggcatgtaataatgttcgtgagcaacataatgcttaaaatactattttttttacccacgaaaaatactatttctttttattgcagaatgaatcgaattaaataatgtttaataaaaagttatacttccgctatattatgttcgagtgcttttttcccctaacggcacctaaatttctgactgttggacttgttttgagatgtatgtaggtgcatggtgtttaaatttggaggttcatatgtgtacaatataactttcttttttttacgataataatcatgtcctgtactcgctgaagtcattcacaagaaacacaacatagttaccaagcatagtatgcttgtttgatacaactgtaatgagttagaaattaaattaaattctactttactgcactctaacacgtataaattgcagtgaacgtgagggcatccaaaccaaaggcacgatgctatgcgagcgcgggtgcctatgattttggccttgtttagtttaaaagttttattttggccttgtttagttcaaaagtttttttttaccgtagcattttcgtttgtatttagtaaatttactaggatttaaaatatccatctcgtaaattataagtaaactatataattagttttttatctatatttaatgcttcatgcatgtactataaaatttgatatgataaagaattttattttattttttgaattttgagtgtaacacctttgattgagacttcaatattcgtggacgtgtggagtcaacggttcaaggttagattacgcaaaatttaaaaactttttcaagatttcccatcacaccgaatcttgtggcacatgtatagaacactaaatataaacaaaaactagttgtataatttgtctgtaccttacaagacgaatcttttgagcctgcgtaatctataattaaataataattatcaaatataaataaaaatattacaatatcaaataaaaaaattcagaactaaggcccacatggttggacaaaagaaaccgcgaacggagacgtcgaactcgtcagggaagactagcgagtgccgtttgaaaaaaaaaaaacaaactagcgagtgccgagtggggccagaccgtccgaaagcgaagcgccagggcgggacccgccacctccacctccctggctccctccgcgccacgccacgtcgctccggtggccacgttgccgcgccgaccgccgacctcccgctgctcccgacgcttctccacctcgctctcccctcaaccccccaacaccactcaccaaccccgaaccccccggtcccggcggcggcacgactgcagaagcttcccaaatcctctcctctcctctgcccccctcccctctcgcgcctcccacctctctccagccggttccccgcgcctcgcctcgcctcgccgcgctttgcctttgcgcagggcgcactcccggcccggtatattatataacccgccggctccggtgagattcgacccaagtcgatggggctcgagatggaggtcatgtctgaggctgctgctcctacgacggctgttgtgcctgcggcggcggcgagggagccgggggtggatgtggatatttacccgctcacacgctactacttcggcgccagggacgccgccgccgccgtgccccgcggcctggagaccgccgctgaccgcgcgctacggctcaaggcaaagtgagtgccccgcctcgcctcgcctcgcctcgcccgctctctgtcttcgcaacgcaattggatttcgctgaatcgagtgaccgctgacaagtgatcataactaattactgaaaaagattataaccctcgctgctcatgcagcttcgcggcgcgcgggctccgcaccagcgtccatggcgtcctcctggtacctccaatctctgcctctgcaactctgactagctctaagcagtttcacacaggcctcgatcgttcgcatgatcttgatcctggccgtacacccgcaacaacaggacccgcccattgttctgaattttggctgttggttttgttgcaggtggagctgttcgatcacccgcacctgctgctgctgcaggtccggaactcctcctttctgctccccggaggccgcctcaggcctggcgaggaaggtaggcgtcgttcatacagttgcaatttttaataatttgtctactgtaccctggaatttcttgcactggaggctgacaggtttgctattgttcctatgctgattgtgtttcagaggtccaaggcctcaagcgcaaactctccagcaagctctcctttgtcgatgcagatgatgatcagaccattgaagaagaggatgactggcaggtaggtaaccatgctgtacgtacagaaatgctaccaattgttcagtgatatatcaactactgctatggatcttatgccaagttaggatggttgaaatgttacaacccttttgacacgttgatgcatggttgactagattggagagtgcatcgggatgtggtggagatctgaatttgaggccatcccatttccatacatgcctccaagcttccgtgcaccgaaggtataaaattttggcacatttagaactagaaatatctaatctactagttaattctaatttcgtaagcattttgcggacctgagtgtgtgagtcctgctttgccctgaaggaatgcatcaagctgttcctggtcaggctgccgatgtctcggcagttcatcgtgcccaggaacatgaagctcctggccgtgcctttgtcccaggttcatggcaatgctcaggtatgtataggaattctgcgccacggtcaaaaggttttacatatgcttctgggccaaacttcctctgtaacgaccaaatgatcgccatctgcaggtttacggtccaattatatctggcattccgaatctactgtccaagttctccttcaacgtcatcagtgactgaaatatgggaaccggaatctgagggtttagtagacagacgtgcatatttggctaatcgtagtcatagagcagtatgcgataccgatggaagcatgtatcgattgagaagtagcttatccgtactgtgtgtttgtatagcgtatccccccaccccctcgctgatacattgagatgtactgtgtgtatttcttgcgacatgtgttcgaccgtgagaggatgattcggttctgtacaatatctcaagtagttatgctgctcgccgaccgcttgtcccttatgttgtgtatacctttctaaaatttgtatggcttgtaagccttgtacattgatatgtattgtacagtgtttctactgtttctttttccctttttgtcatatagaggttaatcaattacgtgccatatagaggttaatcacttacgtacaatagttgtattattactgtgtcttacaatctggacatggcagtacagcacacaactcactgaaagttgaaacaaacgtcaaggcttctctagttctttttcacaacacaggtcagttacaagatataccaccaccataagtaacacaagaaccacccgctgagcagaacaacatacgtgcagtactcatctacagataatcacactatctgtagcacgacgacctttgtgctgctgaagctcgttcactatctgaccaagtttaggctggttctcttgagctgaacgacaccacctcaaggcccctctgcttcagtgcacccagaaacaacgactagatccgattgacaaagaacttggacaaacttcagcaggtttaacgactaacattggactcgggagtactttagcagtttttttcttgcaaggtgaactgat

SEQ ID NO: 4795 - DNA, 4212 bp, Sorghum bicolor
gtcaccatcattcatcgtttggtctcacatggatgctttgtcgtcactgtccttgctcccctctctggcagcctgctaccgaatgtgtgcgggcctctcaccttgtcattttccttgctcccctctctggcagatacctactgctgagtgtgtgcgggcctctaccttgtggatgctttgccaccttgctcaggcggatgcttggccgtcgttgtttttgtcctctttggcggatgctttgctaccgttgtcactggttctttgacctaggtggatgctttgccaccgtgacctagtccactccttaggcagcttttgcattgatctatcttctgataggttatgtctagtagggttttgggggttgtgggttcttcctcttcactgttgtttctctctttttatgtgtttctggattacccaagttagttgtttcttgttaatctttgcttcctcttaatgacaaacatgtcataaggacatgattgaaaaaaaggcaacgtttgaggatgaaaagttttaaaaaggaggctgtgaaaactctattttccaatgaaaatgtttacttccatgaggattatttccttgtatttcttgaacagctacttaaattggcagccacctaacatttctcctggttgacagccaatatggtccctgttcagtgaaattaaatcaaaactgcagggtgttgaaatggcactagaatgatggcatatgtgtttcccaggcatcaagtactatatcctgctacacacttgcataaaatatactttgctctgaattgtgagtccagtacctgtctaccaaaccttgccgttgcaactatgcttgtgaaatttgattcagtttgcatgtgctactccattgagtttctgagttcttctgtttttattttttaatagaaactgatttccattacaaaattgcctaactctgagatactagcaaggcattgatcagcaaggtactgatcagttcttgcaataagagcaaggcactgatcagcaaggtacttgcaccagttttgatactgaatacccagtttcttagaagttaagaactgtttgtcagagttgcttgcttgttaagaaactattggtcttttttctaagataatgtattctgaatactagtctcttaaacttggcagttacaaactttaataatatctgatattcttaagactagtctcttgaaccatgactagggctcatgttgggtttcaactctagcctaccgaacttccttgagactaaaaggctttgttgttgttgttgttgttgttgttgttgttgttgtaaggataatttctagatgatggcatatatcacatggtagaaaagcaaaaccacaggtaattgtaacctgcttcacatgatgaggcatacatcatggcatatatcacatggcatacatcaatttggaaacctgcttcatgcaaagcaaaacgaaccatgatgaggcattgtatcttgttttttgttttgcaaaaccacacaaagttaagttgatttgcacaaattttaatctgcagctgtatctcacagtctcaactctcaccatctaaatacaggtaatccatcatgatgaaaatttcaatggaatgcaagagaatggtggatgaaggacaaaacaaggctcagagtagggtccaagtttgagatgattctttaggtaccaaacaagatggtaaccagcgaaatgttgttgcaaaagctgcactaagtgtctccaattggaaggtgaaggggaaacgctcacaacgtaaagtgaaacaggtagcaaaagcagtggtgattgatcagatgaaaaatagacttgaaggaagcttgcagaggagtgtttctggttggaagattaaggggaaacgctcaacacgtgaagggaaaaaggtaccacgagcagtggtggatgataagatgcaaaatagacttgatggaagttcgcagccatctgttccttctgggtcacaccacaaacaacctggggaccatatagatgctcgaagcaaagttaggaagctgctccagttgtaccgggtgacttgccaaaagcttacacaagttgaggtacaaggtaatcccatagttggacggatttaccttgaagcagctaaaatagtaaagaaagaccctatctatgcaaagcttggggccattgtgggaaatattcctggtgttgaagttggcgatgaattttattatagaattgagttagcaatagttggtctgcatcgcctgcatcaaggaggtattgacacttctaaggtgaatggtgttcccattgctataagtgtcgttgcctccggaggctatcgtgatgaattgtcgagctcaggtgaactaatatacacaggctctggagggaaggctgggggtaataaagatggagacgatcaaaagcttgagtggggtaatcttgccttgaagaattgcattgagaccaagaccccggttcgagtgattcatgggttcaaaggtcaaaacagaagtgaatttggtaaggaaacttcgacatttacatatgatggattgtatgaggtggtggaatgttggcgagaaggcccaaaaggagggatggtcttcaagtacaagttatggaggattgcagggcaaccaaaattaaccctacatgtggtcaaggcaattaggaagtctaaaagtcgtgaagggctttgtttgcctgatatatctcaaggaagcgagaggatacccatatgtgtcatcaacacagttgatgacatgaggctagcaccacttaaatacatcacgaaactcacatatccaacttggtgtgaaattgtacctcaaaatggttgcaactgcacaaaccactgctcagacactattagatgttcttgtgcatggaagaatggaggggaaatcccgttcaattgcgataatgctattgtcaaggccaagcgtctcatatatgagtgtggtccatggtgcaggtatggctgtgcaaaatctttatgtattccaaataactgttaacctgaaaataattatttgtcgttatttagttctactgtgtttttgaagttaccgtatttaaatttcaaaccagaaaaaatattcctattctgttggaacttctatgtatgttacattaaggcttacggttgcccgccaactttactttcaggtgcccgccaacttgctacaatagggtgagtcagcatggtgtcaaaattccacttgaaatattcaagacaggcaagacaggttggggtgtaagatctctcagttctatatcttcgggcagtttcatatgcgagtatactggtgagctcttgaagggtgaagaagctgaaaatagacagaatgacgaatatctatttgatattggtagaaactactatgatgaagaactttgggaggggattccaccagtggttgatgtacagtcttctacctcgtcctccgggacaatgaaaggcttcacaatagatggagctgagtgcagcaacgtgggaagatttatcaaccatagctgttcaccaaacctatatgcccaaaatgttctctgggaccatggtaacatgaagatgccacatattatgctttttgctgttgagaatatcccaccactgcaggagctgacctaccattacaattataaggtaggctcagtccatgacgagaatggtaacgagaaggttaaacattgctattgtggtgcctcggcttgcaggggcaggctctactgagacattactgactgctattagctctagcctctatgtgatgcgcacttctgccttgccatcactgtaccatttcattcttcagttcatgttgtacattttttttcacagaacaggtcatagaatgtttaaattgttatctgatttgaagaattgctatcgatcctgtagggtacatgtttcgagcatgcgagtcgcatttgccttgttgcacccctctcccttccttttgttacaggtcctcttgtgttcctgacggcggccagcttctctgccagtatccaatccagtgccctctggacccttttctctgctccaatgccttgtactcatattgtattgagtctattcatgaaaagtaaccaagagaagacctttgttttcttacaacatttagatttccatatccaagagaagggtgttggtggactgattgtactaaaaaaggatggcatagaatttctcggaagaacaatttggtgagccccaaaaggttgtgt

SEQ ID NO: 4796 - DNA, 5897 bp, Sorghum bicolor
aagaaaattttgaggagctaaagaaaaggttgactatagccccagtgttgaccttacaggatatgagtaaaaccttctctatttactgtgatgcatctcgtctaggccttggatgtgtgcttatgcaagaaggaagaatagtggcctatgcatctaggcagttgagaaaacatgagttgaactatcctactcatgattaattgattgggactgatttgatgctcatctccctcctctcttgtgccaccataactgagtctattagaacaactaaggtgctcctcccccttctcacccacactctcaaagggcaatcaatgggccaaagatgaatgcggtcgaatagcgagtgtgtttcatatgctagtgtgtatcgaaattgatttgagtgcttctagtggagtacataaaaaacaaactctcaagaataggagctctcaaatgaaaagtgcagatcataatttaagggcttctattggagattatcttattaaaaagtttgtgttgtattagattgaaagctaaagagaatatcattgttcctttttgaataacagtgtaaatatagattctcacattggattattctataagagcactcaaaggctcagtcaagcaactgtctacatatctctatggctcatttccgctggacatattatctatatagtaaaaaaatagcactgttatttttttaagagaccctatcaaatggagagtgaacttagggtaactatgctcaatcaccacatgattttttgggactcgttatttcaactaaagatggcaatttttatccgaaacccgatcggtaattacctcattagggtaagggtatggctattgttttgtacccatgggtaagataatgggaaaaaagctttacccagcgggtaaagcgggtaagtgtatgggactgcattgcccatacccgttaacccatgtgtaaattaaacccgataaattatactagaatcatagaacttgtagattttatgacttgttatctagtaatgatggatttatccattagatcatttgattgtgtgttcatgtagcttgtatatttgaagagtttattaatgatttatgatattttggctaaatttgggagcctgatatattaaaacatgtatttttttcatagcaaatattcttaaaattataggtaaagataacacccgttatccgcatgggtaagggtatgaggaaaaaactcttacccgtgcatgggtatgggtaaattagcgggtaaaatattttctcgtgggtaaggtacgggtaacccatacattacccattgccatccctaatttcgacattttatcgagtgtctagcagcctagacgttcctatcagctgcttgaactattcctgacgttcttcctctatagtcctccgaagtaccaatacgttcaaatctgctctcactgtcgatgtaatagagacactacgtcactgtccagttttctttcttttttcaaaaataaagtttttaagtggaacgtgtcaatgtcgagttgacgaacttaattacacacaagcacgacacgatgagcccatccatccatccatccagtccaggcccagcccagcacacgcaagtggcagcagacgacgatcccaaattcccaacgggcagcggcggaaacttggcttccaagcacgtcgcacgtgacacgtcggacggccgacgatccagtcgtgcaaggatccgttccatgcggacaattggttctcgtgggccacccccagcggacggcccagatctaactgggctcgccatccgggccgtcggtggcctaggcccctcttcttcttggcttcttctccttcgctgtcgcgcgtcttgctctccggttcagttctttggctctgattctcctccttgcccacacctaaaagatccgaatctagggagcgggttccaccacctccgagattctcgtggcgacctcgcaacaacctttgctcttcccatcttttcagttgccgaatctctctcgccttctctctctttgaggctgttcttggttcgtccactctccggagttccgcccattttggatgtactggatttgttcctgtgaagtggagagaaattttgtgggggataggtttcgtctcggaaactcttcaactaccgttgctttctccttgctcctctggatttgcgcagagacgcaaccgctataattatcagcgattccttttgttccactcgatccagccttgttgctttcccttaaaggcggtgtctttgccaatcccacttttggtgagacagatgtttattggatctagtctagttcttgaagaagataagattttcctcgcagattagtctgttgctttgctctatcctgtttgattttgtcagttttgcccccaattttcacccggatcaagaggacccgagcattctttgattttttttcgccccacaatggccatgtcgctgagccgcatctcccactggatatggccggggagcagaactagaaaccgcagaggccgcgagccaccggcggtgagcacggccgtgacgaaaggcctcttcccggactccccgtccgggttccgggagccagaccccgtcgggcgcccgggctccggcgcggcacggccgcgtaagggcaagatccgccggcgcggcgaccgcggggaggatagggtcgacggcgagcgtggcatggttatcgtacagtccgacggcgacggctgcctgtctgactcggactcggacggctccgactggtcaatcggctggctcgagccgctcgcgccggagttgcagagcgacgcggactccgagggcagcttcgccgtcctcgtgccgtgctatcgacacagccgcgctgaccggcctgcccgtcctgatggtaggttccctggtcctggtggtgtcgcccacggcggagtttcaggtgagctgaatatgcttgtctttcttcattgatgactagtacttagtagtcctgaatatgctgtagtgcagacttcatagagttggtggatagacagtaagtactaagtaattaattacagtacattactatggttgtctactgtcgatagtcataacacaacttaccttgcctaaataaggttaccatatatgatatgagtacgacatagctgtacttgatacatgcttgtttcctcttcgtttactatgctgctgcagtgccatgatcattcatacatgtcgtttacccaaaaactatcacattagtagtatccctcattttttgtatattgtgtggtgttccaagttccaactaataaggttggttagtgatgctatgaatcaagtcaattactgagtttgctcagaaacctctaatgaatgtttcatactcatcactttttctattgtagtcataaatttatcagactccttgaacccaccaaataattggtcagcagtacatacacatacggcactgctgtttttgttcttggagatgtgccctgtcggctagtctctgttaattttgtgtctagtttctaaatttggatagcttcaatactgcaaagcaccgagtttggtcctactgttctgcttgctagtctgagctttagtcctacacatccactcttttcgtgtcttctcaactacatatcttactattagcattgaaaaagtcttagatgtgaggcattcactataaaatgaaaatggatggtccctatatgtcattggtttttagaaccttgcgttttgtgctattgttgatcattagtgggggagtcagacagggaaaacctttgtctccatcttgatcgcaccccccaccccacccccgaccctctgttctgtctttatcagctcacctgctgctgcagtcacgacaaaccaatgttttctgatcgtccgattaatcgcgattaatcgtccttatcgatacttagcactcgattaggccctccgattagatcagagcgatcagaaacctgatcgtccgattaatcgtcgattactcgcgattaatcatccgattaggtctctgggtcgatcagatgggctgcttcagttactgggctatatttatttgggtgaggcccattatggttttcttatatacctcacccccactctttctctccttactcctcactcccactcccactccagccatacatgttcgcttgagcttatctgccaaatctgccagctattcagctgtttttgtctcacaataaatcagcaaacagtactttaagccatggcttatgagccaaatgaatatggaaggcttgatgtctactatataaatatatagtatatggtatatataccatacatatatgatatatagtcctgctatatactaatgattatacggatgattagacccatcagaggtcgattaattgtcctgatcgtcgattaatcatcctgatcggaaccagattgattaggaacaataagccgatcagaaaacattgcgacaaactttgagaattcaatctgagcatcccatctctaatcattgtagtgatctttgcatcaattgaggcacatagaaatagttttgtgttaatcatccctacaaatgtatctatattgattattttctcactcccttaacaatcatgtatttgtttattcacttcgcttatcagattttctgaatttgacctagttggtaattaccatgtatactgtatatgtcctaatatagttatgacatttgatcatttttctgtttttgttatttctattgtgagcataattactgcctccgatgttagccttctgatgtttgtcgcttgtctctattctgtagataacaagaattttgtggagcaatgggtgtcttcccttcggaactgatttctccagttccattcttagctggcttccatgtatatacagtattgttacattcaatctgtcatattcctcatgtgtgagacaacctaaaaggggaaaggaaggggacagaattaaaagggtgaaaggaagaggacagaatcacagaacagaacaatagcagtggaatttattaaaaaaaaaagcaatggatgggtgtgtcattcttcctgaggttctaaggctatggtatttcttgcagagtaagaccatcgtgagaaccatgatttgtgattggtatgaaatgttattgacatttctaacaatggagcactgaattgatggcctcattatcccattttcttctaaactctagaactacttgtatatacaatcatgccgactacatcattggcatgattattcttctgtattcatgaacaactggaactgctcttacggattccatgtatcttctgtatcaaaattgttttctgtttgtgaattgctttcaatgtcaatctgctggtgcatggatgttttttatccctcatcatcattaattcggctatggcattttgtgaacactgttgacaatttatagatctttgctgttgtggcattctgtactctgtcgataattttttctttatcagtataagctcttgaattcctcaggccacaaataagcatcatgagacttgatcatagtatgtctgtttggtgttataaatgtctaaaatttgatcaaatatatgatgatttgacttaggacaaactagaatgttgggatggtgaaagtagaaaataccgtcgccgtttggtcttggctgattagtgttagttcattctgttctgtccatcttatgaagtacggtacacagtgatcctgaatgacgatgtaaaccaccccctgtgaagacaatattaaaataagttgcatctattttcaattttttttcttaaagaaaatgttggctccactcttaaattaatgaaaatatcggatcattataagttgctgactcaatcaaattttactaaaatgtcaatggttgcaacgaaacatgttgactaa

SEQ ID NO: 4797 - DNA, 6729 bp, Sorghum bicolor
gtttcacttgacctcatgaactcaaaaccaattgatctatttgaccaatggtgcccaacacaatggataaacatggcaacttgttcctctattgttacatgaaaagtgtcctctagcaaggcacgtgatctaagttcaacacatagtttatgaaagacagctttccgcatacgcaactcacttatgcaatgggcctctgtaccatgatataaacgatttagacgtgccaatctatcaacatctctatctatcatgggaccataagttatggcccttcttctttttcttgatttaatcctatacagatgcatggctagacacacaagaataccagcaattaatcttctcctccatatatattggcagtagtccaagtaatactgcacgtataattttctttgacccatctaaaacatatgttaaaaaatatgaaatcagcaataaactagaaagaagcatcacaatgttgaattattcctccatcagaaaatgaatggcaaagggggaaataaaattaccttctctgttgacaagaggtttccgaacttgaaccttcttgatctgaagggactggttgttgcgcatcaccaagaccacaagatggatggatctacacctcgttcactgagctgtttcagatctgcacacatggaagaaaaccatagctaaagtatcaccaggtctagacacatgcatacacacagagaagatgggaagctgaaactcaggggatgtctggttacctcgtcaatggcctacccctaccggtggtgctctcctggcacacagaggcgcgcggccctcctgcggtgatggcgtggtggtccggcgatgcacgcggcgccctcacgcgaccccacagcggcgtcctcgcgcggcctccaggcggcgtcctcgcgcggcctccgagcggcgtcctcgcgcggccccgagcggcgccctcgcgcggccccgagcggcctccgagcggcgtcctcgcgcggccccgagcggcgccctcgcgcggcctccgagcggcgccctcgcgcggccccgagcggcctccgagcggcgccctcgcgcggcctccgagcggcgccctcgcgcggccccgagcggcgctcgcgcggccctcgctcggccctccggtggcgcctgcgctccgtccccttccctacggccggtggaggcggacaggatgaggatgaggaggagtcggggcgggtgcggtaaaatactgggcgagatgcctttttcgacgcggtaaaggcgcgccacggagtctatggcggcaaaatcggccgccaaagcccgccacactttactttcgtgaaatctgtggcgagggcggtttcgtggctgtggcgaccttacttttgctctgaaccaaacacttaccaaaaatcatgtggccaacttaagtttaggcgtggcaacatgtggccacgaaccaaacaggccctaactccctagatcatcgtggtccatgcctcccggcggcgacgccgcgataggggcacagtctttcccaacttcggccttgtttagttacgaaaagtgaaaaattttcggtaccgtagcacttttgtttgtttgtgacaaatattatccaatcatggactaactaggatcaaaagattcgtctcgtgattcatatttattatccaatcatatttagtttttatttttgtctatatttagtgttttatatatgtgtcataagattcgaggtgacggggaatcttgaaaactttttggttttgagagtgaactaaacaaggccttcccatcgtgctctgcctccgctcccatgctctgccagactgccgctgcaataataaagcttatccatccatgtctggtggtgtgccccagcgcggcgtctagtcagaccactatccgccccgacttgcgtgcaccagcagcgcggccgtggcgcagcaggctgcacactccagcccagcagcagcactgcagcagtagcgccaccaaaactcccacgaagccggggaaccccacccacgaccacgagcctagtctactatgctcagccgactcgccgcggcgcggcggcagcagctgctgctacccgcgcgcggcgccccggccgtcgcgttcgcgtaccgctcctcctcgacagcggcggccgcggtccacggggccgcggcgcccgcgcccgcctccgcctccgtgctcccggacacgctcgacaggggctccgacgcctaccagcgcaacgccgccgccgtcggcgggctgctctccgacctgcgcgcccgcgtctcccaggtggtgtgggtgcccaccccccctccccccacccccccggcgtcgtttcctcgatcgcgctctctcttcctcgagctcgctttgtgtctcctgattgaagacggagagtgtggtgtggtgttcccccccttgtggccttgtgcttgtgctgcaggtgctgcgcggtggaggcgtcgaggcggtgaggcggaacgcggcgcgggggaagctgctcccgcgggaccgcatcgaccggctgctcgaccccggcgcgtccttcctcgagctctcgcaggttcgctcggcctctcgttttccctgcgttgatcaggccgcattattgtgaagcgaacgcaatttctgtatgattggcccagcccgtaatgctatggatttgggattagggtgtgcaagaggcttaaatttccgcagattatttgtagttatgggctgctgttcagtattcaccccctttttcagcaaacgattgcaatcgaggtagcatagcaatgctcctccatgagccatgatatatcgcccattttgtgactccaaagtctaaacggtagtattgtggcaccacaaccctgtcctcctgaattttgtatcagcttcatatactaggcctgcatgttgtggttggacatgagctacttagacacgcggtgtcttcccaagttctaccagtgccctggacccaagtgcctctgcattttttgcagtgtcagtatctaggaggatggcctagaatataaactattgttttcattgctctacttcttgttctacactgcaactgttgatgttaagttcttactatacagcttgcaggctcagatgtttatggtgaagcattaccatccgcaggtataataactggcataggacctgttcatggacgattatgtatgtttgtggccaatgacccgaccactaagggtggcacatactatcctcttactgtcaaaaagcatctgcgggcacaggaaatagcttccgagtgcaaactgccttgcatctatctcgttgacagcggaggtgctaatctccccaggcaggctgatgttttccctgaccgtgaaaattttggccgaatattctacaatcaagctaagatgtcttcagacggtatccctcagattgcattagtcttaggatcttgcactgctggtggggcttatattcctgcaatggcggatgagagtgttatagttaagggaaatggaactatatttctagcgggtccgccacttgtaaaggtcagtattctctggcaaccattttgtttattttgtacattatgagatgagatattgggcagtgcctgaatcatgccttaaagtctaaaagaccaaattttgtaggctgctacaggagaggagatatctgctgaggaccttggtggagcatcagtacattgcaaggtatcaggagtctcagatcattttgcacaaggtaaagtttaacagcacttactgcatcatatgaatggaattaattccctcttggaaatttgacatactttaaagtcttatatttgttttaccataggtgttcatcttatttattattctgttttagttacatttcaattgatgctggttttatatattagacaactcccacaatgttaattgatgtagatgaacttcatgggcttgagttggggcgaaacattgtgaagaacctgcacttagctgctaaaggaacaaatattcaaagttctgcttgtggttaccaagagccattgtacgatgtagaggaacttcgctcaattgcaccagctgatctgaaacagtcctttgacattcgttcagtaatagcccgtattgttgatggaagtgaatttgatgagttcaaaaaattgtatggaacagtaaggatttcgttttggttgaatttagctgtcatttgcattctgcatcttatgcattgtgcaactcaatttgtttttctttaaatttatgcagacactagtgactggttttgcaaggatatgcgggcaaccagttggaattattggaaacaatggcattttgtttactgagtcagcgctaaagggctcccacttcattgaattgtgtgctcagcggcatattcctttgattttccttcaaaacattactgggttcatggtatggtattccatttactcttcaaattacttctttgagctctttcatttcatatcccactatacacatagtacacagacttattattgtattggcagtttttagggcaaatcaaaattattacctacatagacttattgattatgcaaagggactatgttcatggaaaggtacctttaacgagtgcagaatatagaattccatagtttacgttgatagagtgcaagattttgtacagtatggttggattctaaaacttgacatgcaaattagtattatcaagtatgactatgagacatttaatctttttgaaggacagtatcatgttcactgttggttttcctgctgactgctgtaggtcgggtcgaagtctgaagctagtggaattgccaaagctggagcaaagatggtcatggcagtttcctgtgctaaggtcaccctttctagaccctttgatgacttatacaacaaaccttgcaccaatgaaacttggcaataatatataatgcatgtgtacacaggttcctaaaattacaataattgttggtggaagttttggtgctgggaactatggaatgtgcgggcgtgcatatagcccaaactttttatttctttggccaactgctaggatatctgttatgggtggcatccaggtaagggccctcacacagtcacacttgttattattgttattgcagcaactagactgcctttacaaatctaaaagtgaccatgttaccattgcctggcagagaatgtccataatgtaatcgggtcttcattgccaatattttgatgcaaggaagattgtggcatttgctaatttttagcgttatcatagccttttgaagatgtgttatcagttcataggcattaagaaaaatgcgttaaggtgcattaaactcagtcagattcgtttggagtctcaacactagcactgctcgaatcctaatatttagaactagatacactgtccagctaacttttgttgcctgcaaataaaaataaaatattgaaaaccatgcttccgtgatgcaaaagaagtgtgatgcagtaaactctttatattgtgccgagatgctgaaagttgtggatttttctggagtttctgtttcttgccagagtcatgttcttctgacctttaacatcttcgtccatatgaagttgtcacaatcatgctgaacattttcctgtattccattctaattgctttcatgtaacctcatgcaaaattaagctgtgaatcccgcaatatatttttcactgttgtggaatgctaataaacaccgcaaagcagtactatcaatcaacacttcttactgtaccttcccttgaacctttttcaggcagctggtgtcctcgctcaaattgaaaagaacaacaaaaagagacaaggagtggaggtatacatatcattacttccttgtttcagaaaacactagacagctttcactcgttgaaagcttgaaggtcaaaatgactccttttacatgacgagttcaattttttgttgatatatatacagtggagcaaggacgaggaagaagccttcaaggcaaaagtggtggaggcttacgacagagaaggaagcccgtactattccactgctagactatgggacgacggggtcatcgaccctgctgacaccaggcgggttctcagcctctgcctctctgcttccgccaagccggttccggaagatacaaaatacggtgtattccggatgtaaataaacgtgtatgaataacgcaaccgtattttaataaaaacggcttccatgcgcccaatgtgcgcgctggactttgccttctgcacaaataaaatttcgcccgggttttctgtcgtcgaaatgtgtggcacgggacagacaggcaccgtttacctaatattttgactgatggtacaaaagtgttcttcatttattttttattattatactacatgaatggaaagtgttcttcatctgatatccactcttttgaaaagaccagcaattaatactggtagtttgatatttttttttagcaacagtagttattttttattgcttttttagaattatatattttttttattgctggatggtttgagtaaaatattcagcatggcccactagaatgtggagaaaatcttgggcctatcattggtacaactcgatttccgagcccagcccatcgtctagtctaaccaaccaaaccaatgaccgtaccgcgaggcagccagtgacgagcagtccacagtccacgcctctgctcccccggtccaccggcacccccccgacgccgtccgttcccgatccgcccgccgcctcccatgtccggccgccacgcgccgcaactccggctgg
